United States Patent Application Publication US 2022/0102000 A1 - sequence listing, part 2

SEQ ID NO: 160 - DNA, 5628 bp, Unknown
  16S sequences of unknown bacteria
cccgccggtatgcgcaggagctgtcaaagcaaacagatatccctgctgtcagctatcaagaagcaccgccgctttccaaactggaaacgatcgtgtatatcggtgcgctgtatgccggtggtgttttggggctggccaggacattgcgcagtctgtccttgcgggacgggcagaggctggtgatcgttacggtcgggctggctgatccggatataccgcaaaatcgggagaatatccggaactccctgcaaaagcagattcacgcccagctatatggcagagcagcggttttccatctgcgaggcgccattgattatcaggcgctatctctgggacaccgaaccatgatggcgctgctgcaccgatctctgcaaaagaaaccggcggaagaatggagcgaagaagacaaggcgttaatggaaacctacggcaagcaggcagattttgtcgatttcgcttccctgcggccgattatcaatgagatgcagagggatacggaatgacagaaccgataataaacattttaaggcttattttcattggtacggctaccacaattgttcgtattattggacagctcgctatcccgacaggcgagcaaactgttctatctcccagcatattcgcacaaaacggaaccatgccggttgcttttacgatttacgggatttttgcctactccctgatcgccgcgctgttcctgctcatacggaaaagaacgggcgggaaccgtatctggcaggggctgcgatacggctttgcctgctgcgcagtgtggatcgtctacctttgggagcctctgccccatgtggctcccttggatcgcatcacctatcctgtggcggacggcctggctctcatcgtcatggggctgctgctgggctggctgttcgggcaaacaaggctgcctgtaaaaaagcgcagtcggaagctgcccgcccttcccggacttatcataaccctttgctttatagccgggcggctgcttctgtactgcgttatcggtatttattcgtccttcccagaaaaaaccgtcgagaccctgttatggtgcctgctggcaggttttgtgattgcctgcgctatggcgtggctgaaccgttatgtggacggtaacagccggatcaaaagatcgttgatcctgggcggcctgctgtttggggtggatctgtttttgttcaatttctttatgccgctggtttttgccgccgacatccccgatctcatcctgcgcacactgacagatgctttaaccgtggcagtgggctgcctggcgtttccgaatccgcagaaaggagcgcgtattgatggctaaaaagcgaactgtccgctttgtgaaatggctgctcaaggttgtgatatcttatgcggtgtttatcgggatcggctggcttctcgggcggatccccgctgaaagaattggcctttccgaggatatgtttttcgatctgcggatgtttttcatgctgtttggccccatttatctctctctgatcgtaaaaattgttttgacaattctggccgcaataaagcataaagaaaatgacaccgccgaacaaaacaggggagttctgcttgccgtcactgccatattgatgcttgcaaatctgtccaatgcccagaccgcagcggatctgagcagcggactcatcgaaagcaaagggctgaaaagcctgaacaggagcaaacggtacaatctgaaaggcaagcggtttttaaatattttccttcccatcgccttttatatgctgatcctggagatattgacgctgctggtctgcatcgtcaccttcgcaccgttatccaacgcggcaagcaacgcttttatttttaccatcgccctgaccgctttgctcctgctgttgatcccactcattctcacttttatctccgggtttaagggagacaaggcggaacatgaaataaagcgggacaaggaacggcaggccgcagttgtgtccggcaacctggtcctagaaaccgatcccattcgccgcaaacagtatctgcggctgccgaagctgcttgtgctggcggtttgcccgggctcgttcctgctttcttttctcgtgctgtatttcaccaagaaccatcaggaccagttggcggtcttgatgctgcgtcagccgtttatggctctggcggctgcctcgatcttcgctgtgatcccgcttctgctgtactgggcgaactgctcagggacgtctttggttcagcgcgtgtatctctcggaaaaccggctgtgctataccggttatagcggcagcatggacgagcgggtggaatttgcctttgtgctgctccggctgaaagagtattctgtgggaagacgatccatctgtatccggggaatatttacccggaagacaaaggacgcctacggtacgcatcagaaaaatgccttttccaagacgctctggattccccgcacctttccagtggagcaggaacggatcctgctggattttttaagaaaagcgtagccgtaaaatgatttgcgctcacacactccaaaaaagataacaaaggaggcttcagaatgtataagacgattgttgtaaaatactctcctaaagcaaaggaaatggcggcaagaatcgaagatgtagccaatcaaatggaacaggaaggatttgaacttatttcttgttctattacaccttcttccaaggggattctggtttttagacagataaaggctccccaaccgaccgaagtttgtgagcacgaaaaaggataaaataaaaattccacccaatttacgctgcttacctgtgaataagcttatcctgctacacacacagcaaaaacatagaatcccttttcaggttgtgctgagcagtcagttttgcaacctgaaagggattttgccattttgtctattactgctgcgcagcttcaagtagcgcctttttaagctgccgctcgatcctcaggaggtccgcttccgcactctggcgggcagcgcagccctcctgccggtgcagtcccagagcgatcttgatctggctttcccacagtggaacggtgctgagagccgccatttggattttatctgccggcattttatcgttgctctggatcaaccggatctgcggcgcagtctggatggcgacgtttttgctcagctttaggtcgtgaattttcttttcaaagcggttcacggcgtctacaaaatctcataccacctgggcgctcataggatcgtcctcgtccgacgcctcggcatgaagcttcggcaggttggaagctttatccagtatatcatcgcctccggatgaaggacagcaggactgcaagaatcccaacaagaaggatgccggccgagagacccatgaggataccggaggtgaaatcctgggacggagatccgcccgccgccctggaaacaatccccaaaacaataccgagcaggatcagcagtacgccgatacatcgtttccggctgctcctgagcttttgccttatccgtgcgatggtctcctgaaaagaacgatttcccttcatatcgctaacaacctttcctgtgcatatataaaatccaatccatttacatcctttttaccgcatccatagccagtgcggaacgctcacactcttcggcggacatggtgacctgccagcacagcggactgcccttcattttttccgctgcgtagctcaagccgttggtgcgttcgtccaaaaggggatggtcaatctgctgcgggtcgcccaacaggatgattttcgtacccatcccggcacgggtgatgatccccttggcctgcttgggcgtcaggttctgcgcctcgtcaatgaccagataggttttggaaatcgaccggccacggatgaagttaagggcctgggcatccacaatgccccggtcgaacaactcctctacttttccggaaaggctgcgctcgtcggcaaaccgttccttttcattttgatccaccaggagctccagattgtcgacgaccggtcggagcaacggggcgattttttccgattcatctccaggaaggaagccgatgtcatcgtcaaactgggcgttggggcggctgatcaaaatgcgccggtaagccggttcctcctgttccagcatggcgtgcaggccgaccgccaaggtgtagaaggttttggctgtgccggccatcccctttacgatcaccagcggcgctccctccgcatcggccatcaaggcctcctgtaagaatttttggccgacatttcttggggaaacaccgtagggctttttcttatgaaaagagagcggaacgattttcttcccgtcaaaacggccgagctgggttttcctggcggattggtccgctttgaggatgacgaactgattgggcatgagcgtcacaggaagcttttcaccggcttcgtccacctgatatacatcctccggcgtaatatgcttttttttaaagtcctcgaatttcttttccgctacaaatacctcgcaccggccggtatactgctcctcgctgacaggcgcctgctcggtggtgaaatcctccgcctgaatccccagcatctgtgccttgacgcgcaccacaatgtcctttgtcaccaggataaccggcgttttcctgttttgcaggccaaggcagacttttaaaatccggttgtcgtttttatgatccgggaagccttccggcagcttcacgtccacgcagttgacctccaggcgcagcgtgccgccgccgggcagggggacgccttccagcaggtttcccgccgtgcgcagcgattccagataccggatgacctgccgcgcattggcgcccctttccccctctgcatttttcaatccatccagttcctccaggacggcaagaggtaaaacaagatggttgtcctcaaaggattggagggcatagggcgcctggatcagaacattggtatccagaatatacgttttttgcatggcgttttctccttttcattacagaaatttgattctcttcataacgaaaacagccggtttttcagaaaaagcggcgcaaagcaacgcacttcctccggaaaaccggctgatgctatacaggcaatatgctaggaaatcatatagggcaaaaagcataggcaatccactccatatttctattatacatttgatgcatttggttttccatataaccggagttaattatctgtaaaatacaagtaaaacaaatatatgagtacctccggctttcttgtagagcgcatgtgaactttttaaatgatagttccgtctttgaatttcaaatttctgataaagcaaaagcggaaatttaaatgggtaagcctgtcctttttcagccaaaccggcacatattcgctcaccgtcttggtttatcatgacgagagtctgcaaggcattaaaaaattgtacacttatatttaattttcatggtataaaaccatcgaacaggaacggcatttaccgttcctgttcatagtgtttgggctttctttgccgttgcgtctttgtctgttgtttctgtcgcaggcgctcccggacggagcgtgtttccgcttcctcgtggagcagatttgcgacatcccgcttgctgtcaaacatcatcagcgaatcgtatttctcgccataggtgtcctgcacacgagtaaccgcagagcgttctttttccc

SEQ ID NO: 161 - DNA, 22327 bp, Unknown
  16S sequences of unknown bacteria
gccgttgcttcctaaaaagacatcttttaaaaagtcgttttctcttttttgaaattagcgatctacactcctccaataaggaatctttaaaatttttccgtcgtaaataaacggaaaaattcggcgcaatcgtcgagccaggcgctatttttgcgcagaaactccataggcgcattgatttcatagctgcacgaagacgcgccgtgttcgccctggggatagacgtgcaactcgtaaggaatcttgtgatttgccagcgccaaagcgaacatgagcgagtttttagaagggacgcagttgtctgaggaagtcgtccagataaaagcgggaggcgtcgtatccgtcaccagttcgtccaaattcagcgtctttaaaagctccgctttggcctcttccgtatagccgagaaggagatgcgcgtaagaatcctcatgcccgcacttgaaagagatgacgggataccccaatcctatggctttgggacgacaatcgagctccatgcccgctttctctttgacggacgcatactccaccgctaaatccgcggccaaatgcccgcccgcggaaaagcccacgacaaaaatttcttcgggattgacaaggcactccgccgcattcttttttatgtaatccattgccgccgccagttcgatgagttgttcgggataacaggagccctccgtacaggtgcgataggtgagaatgaaggtctgaaatcctttggcgagaaagtaattcgccacgggttccccctctcgcttactcaccatgcaatacccgccgcccggaaccaccaccaccgcggggcgcctccattcgggcgagggaacgtcaaacggactttcggagagcatacattccaattctcctccttccagcccgtacgtttcttttaaagaaaccttatagcttttcatcttatttctccttttattttttattgagataaagcacaaaaagtgctttatctcttcttataagtgtttataggaattaccataaaatggattgaatactgttttttcatgtatcgtttttaatgtgtttatatctctctacatcttctttttgtaagcgcgggcgtcaagtgaaaatgtattgttacgcagtccaaccactttttaaaggtagtcaatacaaaacaccccctttgtcatttttacgctacaagaccgtataacacaaggtattatgagtgcctgctccgtaacttttccttgtgtatagcaggcgagaacagtttactgatttcgcccgcttgactgccgcgtgagcaggggcagacgttcttgtcaatggcggtacgcagcaccgtttatttaccattgataggggtgactggctctgctatttcttacaggtaatagctcgtttggcgaggttactcaattataaactcgctataagtatttgcattcagacattcatataatacttttttcctaatatcaatcatatcttccggcaatccgtctattccaaaccatctcaacccggaacacttttctggttctgcaataaatggtatgccagtaaaagcttttatgaaaaagtaaatatcgtagtaagttctatttccgtttttaccaatcctatgtgatagatgtgcaaatttcacatcgtttacgcttactaaaatccccatttcctcttttgcttctctaataactgcttgagttgctgtttcattttcatcaacatgtccacttccggcaaaatcccattttccatccatatatcctgtatttgctcgtctggccaaaagaatttgattttgtttgttaatgattataggaaacacggccgataacgttttataatgttctgccaagttgctcacctcactaaaaataatgtagttgctttcgctgatgaaatcatatcaaaatcatcttcacttgtccacttcattcagtggacttcgcatggatagccatttatataaaaacaaagtgggtttgggacttcccaacaagcgattttttggaagagggtacccccttcctatgcttgttctttcttttctcgcactcaaaaatcggatcggaatggaatggaacgaaatccgcaaaagtcgaaaatacccttttataaaggcgataacttcaatcgaccgcaaaagcaagcatattttctcataactctttatgaatgcttatattcccttatggagtacgggcgtcaaaaaagcgtcaaacggctttccagtccccgatacaggaatgcacaaaacctataaaacgtagtattcatgcgggttttcggcgggagcaagcccccaccctatgtaaaccattctacaattttttatagaattttgctttgataaatttagaacgactccttgcaacgcgcggcggtcatagaaaaatttgacgttcgcgcatcgaaattttttaagcccgcatatacgactgattttcgccttatcgggtgaaaaaaagggagagatagagcgcagaacggcgcggcggaaaagaatatctgccctgcctcgcctcggagagagaaacggacaaaaaatgcgcatggaatgaccgcgcggcacgacagaatgaaaaacgcggctcgatttctcgacgattctccgacgacttgagggaatagaaacgcgctttccggcaaccgacggcgcaataaaacaaagaagctacgaagaagccgcgctgcaacaggcagaagagatagcgacaccaaaggcaaaaacagcgtctgagcgaaaggtgacgcgcgcagaaaaagttttctttacagacagcaaagtcccaaaaaagcggtgccgcgcggcaaactcttattccgcaaaagcacaccgcgcctaaacggaatagtctgatgaaaaagaacttcttttcggaaaaaaccgaattaaaaaatgggttatacaaagaaacttttttcgccgacaaaaacagttctaagcaaaagagtttgcgtaaaaaaattccccccgcggattgaaaagccgaacaaactattttttgcgtatagaatttatccacaaaccgaaagcttacgggaaacaaattcccgatcgaaaggagcacggacagacggacggctaaaaaccgtccgaatcgtcaaaaacgtcatttttcgtctgccctctgcacataatggaaaatcgccccgtcctttgccacgctgccgaaaatcgggcggcgggaaaaataatcaagtttatacatttcttccagcatctgctgcttttcgtaatatttaaggctcgcctttaaaaacgcctttacctcgtccgaaaagccttcgtccgtatacagcgttccttcatagtcgtacggcgtccaactgccgtcgtcttcttcgacaaagaccgtaatgccgtcgaaatacatagtattcgtgaacggcgtatttgattcctgagaaacgaacacgctcgttctatccgagaacatactgacgccctgatacagattgagattgtaattatatcccgtcagttgcagtatcgtcggcagaatatcgaacgaacaggcgaatttatccacgatgacgccgccttggagcgcgctgcttttgtccttgctcgcccggaaagtcaaactgtgatagccctcgtaaaattctttatccagcgcaagatcgcagtccatgctgccgccgtaccagataaaacagggaatattgtagagcgcagtattccatgtttcgccttccgtcacgcctttcaagtagtaattctgattgttatagtacgccgaatggtcggcatagaacacgaatgcggtgtcgtccagttgtcccgtgcgctgcaaatcgtacaccagagaattgaccgcttcgtccaaatccatcagcgccgcctgataccgcttatagcggaaatagatctcctctaatttggagggggaatagatcgcggtgtcgggatcggtatcgaggcggacgcccttatccccgataaaggtttccgcatacccgtcgatgatttcgtaatatttctcgaagcccttgatggacgcgtctttggcaaatgcttctttcagctttttctgctccgcctcccgctcctcctgcgtcatgtccgaatcgtaatagcgctcgtcgttgaagggataatcgccgatatcgagaatgtcctctttcttggtgccgtgtgaggaaagcgtcatctgctgagtaaagaacgcggtatcccccgcctgcttataggaatattcggaaaaataatttttggtgacgagggaatcccgatcgaagtcgtaaaaactctttttgacgatgttgccctcctcgtcgcagccgtccagcacgggcatatcgtccagaaaatgcgacgtatcgaagccgtatgccttgcccccgccatgcgttacgtcccgattataaaagctcttattattggcatgaaaataattcgtcgtgtaattgttttcccggagcagattgggcagcgtaaacgaaagctgcgcgtttttcagtttcgtggagggatcgctgtttttgggataactgccgagaatggacatcgcctccgaaacgttggtcttgtcccgcgcataatattcggtgaaggaaatcccccccgatgccatggcgtacagcgtgggcgtatattcccgattgatgccgtaccattcgcccgattcgatgacgatgagtacgatatttttaccgttgagcgcgcccgtatagatattttccccgtacgccgattcgctcatttccccttgcgaaaaataattatccaaggcggaaagctcctgacggccgccgttagagccgccgatgagcgagccgagcgtattggaaaaattcatgaaatagaagccgaaagagccgaattttttgagcgcctttgcgggaataaactgcgtggtatataagagcttatcgtcgttataatcggcgagttcgtccgaaacggtagtgctttggaaggtactgatggtggcctgatagagaatcatggaagcgttttcgccgatgatgcagcacaccaggagcacgatgactgcgttgcgcgtaaagtgggcgcgctccgtcctgatatttttatggaggagaatcagcgccgccatttccgccgcgtacagcaatatcatgcccgcaaacagccaccaattgacgaaatcggcggaaaatacgcctcccacttccttgacgagattgatcatgtcgaggctgaacaccatgccgctcatactatacaacgcttcgttgataaacaccaccgccacctgaaaaaagagaacgacgccgttgaaaacaatagacgcgacggaggacggaatgatgaatatcaacaccgcaaagcctaaaataaaggcgatgtcgattccccaaaaactaggaaatacgccgaagcccataacgctgaacgagataatttccaccaggacagccgtcatcgcgtagatcagggcaaaatacaatttttttcttaataattttcccatagaataaatcgggggaccgcggaggaatacgggcggtttttcgccttttttttccgtgaaggaatagccgacgcccgcgggggcttgtccgactcccgcgagcttcttctccttttcgtcccgctgaaaacagcttctccttagagcctgtcctcctaatatttccatatatttggataggctcgattttttatattgatcgccgcgcgaaattttccttagcaaagcgcgcttcgcttttccctgtcggacacgcggcacagcgtctgccgcacgcggcaaaacgtcccgtttgcggcggctcgctcgtggaaaagcgcggatgtttccactccctgtcggaatcggacgcacgagagcaaaacggactcgtcttttttccggcaagagaggatcctaagccccgccgcagaggacggcaggactctttcaatccgtccaaaagccgccgggcttattcgccgcggtttcggcttatgtaaaaaattcgcggtagatcgcacggatacaagccgcgcagtcttcgttgtccacgccgacgataatgttcagctcgctggatccttggtctatcatgatgacgttgattcccgcctcggaaagcgccttgaaaaggcgcgcagacgtacctacgcttctcgccatgccatgtcccacggtggcgacgagggcgatattttcgtgcgtgcggacggcgtcggggcgcaccgcctccttaattttgcagagcacgtcttccagtattccgccttccaggtagcgattgtcgatgactacggacatggtatcgatgcccgagggaagatgctcgaaggaaatgccgtgacggctcaaaacttccagcactttcgcggcgaaccccacctccgcgttcatcatcgatttttcgagaagaatgacggtaaagtccttctttcccgcaattcccgtcactacgccctctcctttgccgcgaacggcggacgccacgatcagcgtgccctcgtcctcgggacggaaagtgttgcggatacggatgggaatccccgcgcttttgacgggaaaaatcgactcgctgtgcagcacgttagcgcccatatacgagagttcccgaagttcctgataggaaagctcgcggatacatttcggggaggcgacgatcttgggatcgcaggcgaaaaagccgctgacgtccgtccaattttcgtacagggaggctttgaccgcgcgcgcgatcaccgcgccggaaatgtcgctgccgcctcgggaaaaagtcttgatctttccatccgcgcccctgccgtaaaagccggggatcaccgcgcgggggtattttttcaacacggacgccgccagcggatacgtcgcttcatcaagactgccgtccgcgttaaagagcacgatgtccttggcgtccacgaacggaacgccgagcaccgccgccatcacgcgcgcggcgaggtattccccgcgcgaggcgcaatagtcctctcccgcgcccgcgaggatctcgcgttctatttcgtcgagggagtctttgatgcctacctcccgcccgatttctttttcaatcccttcgaagcgggtgcggatcttggaaaattccgtttcaaatcctttccctgagcgggcggcttcatagcatttatacaggagatcggtgactttgacgtcgccgccaaagcgttttccgggcgcggaaactaccacatagcggcgctcggcgtccgcttcgacgatctttgccgccgcgcggataatatttccgtccgccatagacgtgccgccgaatttacataccttactgtccataaagacctctcttccgaaggcgcgctttgcgctctccgcgagtgatttcggatttctctctttttccgcctcattatatctatatgcccgcgcgcgccccgcctgtgcgggcgccgcccgttccgccttaatctttatcttttccctcccaaaagggacgtatgtccgccgacgggaatttaaaaaatcggaaggcgctcttttcgtaagacaaagcgcgattttggaaaataccgcccacgcggttcaccgaagagcggtaaggcgccataaaaactttacggcggcaacgcgcactcccgaaaaaacagacctcagacacctatcccttgtagcttagatccgcggagcgttcaaagcgctgctcctttgtccctcactttctcggtccgtcctatcctatcggcaaggaagcagttttgagaaaaagggactttcggaaaatcccgtggaacgcttgccaaaaacaatctttgatcgtcaaacagaggccgcgccgtacaggatcggtgcgaaattcccgctctctcaaagccatgattttccgcagggaaggaacctgctttaaatattcaaaaagaccactaccagcagggcaagcgccgcgcaaatgatctttatccataatttattgacgaataccgccttcatgaatttgccaaacttattcatccgcgcgcctccttatttgggtttcttgtcggacaggggcaattcctgccaataatagtcgcgcagagcgttcttcaagatgtcgtaatccgcatatctctgcacgtttccctgcttgatgacggaaatgatgcccgtttcctccgaaaccaccagcgaaacgacgttcgccacttccgtgatgccgattcccgcgcggtgacgggtaccgaactccttgggatagctcgttttctgagtcagcggcaggaaacagcccgccgcctgaattttatgcccgcgaatgatcatggcgccgtcgtgcaggggagctttgggaaagaagatcccttcgatgagctgcgtagagatttccgcatccagccttactccgctttgcagcacctgtttgggcatatttcccttcgagagcacgatgagcgcgccgacgttatttttggacatattttgaagcgccttgatgatgtcggaaatgcagtgttcgacgtccatgggcgtccttgcttccgttccgccgacgattttttctatcttttccttgcgcggaccgtggacgtcccaaaggctctttttcacctccacgttgaacaggatgagcatgaacatggaaagcagaatgacgaagtagagatagaactgccgatccaccagctcgatggaaaaccgcacgattcccatcactatgagcaatgcccaataaaggaacatgagtttggtggcgtcgttgtccctaaggactttggatacgtaatagacgagcagaaaaaacaaaaagatttctaccgcgtatgttgccgtgaactttgtgaagaatccgatgagtccgtcgccgaactccgtcaatttttctatgaacacggaagccgccaaggcgtatgttttcataccctgcctccccgtaataatcgtccgaatgtctgaaaagcattcgctatgaatgagtatattatataaaatctctgccgaaaaagaaagcgtttcaaaggatcttttcgggattttacgtttttttcatcccgttttcccaaaaacgttgcttatcgagagattttcacccgcttttgaaacatccgcgccctatgccgtcgggcgtcatgcggcgccgaaaaacaggcgcgccgtcacccatttgagcgcggaaggcggggtgagttccccgcacttgatgccgctgatggcgtcatagacgttttcgtagcatttgaaaagctcccctttggggaatttcagcgcctgttcccgatttttccgcgccgcgtactccttgacgcccaatgcggcggcgatctccctgtcgctccccctcatcagggacacctcgtaaagacctttgaagtaataacagagggaattgagaagggaaatttcgtcgaagcctttggaggaaagctctttgagaatatgggtgtacgccgaataatttttgcgcgaaagcgcgtttgccaattcgtaaattttatattccgaatcgggatataccacctcgtcgacgatctgatccgtcagtcgatccgcccccttcgccttgcaatagagaaggagcttttccgtttccttggaaatgcgggacatatcgtagatacagtatgccccgattttgccgcaggtagtaccgtccgcatacacgcccgaacgcttacaggtgacgtagatccatttttttatcgtttcctcgtccgatcttccgcagtcgatatgcgtgacgttgggcttttttgcaaggggcgccgagcccgttttgcccttgcccgaattgacgatgagaagaacgctgtcccgcggcggattttcaaagattcccttcaaatagaagtcgtattccttttccgtcggataaaattcgctgattttgacaaagcgcttttcgcttaaaaagggaaaacagctgacggcgtccgcgagcgctttcagtttgtcgcctttgagcgcagcgccgtcaaacgccgtgtaatccagcgtcggttcctttaaaaaacgatccagaaggagcgccgcgccgcgttcccggaaataagtttcctcgccttcgaaaagataaatgggaagagcgccgttttcgtccgtaaattttttaaaatcgacatatttcattgccgtgcccctcctcttttttgctcgtccctaacgtcctatcccgtcggcgggcctcgaaaaatactatgcgaaaaggcagagaaatgctccgcgtttccactaatttcttttctattataacacgttttttataaaaacgcaagaaattgaagcgtgggataaaaaagcgggcgtttcggcgttgatccaagacgccaaaaagacaaacgcgcataaaaacaggaggaagagaaatctctttttctttctttcgatatttattttgcccgaaaggaggacgacgatcgcatagtacaaaatcgccgcggcgccgagcttaaatcccgtgaggacaaaggaaaaatccgccgcatgaaagacgagcagcgccgccgaccaaaagacggagggaaggtataagagcacgggcgcggcgccaagcggcagcagacaggaaaaaaacaccaaagccaacagaagggcgaaaacggcgccgatcaaaggcacgaaaagacaatttaaaagcaggctccatagggacacgtagccgaaagacgccaataacacgggcgccgttcctatctgcgccgctaaggaaacggagagaaaggaggcgaccgcttgctttaccctctcccccaaaccgagcggcttatccactttgcggacgagtccccgtccgtcgatgtaaaattcgcaaacgccgttcccgacgggcgggattctcttcgcacccgtttcggggacggaaatcttatcttctcttttcccttgctcctgtaaaccgcgttcggaaagggcggcgggatcgaaagcgctttttttgtccgcctcgccaaaggtcagcgggccgacgagtttttcgtcggaaatcctgccgaagccgccgggcgctttaaaaaccgcttcgggacacgccgagttctccgtcccttcttgtcccttttccgcttttttaaatggaaacgcattcgcgtcccccgtatatttgctacgctccttccctgattttcgattcgcctccgcaacgcgtcttccgcgcgggaacagggcgaggatcccgccttgaagggaacgggaaaggaatccgatggaaaggcaagccgcgaatgagagaagaaaacccgtgtcgaacaaagccacgggatgaagcgcgagaagaaaaagcgccgcgacgcccgtattttccaaaaggtcggacttgattccgagaagagcggaggcgtacaacacgaggcacatgaccatggcgcggacgacggaggcggaaaagccgcacacgccgccgtaaaagacgagcgccgccgctgtcagaaagaaacgaacgagcgcgggaagaccccgcagacgggtcttgtcgattaaaaggcggcaaaaggaatacagagcgccgacgtgcagccccgaaacggcgaaaatatgcgccacgccgcccaaacggacgttttcgagcagtcccgattctatccccgacgtatctcccgtcagaagcgcgtacgtgaccgaagcggattcttcgtccattcccgcatagattacccgccgcatccgcgaacgcgccgcgcggaacaaatcgaactctttgcccgtgacgctcagggaagcgacgtttgccgtataccgtattttctttgaaacgtcgtcgcttttaaagccgtaatcgccaaacaggctcacgtccgtttccagcgtgcccgaaaagagaactctgtccgacaatgccacttttttcgaaaaagagccccccagggctgcggcgagttttccctccgcgcgctcgccgtctatggaaagctcggaaagcacgatgcgggaaaagccgccgtaatcgtttttttccgtcaccgttcccgccacggtatgttcgcccgtgtatactttgcaggcgcggaactcctcgatttcacaggaaaaacgcagcgcgccgacggagaaacagcaaaaaagcagcgccagagcggcgagcgcctttgctttgtcctttgtggaaagcaagacgacgaagaagacggggaccgcgcaaagcagccaccaaggggacgcccgcaaaaagagatgcgaataggaaaaggcgattccgagcgcaaaaaacgccgccgagaacagagcgggacggaaattgaatcgttttccgttcctcttcttatcggaggcgcttaaaaatttcttcatcggtgttttcccaaagccgcctgtccgaacggcggcgctttttcgactgcccgttatgaaaaggacctttttccgcggcaatttcggcattctcgacagtacggagaaaggcgcggacagaattttcctcccggcgttaaaaacgacccgcgccgaaaaaggagaacgccgaaacgtcggaaagagagtccttgctcgccctccctcgacagtcccagccttacggcgatcgcagtaaaatgaaaacctatcttttcctcaccgctttttcagcaaaaccggcgaaggtttctttatatttctcttgcgccgcccctttctttgttttgacgggcgttttccgcgccgcttcttttacgccaaagagatgcggtcggaaacggaacgcacgaacagtcccttttcttcgcccagcgtcacgcagtcgttgacgtagacggcgaacttatccgtcggctttgcaatgcggaagagattgcaggcgatgatcatgatctcttccatatagagcgccactttgtcttcgagcgcgcttttgatgagcgccacgatttcgtaaggcgtataatccgtttcgttcttgcgcagggaatcgcccgtttccacgcggtatttatcgaagccgatatttttatccgtcttgcgatagtagggtacgccgaagattttttcgtacttgaagccgcacagcgccaccaaagcctgcatacgcgcgtccactttcgcgccgtatttgacgacgccaagactgcccaggcacctccttacgagaaagtcgtaagaaatcggttcctccgcggacacgatggctttcagcctcgaaaggatctccgcgtcgttatcccccgacgtgatgaacgtggcgttttcaaaacgctgttccagcgccgccgccttatacggtttcttgttccgattcagtcccgtgccgccgcgtttgtccgcgcccgtcaacttatccaaaagatcctttattttcttgatctcccgcttgggattgttgtaataattgaccgaatagacgcggatgacgttccagttgttgcgtttgagcgtctgaatctgcaagacgtttctatccttgatggagaaagtgttgggtccgtcgcacatgacggcgaggataaatttgtgcttgtttctcggatccgtaaccgccacgtctatcttgaaatcggacacgcccacgtcgtaacggcagtcgtacccgtaagaggaaagttcctcggcgatatatttgccgattccgggctttttcttgacgagattgcccgcgggaatcgccagcgtcgtcctgcccttttccgcaaattctaaaaacgccttcaagcccgccacgcctttggagcccgtcttggacaaatcgatcatcgcgcccgtcatcgacgagaagatcaccatctcctccctcgcgcgcgaaaccgcgacgttcaaacgccgccagccgcctgcctgattgaggggaccgaaattcaaagacactctgccctgtttatccgggccgtaacagacggagaacaaaatgacgtcccgttcgtccccctgtacgttttcgagatttttgacgaaaataggctcctctctgtcgtaagcgggaccgtccaaacgcttttccgcaatggcggccgtcagtttcctttcgatatactccttctgcacgttgctgaacgtgacgatgccgatgctggatttgcgcagggcgggatcggagagtcgccggattacctccgccaccagcgcgtccccttccgccttgttgcgcttggtaaagccgcgatcgtagacgccgtcctccacgcggacgaacttcaccttgctgtcgggcgcgtccggagaggggaaggtgcacagcttattgccgtaatacatgatattcgagaaagcgatgaggctttcgtgcttgctgcgataatgccaggtcaaatggcgctgaggaataccgagcgccagacagtcgtccagcacgctctccatatcctcgttttcgaggttttcctcgtccacgtaattggcgttgaagaacgccgtcggcggcagttgtttggggtcgcccacgacaacggcgcacttcgcgcgcgcgagcgagccgatggcttccgacgtcggcatctgcgacgcttcgtcgaaaatgactatgtcgaacatggcgctgtccgcctgtaaatattgggaaaccgtgatcggactcatcagcatacagggcgccaccacgcgcaaaagttcgggaatttcctcgaacagctttctcagtcccgtgccgcgcagattgctcttggcgagccgctgaaaattgacgacttcgaggcttaaactgccctccgtggaaggcgtcggcaaacgggaaatgagtttggcgcggatttcctccttggtaagcttggcaaattcgtctatggtcaggcgcagcgattccgtttcttcctccaaaagcgccgccgaaaaacgggagagcacgggatcgagcgggatgttcgtctgtaaaaagtttttatagatgttcttttcaaagctgtccacgatattttcgctcgtcacggacccgctttcgagtgcgtccgtcatgaacgtcagccccgcgccgtccaatttttccgccgtggcgcggtacatacaccaattggcgagcatatcgatattatcgatgagcgcgcctgccttggacgtataatattcgaggacgtcctcttcggggatctgggcgcggtcggcattggtgatggaaaggaagctgtcctccgccgcggaaaagctggaaaccgagcgcaaaagccctttcagcacgggtttcgtgtagccgttggcggcgcggacgcacatactgttgaagctgtccgcgttatagtccatgaacagtttggcacagagcgcgtggagcttatacagatcggagaggaaattttccctcgcgtcgaaaaagtccacctttccgaacgcgcccgtaaaattcttggaaagctgcgtattcgtgcggatgcggtccatcgcctcgtaaatttcgcagacgttctgcaaatgcttgaccatatcctcgcccttgacagaggaaagagcggctttcgagagttttttcgccaccgatgccgccgccttgtcccgttcgtagtcggtgccgcccccgtctagccacgcgccgagttctttatattccttggaaatatccaccaatttcttaaagttcttaaaataggtgtcgaaacagacgtcgaggcgtttattggcgttgaaaaaggcgtaaaattcgtcttcgttttcttgaaaatacttattcagcgtactgccgtcgaggagtttcgccgcttccgccagcatttccagcttctttctcgtcagcgtgctgatgcgctgtcgatagagttccagaaacagcgctacataatttttgagatgcttgatctccgcgatgaccacttcggacgagcaatagatggcgtcccgcttatcccgcgagtattcggtgagattgacattggaaaagggcgagttatacacgccgccgcattcctttgccgccgcggccgcctgcaccatcatattttcgtacgactctatcttctctttcgtcagactgtcgtaaaaggtgctttcgatattcatgatatcgggcgcgttcttgtttttcagacagatgagcagcgcctcgtacacggaaacgcccaagcggcgctttttgtgaagcgcggcgagcggctcttcgaggtcgtttttcaactgttgaatggaatttgccttttccgaaagactgacgttctcctgcgcgcccgcgagcgcgagcgtcgaaagcaacttttgcagtacgtccgctttgttcgtcttattcgaatggagttcgaggcagaattcgcccagtcccagcccgtccagacgctttttgacgaccgaaagggccgcctgcttttccgcgacgaacaggacgcgcttgccgtcgttcaaagcattggcgatgatattggtgatggtttggctcttgcccgttcccggagggccgtggaggacgaaggttttgcccgtctgcgacagcgccaccgcctcccactgcgaggaatcggcgggaaggggcatcaacgtctgcgtgggcggacattcgtcttccttgaattcgacgtccttaacgtccttgatctcgcagcggttattgagaagggaggagatcagctcgttcttggagaatacgtccatattgcggcgaagatcctgccacatctgatagcgcgcgaaagagaacgccgccacgtacacgtcgtcgaacacctcccaatccttcatattgacgatctccatgcggatcatcgccaaaatttcggatatttttaagccttgcagcgcgccgtccagaccgcggatgtcgatattaaattcctgtttcaaaaattcgagcagggtagaattgacggaaaattcctcgtccgtggacgccaccgcatagccgacgccccctttgccctttttcagggcgatgggcttcaagacgagcggcgcgtatttttccttgccgtcctcgcgggaataccacttcaaaaagccgagcgcgagatagaggatcttggtgcccgattcctcgtccgcttccttgctgcgcttgatgaggcggctcaccgtttcgttcagcaccacctcttcggaaaaggtgcgcaaggtaccgcccgaaacttcgagggcgatcagttcccgcatattccgcgcttccgccgcggctccgaaaaagattttgcgcctcgcaagctcggcaaccgccgccgtcgcgcccgcaagggtcatctcccccctttcttcgagcgcggaaagcgtcgaatcggggtcggcggagagcacgtgcaggaccatcttctcgggcgagaaactgagcagggtgtttttcagggaaaggtcgagcaggcggcgctcccactgcttgtccttggtctgtttaccatctaaactgagttttttcgcctcggtgagcattttgggcgccgcgtcgggggacatatcctcttcggagagaatttcgtatcccttcaagctgcgcgcgcgaaggggcaggggcagcagatgcgcgatgcggcagcggcggatatccacgtatttatcgtacgtgccccccgcgttgagtttctggataaaatgggattccgacgtggagtaggcgacgtttttgtccgagaacaggtcgtttacgtcgaaacagctgaggttattgatgccgtcggcgacgtattttcccaatcgctgcaaatcgtcggaaacggtgtccataaagcagttgtcgtacagccagacgccgcaggtgatttccttttcccccaatacgagcacgggatgaagcccgagattttccaggcacgcgctgacgagcagcgccatttcgaggggagtcgccctgcgttccgccaagagcttgacgcccgcgcccgcttccacagggcgggaaatgtccgcttcctcgcgttcgaacgcatagcggcggatacaggcgtacagcgccgccgccgtctgacggacgacgtttttatcgcagccctcgtatccgtttatctcgctcgtgacgccccactttttcagctgtgcgccgatttccgactgcaacctcgcgcaatccgcgagcttggggcgcacgaaagaggcgagaagttccgcgttgcccgaagcgccctgccaataatcgaaggggagcgccgtcacggtcactttttccacggcgagcgtctgcttgtcctttttcagctcgacaaaaatctgttcctctctgaccgattccagccccacgaaatagaggggagagaggacgttgccgagatccacttccaccgcgctttcaaacggcacttcctcgatcggtttgatcgaggaagccaaaaggccgttttcgttgctcaccgtcagagtcaggtcggtgacggcgtcggcgccgccgtttttgatttgcagcgaggtgaacagcggggtctgcgtaaaataatcggcataagacaccacgccgagagtttcggcggtcaaggagataaattcttctgtttttttacttttctgcgccataatcgattgcgtactccgcccaatttttttcctttctattatactctcaatttataaaaaaatcaacccctaaggcataaaatcccataaaacgcggccgttttttcataggtatacatttttattgcaaatttcgacgccgtccgccccctttctcttttcttcggccgaaaaggactctttcggcataaaaattcgcgcatattttcccaacggcgtgccgagggtcaacttccgccgttcccgtgtattgataaaagaaaaacaagcggctatcggaaaaattttgcgtcgggaaatgccgcgctcttttacagaaagggcggacgaaatcaaaaaatcgtcccggctttttccccggcaatcgtaaacgctttacggcgtgcggtttccgacataaaaaagcccggctcatcgtcgatagaaagccgggcggaaaattcaaagatattgagaaacggtgtacgtgagtctgtcgacgacgtcttccagctccccgaacagcatacagccggcagcgcggacgtgcccgccgccgccgaacgtacccgcgattttattgacgtccgcgtaaatcttggagcggagagaaatcttatactgtccctttctcacttccatcaccgaggcgctcacctccaccgtatccacgctcagagggaagtctacgaatccctccgtcatgccgttgtccgcgccaaactgtttcatcgtttccaaagagatggaaatgaccgcgagcttctcccccaaaaaatagcggatgcggctcatggtgtacgcatacagttccgcccgcgtcttgggctgttttttgaacagattgtaattgagcgcgcgaatatccgcgcccgccttcataagctttgccgccgttaaaaatgtttcctccgtcacgtcgtcgtgagaaaaattcccggaatcggtgagcaagcccaacagcagcgcttccgccgtccgcttatcgaaggacacacccagggcttcgatgagcgccgctatattcatacagtttgccgaacattcccgcacgtaattgtactttgcatagcgggtattggacacgtgatgatcgatatttatcgtgtccctcctcgccgcggcggcgcgaaaatcatccgccagcgcgcccaggcgctgttcgtcgctgctgtccacggcaatatacagctccgcatccgcggggagcttcttttccaattgttgaatccccggcacgaaggcgagattggacggaatatccgattcgtcgcagacatggtgcgcaatgccgagcctctccaaagcgcaagagagcgccagcgcgctccctatcgcgtccccgtccggacgcatatgcgtgaggatgaccgcgctcttcgcgcgcctgatcctcgcagcgatctcttcaatactcgaattcacagattattcctcgtctttatcgttttctatctcctgcggatcggtatggattttcttgaacagttcgtccatcttcgcgccgtaagccatactgccgtcccaaaggaaggtgagggaaggcacggtgcgcatccgcattacctgcgccagctcatggcggataaaacccgcgttttccgaaataatatcgaaggatttgagtttttccgactcgtctttcgcatagatactgatatatattttcgccgtctttaaatcgggcgccacatccgcttccgtcaccgagatgatccctttgagatccggctccttgtcctttaaacgagtgcggatgatttcgctgatctctttttgatattccccgtttaagcgggaacttctcgaaactttcatgcctgcttgatttcctccgtcacataacattctatgatgtcgcccacgcggatctcgttgaatccttcgatggaacagccgcattcgtaaccctttgcgacttctttgacgtcatctttaaagcgtttcagctgtttgacgccgccctcgcagatcatcacgtcctcgcggtagattctcagcttgccgccgcggatgatcttgccttccgtgacgtaacagcctgccaccattcccgcgcccgtgacgttgaacgtctgacgtacttcgcatttccccatgagcgtatcttggagtttgggcgccagcatccctttgagcgccgcttccatatcgtccaaaagctcgtagatgatgcggtagttcctgacgtccactttgctcgcttccgcaagttttttcgccttggtgtcgggacggacgttgaagccgatgatgatcgcattggcgctgtccgcgagcatgacgtcgctctcgttgatggcgcccgccgccgcgtgaatgaccttgacgcgtacttcctcattcgaaagcttttcgagggactgcttcactgcttccacgctgccctgcacgtcccctttgacgatgaggttgaggttcttgatcttgccctcttccacctgcgcgaagacgtcgtccagcgtgacgcggctctgttctttaatcatgctttcgcgctctttgctctttctctcttcctgcacctgcttcatcagcgcctgatcgaccgccatgatgctgtcgcctgcattggggacgtcttcgagtccgagcacggaaaccgccatcgacggccccgccgccttgaccgccctgcccttgtcgtcgaacatggcgcgcacgcgccccatcgtagtgcccgaaagaatattgtcgcccgtgtgcagcgtgccgttctgcacgatgatgttcgccacggggcccttgcccttatccagtttggcttcaatgatggtgcccttcgcctgacgatcgggattggcggtgagttcaagcatttccgcctgcaagctgacggcgtcgagaagctcgtcgatgccttctcccgtctttgccgaaacggggacgatcatcgtatcaccgccccattcttcggaaaccaggttatgcgccagaagttcctgcttgacgcggtcgggattgatttcggttttatccatcttattcatggcgacgatgatggggacttccgccgatttggcgtgattgatcgcctccaccgtctgcggcatgatgccgtcgtccgccgccaccaccagcaccacgatgtcggtgatttgagcgccgcgggcgcgcatcgccgtgaacgccgcgtgtcccggggtgtcgataaaggtgatctgcctgcccttcgccgtcaccgtgtaggcgccgatgctctgagtgatgccccccgcttcgcccgacgtgacggacgtggaacggattttgtccagaagggaggttttgccgtggtcgacgtgccccatgaccgtgacgacgggcgcgcgcgcaaccagctccgcgccgtcctcttccgtcacgacgacgtcgtgcagcacttcttccgccgtcttttcgggcttatattcgaggtcgatgccgagatcggccgcgatcagcgccgcgttgtcgtaatcgatagaatcgtttatgctcttcatgataccttctttaaacaggcgtttggaaatgtccaccgccgagatgccgagtttttccgaaagtacctttaaaggaatctcctgcgtcgtgaccaccgcgtggtcgattttgaccgtctgaatctcctgacgcttttgctttttgggcgtgcgcagctttctgtatcccgatttgctttcgtcgaaatcctccaccgtcattccctgctgcttgatcagcgtgcgcttggaaacgggctttttctcgacgtatgtcttttcaaaagcttttttcttgggcggagcggtgaaggtcttttccttgggcacgataggcgccgccgctgttcccgcgcccgcgcggggtctgggcgcgcccgtggcgccctgtctgccctgatagggcctgtcgccttggggacgaggtctgtcgcccatcggacgagggggacgatctccctgcgggcgggcaggtctgtccgtgcgggggcgatagctcgatcccgtgcctgcgtttacgtccacgcccggctttgcgatgtagacgccctgctcctgtccgttgcggaagtatctcggagcgcggggcgcgcccggagcagcgggacgagtctgagcggtcgccgcgggcgcggaagaaacgggagccgccgcgggcgcgggggctgcggaaggagcgcttttttgcggctccttgttttccgtcgtttccggctttgtttccgcggcaggcgcggacggcttctttttgaccggttccgcggg

SEQ ID NO: 162 - DNA, 32759 bp, Unknown
  16S sequences of unknown bacteria
gactgggcttcccgatttcatcgggaagctcttatgcttttttaatactgctcaatatcctgcaaagcgtcgtagccttcttcgccggtgcgaacctttacaacgttttcgacgtcataaacgaatatcttaccgtcgcctatgtgacctgtgtaaagcacctttttagcagttgcaataacctgagatacaggaacctttgccacaactatatcaacctgaattttaggcaagagtgatgtttcaaccaaagcgccgcggtaatattcaggctgacccttttgcacgccgcagcccattacgtggcttacggtcatacccgtaatgccaatgccgaccattgcatttttaaggctttcaaggcgggattccttgcagacgatttcaacctttgtaatcttttgtccgtctgcccttgcaggcacatccgccgcaaccttgggcatttccttaacctcaaccgcctcggcgacaggcgtatcgcccgtgactgcggtagtttcttccccctcgtcaatatattcgggaagcattgcgattccgccgtaagcgctttgcaagccatgctccttaacatccagtccttccatttcctcttcacgcgaaacacgcagaccgaatatcttctttattacaaggaacgaaagagtgattgtaacggctgtccatgcagctgttgagaacataccgagcaattgaagacccaattgcttaaagccgccgccgtagaaaagaccctcgcccgcaatttggttagcaccgaagtttacgccgtcgcctatgccgcgggcaaatgcgggagcggacttggtggcgaacaagcctaccgagatagtaccccaaataccgttgcagaagtgaaccgcaaccgcgcccacggggtcgtctacatggagcttgtaatcaaggaaccaaacgccgaatacaaccaaaagccccgaaaccgcgcctattactattgcgccgaacgcgtcgcacacatcgcacggagcggtgatagcaacaagacccgcaagggaagcgtttaagcacattgaaacatcgggcttgccgtatttgatccaagtaaatatcatagcaactacggttgcaaccgacggggctattgttgtggtaacgaatatcgagcccatttcttcaatagaggttgccgccgcgccgttaaagccgtaccagccgagccagagaatgaagacgccgaggcagcctatcggaagattatgaccggggaaagcgtttacctttttaaccttgccgtttttgtcacggttaaatttaccgatacgcgggccgaccattgccgcgcctataagcgcgcatataccgccgaccatatgtatgcagtttgaacctgcaaaatcgtggaagccgagttgtgccagccagccgccgccccatgtccagtgagcttcaaccgggtaaataatcgccgagataaccgccgaataaacgcagtaggaaaggaatttcgttctttccgccatagaccccgaaactattgttgcggtggtggcgcagaacacaaggttgaaaacgaaatttgaccaatcgaaatttgcgtaatcggtgaaaatatcaaatcccggtttacctataattcccacaaggtcttcgccgaggaaaagaccgaaaccgataagaataaacattaccgtaccgatgcagaagtccataaggttcttcatcagtatatttccggcgttctttgctctggtaaagcccgtctctaccattgcaaagcccgcctgcatccagaataccaacgccgcgccgattaaaaaccacacgccgtatacttcgctgtgtatagcgtcatatattgcttgactcataaaaaatcatcccttaaaatctttaaaatttctttttattttacgctgaaaagcatgtcgccgtaggaaggataaggccagatatcagccggaaccatggtttcaagctcgtctacggtaatcctaagctcgctcatagcggcgaacaccgcgtccttataatacattgaaagctcctgcgtttcgcttatttccttagcttttaacaccgcctgctccaatttttcggtctttttgtacgccgctgtgttaagcttgcttaccttagccaaaagctctttttcatagcctgactctatatcgccacaggctgcctttgcaatgaccgtatcggataattcgtgcgaatatttgcttaccgcaggcaaaatatcctttttcgccatatcaatcattgtaagcgcttcaatgttgattattttgcagtagttttccgaaagaatttcataccttgcgcgcatttcggtctcggaataaaccttgtgcgaaataaagagcttcatattcttttcgtgcaaggaatacggcaggcactcgggggttgagcgcaggttcaaaagtccgcgtttttcagcctcggcaatccatgcgtcgtcatagccgttgccgttgaatataatgcgcttgtggtcggtaacagtcttctttataagctcgtgcaaagcctcttcaaagttagccgcgccctcaagctcatcggcaaactgctttaactcctctgcaaccgcggtgttaagcacaacgtttgtgcaggaaacggacgaagaagaaccgagcatacggaactcaaacttattgcccgtaaacgcaaagggcgaggttctgttgcggtcggtagtgtctttggggaacttaggcagcgtatgtacgcctattttaagaatttccttttctttgccgccgtatggttcatcattttcaatcgcctttaaaacgtcggtaagctcagtaccgaggaacattgaaactactgcggggggcgcttcgttagcgccgagtctgtggtcgtttccggcggaggctaccgatactcttaacatatcctggtattcgtcaaccgccttaataactgcgcaaaggaaggttaaaaactgtgcgttttcatacggcgtgtcgcccgggtttaaaaggtttacgcccgtatcggttgtaagcgaccagttgttgtgcttgccgctgccgtttactcccgcaaagggcttttcgtgcagcagacacaccatatggtactttttagccactttctgcataatttccattgtcagctggttgtgatccgccgcaatgttggtggtggtgaatatcggcgctaattcgtgctgtgcgggcgcaacctcgttatgctcggttttagccaaaattccgagcttccaaagctcatcgttaagctctttcataaatgcctgaacgcgcggctttataattccgaaatagtggtcctcaagctcctgacccttaggcggctttgcaccgaaaagggtacgccccgtatatataaggtccttgcgcttgttgtaaacgtcctcgtctataaggaaatattcctgctcggggcctaccgtggttttaaccgacttaacgtctgtttttccgaatagctttaatactcttaacgcctgcttgtttattgcctgcatactgcggagcaaaggtgtttttttatcaagcgcctcgccgccgtaggagcagaacgcggtaggaatacaaagcacaccgtccttaataaaggcatatgaggtcgggtcccacgcggtgtagccccttgcctcaaaggtggcgcgaagaccgcccgacgggaaagaagatgcgtccggctcgccctgaattaactccttgccggaaaattccataataaccttgccgtccttagtgggcgaaataaagctgtcgtgcttttcagcggataaacccgaaagcggctgaaaccagtgggtgaagtgggtagcgcctttttcaatagcccagtccttcatagcgtttgcaactacggttgcggcgttcgggtcaagggaacgaccgtcctttatggtgcgctgcagcgacttatatgtttccttgggcaggcgctgctgcattacgctgtcattaaatacgttgcttgcaaaaatttcattgattgaactcataaccgatcgttcctttcaaaatttgtgataataaaaggcggcagcggcgtgtataaaagggaacgaggtagataaaatcccttttgcgacgccgttgccgccttttaataccatatttacaaaaataaagaaacggcagacaggtaaactgaattaccgacgtcattgccgtttcattgcgcttattataacgccgcacattccgcttgtcaagcaaaattttcaacaaagcataatttaacgtgtctcgcacatttcacaaaattttataaagcaaaatttaaaatcgcttaataaaattaacatactgctcaaagaacacaaaaaataagctagaaacaggtcgaatttcagaaaatatttgaaaacggaatacttgacaatgccgcaatgaaatattataataatcgtatgttatttatatgacacagagcaacggtgttcggtgatgtcagggggcttttgtcccctttaaggcatcggcgggcaccgttttaaatttaaaattacagggaggaacggcaatgtattcttatgatgaggttatgacctttgttgaggaagaggacgtaaagtttatacgtcttgcattctgcgatattcacggcaggcagaaaaatatttcaataatgccgtctgaattaaagcgcgcctttacctacggcgtatcctttgacgcgtctgcggtggcgggcttcggcgatgtggtgaaatcggacttgtttttgcaccccgacccctctacactttcggttttgccgtggagaccgtccaacggcagggttgtaagaatgttctgcgatattaaataccccgacggcacgcgctttgaaaaggacggaagatatattttaatgcaggcggtagaaaaagcaaagcaagccggtatttcctgttttttcggcgcggaatttgaattttacttatttaatcttgatgataacggtgaaccgaccgacactccgttcgataaagcgggatatatggatatagcgcccgacgataagggcgaaaacgtccgtcgcgagatatgctttaatctgcttgaaatgggtatttcccccgaaagctctcaccatgaggagggtcccgggcagaatgaaatagatttcagatacagcacgccgcttaacgctgccgataatgcggtcacctttaaatcggttgttcagactattgcccgcaggaacgggctattcgccgatttttcacccaagcccttaatgcacgagagcggaaacgggctgcacataaatgtctctgttaaagcggaaaacggtgaggacgtgaccgatagctttatggcgggcgtacttgagcataccgttgaaatgacggcgtttttaaaccccgtagcagcttcatataagcgcctcggtgaaaagaaagcgccgaaatacgttacctggtcgcccgagaaccgctcgcagctaatacgcatacccgcagttaaaaacgaaagcaaccgccgcattgagctgcgctcacccgaccccgcggctaacccatacattgcatatgcccttataatttacgcggggctggacggaataaagcgaaaattaaagcccgcagcgccctgcaactgcaatttgtttacagccgacggcagcattaccgatacgcttgcaaatttacccgatacggttgaaaaggcacgcaacattgcaaaaaacagcgagtttataaaacgcgttttgccggagggctacgccgaaagcatttaaaggagggattaacgggtgtaccgcgataaagcaactctcagcgcgcttatagtttcctcctctcaaaaggctgccgattacttgcaggatatactgtcacggctgcggttttcacccgtggcgaacgcggtaagcattgcggaggcaaagcgacggcagcttgaataccggtttgatttggttataataaacgccccgctgcccgatgatttcgggctggagtttgctgaagcactttgtaccgacagctccgtgggagttatactttttgttaaggcggagctgcttgagcaggtaagctacaaggttgaggattacggtgttttaaccttccctcgcccgggcacaaggcagagcattacaagcgccatacgtcttgccgcggcaacgcacaaccgcttatcggcttttgaaaagcgggcggtaaagcttgaatccaaaatgaaggaaataaggcttgtaaaccgtgcaaagtggctgcttatagaccgctataatatgagcgaagaggaagcacacaaatacatagaaaaaaccgctatggataactgcgcaacgcgcggtgaaatagcggaaaatataataagaacatacgaaaattagaaagaggcaagggaaaatggaaggtacggttaaaaaaacaaagtatatttttgtaacgggcggcgttgtatctgggcttggcaagggcattaccgccgccagtctcggcagacttttaaaggcgcgcgggctaaaggtggcggcgcaaaagctcgacccctatataaatgttgaccccggcaccatgagcccctatcagcacggcgaggtttacgttacagaggacggcgccgaaaccgaccttgacctcgggcactatgaaagatttatagacgaggacttaaacaaatactcaaaccttacaacgggcaaggtatactggaatgttttaaacaaggagcgccgcggcgaatatttgggcgaaaccgtgcaggtaattccgcatattacaaacgaaattaaggaatttatttattccgtgggtaaaaagaccaacgccgatgtggttataaccgaaataggcggcaccacgggcgatattgaaagtcagccgtttttagaggctatacgtcaggtagggcttgaagttggcagggaaaactcgctttacattcacgttaccttagtgcctttcctgcgcgggtcggatgagcataaaaccaagcctacccaacactcggttaaggaattgcagggcatgggcattaacccgaatattatagtgctgcgctgcgacgagccgcttgaagataatatattcaagaaaatttcccttttctgcaatgtaaagcccgattgcgttattgaaaatatgactattcccgtgctttatgaagcgcctattatgcttgaaaaaaatcacttttccgatattgtttgccgcgagcttggcataaacgcgggcgaacccgatttgaccgactggaacgaaatgctcgaccgcattaaaaaccgcaataaaaaggttacaatagggcttgtgggtaaatatgttcagctgcacgatgcgtatttatcggtagctgaggcgctgcgccacgcgggctatgtttacggcgcgagagtacagattaaatggatagactctgaaaccgtgaataatgaaaacgctgccgagacccttgccggctgcgacggaattttggttcccggcggcttcggtaaccgcggaattgagggtatgattgcaaccgcgcgctacgccagaacacacaatgtgccctacctcggcatttgcctcggcatgcagattgccgtaattgaatttgcaaggagcgttttggggcttaccgacgctaactcaggcgagtttgacgaaaactcaaaccataaggtcatagactttatgcccgaccaaaacagcgaaataaacaagggcggcacaatgcgccttggcgcttacccctgcaaaatagcggcgggtactaaaatggctgagtgctacaaggcagaggaaatcaaggagcgccaccgccaccgctatgaatttaacaacgactaccgcagcgatatgaccgcaaacgggcttgttataagcggcacttcgcccgataatcatattgtggaaacggtggaagtgcccgaaaacgatttttatgtgggcgttcagttccaccccgagtttaaatcccgcccgaataaggcgcacccgctgtttatgggacttgtaaaagcagggcttgataaacaaatgcgaaattcgtaattaaaaaactccaacctgatttacaccaaatcaggttggagtttttttgtcgcaatatgcagcctcattgattttcagcgtaaaggaaaccgtccacaagtgtatcgtcctgtcggtaatacagctttccgtcctttgaataaaaggtcctgttatcctcatcgcaaataatgctcacccgcgggcaatacgcggttttctcgcccttaaccgtatacactgttgcgtccgcacgggcataaattttctcaatatatttacttaaatgtatagtgaaatcggtatatacaacctttgtacccggctcaatcattgacggatccattgaggtcgtcaggcttcctcccatttcgtccacatcgctctttatatcgagataggagctgcaatcaataaaaaacggcgaaggcaagcccttaccccaataaccgccgaggcactttatcttttgcttgccgtatttttcgggaatcactatatcggtcttttcagggtcaccgtcccatttataatgggacaccgccgcaccgtcgggattgtattttaaaaagaacataaaatagctgccatacataatttccatatcgctcacggtatcttcatagcagtatgtcgtgcagccgcaaagcaatagagatataaaaacgctaagtgccaaaatcaacggttttttcattacctcaacccccataaaacactgtctatatatttttatgcgcaaactggctgttatataattccgcgtaaaagccgttctttttgagcagttcctcatgcctgccctgctcgtaaaccctgccatccttcataacgagtatgcagtcggcgtcgcgtattgttgaaagcctgtgcgccacaacaaatgaggtcctgccctccaaaagccgcgtaaatgcgtcctgcacctttatttctgttcgtgtatctattgaagatgtagcctcgtcaagtatgagcatgggcggctttaaaagcattacgcgcgctatgcacaaaagctggcgttcgccctctgataatccgtcatcgtccgcaataacggtatcgtagcccttttcaagccttttaataaacccgtgcgcgcgcgccgcctttgccgcggctatgatttcctcatcggtcgcgtccgccttgccgaaagcaatgttttcccgcaccgtgccgtttttaatccaggtatcctgcaagaccattccgaaatgctcgcgcaggctgcggcgggtaatgtttcttatgtccgttccgtccacggtgattgagccgccgtcaacatcgtaaaaccttaaaagcagatttataagcgtggttttgccgcaccccgtggggcctaccaccgctatttttttgcccgcaggggctgaaaaatcaaagccgcttataaactttttatctttattataagagaaagcaacatcattgaacgaaacgtctccgcgcgggttttcaagttctgcgttacccgcatcagaaatctcgggcttttcgtcaatcaactcaaaaagccgtgcggcgcaggcaagtgcgttttgcagctcggttacaacgcccgatatttcgttaaaaggctttgtatactggtttgagtaggctaaaaagcttgcaaagccgcccaccgtaagcataccctttattgcgaaaaatccgcccgaaagccccaccgccgcgtatataaggttgtttataaaccgtgttgtggggttagtaatggatgaaaagaacaccgcgcgcagcgaatattttctgagccgctcgtttacctcgccgaacctttcgttcgcccttttttcataggaaaacgcctgaacggttttttggttctgaatcatttcgtttataagcgcggtctgctcgccgcgtgtttcgctttgctttttaaacatatcataagtgcttttggcaatataccgcgcggtgaaaagcgaaatgggcgtgagtaccaccacaataagtgttataaccggggaaatcgtcagcataaaaatcagcgttacggctattgttataacgcccgtaaaaagctgcgaaaagcctaaaataagtccgtctgcaaattgctcggcatcggctataacgcggcttacaatatcgccgtaggggtgactgtcgatatacgccacgggcagcctttgtatatggctgaacgcgcggctgcgaatgtttttaacagtgtcgtatgcaattttattattgataatgctcattatccactgcaaaatgccgcccgccgccgcgcagatgaaaattttcacaagcgcgggcataattaccgccatatcgaccttgccgcccgtcattccgtcaattgcgtcgcccgccagcactggaatatacaggttaaacaccacacttgcggcagagagcagcagcgaaaccgctataagcgctcttgaccgcccaatatcagccaagacccgcattaaaaccgatttgtttttcattgctcttcctccacgtcaggctgggacgcgcatatttccctatatacctcgcaattttctctgagctctttatcagtgcccgtgcccgctatatgcccctcgtcaagcactattatcatatccgcccccctgatagccgaaacgcgctgcgaaacggttattacggtgggcttaaatttaagcgagcgcagcgccgtatccaaagcggcgcttgtagcgtagtcaagggcgcttgaagcgtcatcaagtattaaaatttcggggcggtgcacaagcgcgcgcgcaatggtaagcctttgcttttgcccgcctgataggtttctgccgtcctgctcaagctcgtaatcaagctgaccctgcttttcttcaaccatattttttgcctgcgcggcggtaagcgcctgccagatttcattatctgtcgcgttttcgttgcccattaaaatattatcccttacagtgcccttaaaaagcacctttttctgcggcacaacgcctatttttgcgcgcagtgcgttaatatcgtaatcccttacgtcctgcccgtcaacccaaacgctgccgtccgtaacatcataaaacctcggaataaggtttataagtgaggttttacccgagccggttgaccctattattccgtaggtcttgccgcgctcaagccttaaatttatgctgtcaagcgcgctttcgccgctgccgtaggaaagtgttgcgtttttaaactctacagagcagtcctgcttttcgccttcggttacggtacccgattgcatttcgggcttaatatcaagcaccgcctgaatacggtttccgcaggctaccgattttgtaacgctgataataaggcttgcaagctttataagctcaattaaaatttgcgacatatagttatactgcgccaccacatcgccgctgctcattttgcccgagcctacgcgcagcgcgcccgtgtatatgagcgcaataaccgcaaaatttacaagcgcaaaggttgcggggttcatgattgccgatattttgccgacctttatttgcatattgtttaaaagctcgtttttagcgttaaaatcggatatttcctcattttccttgcaaaacgcccttataacgcgcgttccgagcaggttttcgcgcgttttaccgagcagaccgtccagccgctgctgcacctttttatacagcggaatacaaacaagcattaccgcaaacacaaccgccgccagcacaggcacggcaacagtgaacaccaccgccgagccggggtctacggtaaacgccattataaccgcgccgaagaccacaaaaggcgaacgcaaaacaaggcgcagagtaaggtttgtacccgtctgcacctggttaatatccccagtaagcctggttataagggttgaagcgccgagcgaatcgagctgcgaaaacgaaagcctttctatatgtgaaaataacttacttctaatatcggttgcaaagcccaccgccgcctttgccgaaaaatactgcgccactactgcgcacaaaagccctcctaccgcaaaaagcgccagcacgccgcacatttttaaaatatagggcttatcccccgccgttatgccgttatcaattattttcgccacaacaagcggcacggtaagctcaaaaataacctctataagcttaatgagcggcccgaatatacattcctttttataattttttaaaaggcgcaaaagtcttaacatacattactcctaggaaaaatggcttaaaacctgactgcatatctgcttcataccctctttatcggggtgaccgttctgcttgcttatattttcaagcttaatatattctattccctgcttttcgcaggcggctgtcagtccgttttcaatttcgggtttaagctcggtgtttattattaccgccgtctgcgttttcggcagcactttttttaccctgcaaagcaaatagcaaaacgcgggcagcaccttttttaaatcctcttctgtccagttctcccactgtatacttcccactggggcgcccgaccagctgtcgtttgtgccgccgaaaataatgagcacctcgggcggattttttgcaagctccgccgccgctttatcaaacctgcctataaacgaggtgtcggggcagtacgcgccgtcgtatgtggtgttgcatattgtagtgcccgaccagctgttgtttaaaaggagcggcatacctgttttgcttattaacatatgccaccatgtttcggttttttcggtaacgtcggtagcgtcagtcccgcccgaataataccatgcggcaaaaccctcgggtatgcagccctcaaaggttgagtagctatcccctattatataaagcttaccctttttcaacataaattaaaactccttattttgaaagatatataagcagcaccgaaacgtccgccgggcttacccccgaaatgcgcgaagcctgacctatatccgccgggcgcaccttatcgagcttttcacgcgcctcaagccgcaggccgtaaacgtcgttatagtctatattttcgggaattttctttccctcaagccgcagcatttcgtttacctgcgccttttgccgcgctatgtagccctcgtactttatttccacctcaaccttttcacgcacgctgtgcgaaagagggggtctttccttatcaaacggggctaacatatcatagcttacctgcgggcgctttatcagctcggacaggcgtatacccgtactaagcggcgcagtgcccgcgctttcaagcagagtgtttatctcttcaccgggtgctaaaaacaccgtgtttaagcgcccgatttccgcatttttctgctcctcgcgctttaaataggcggaatatgtgtcatcatttataagccccaatttgtgccctatcggcattaagcgctcgtcggcgttatcctgccgcaaaagcagcctgtactcgctgcgcgaggtcatcatacggtaggggtctgagcagcccttggttacaaggtcatcaatcagcgttcctatataagatgaagcgcgtgaaagcacaagcggcttattgcccttgacctttaacgccgcgtttattcccgcaacaagcccctgtgccgccgcttcttcatagcccgaagaaccgttaaactgccccgcgccgtaaagcccgggataatttttcatttcaagagttgcccgcattgcaagcgggtctatgcaatcatattcaatagcgtaggcgttgcgtattattttaacgtttttaaggcagggaacggttttgtaaagcgcagtctgcacctcttccggaagtgatgaggaaagcccctgcaaatacatttcctcggtttcggcgccgcacggctcaatgaaaaactggtggcgctttttatccgcaaagcggacaattttatcctcaatgctcgggcagtagcgcggacctaccccctcaataacgcccgcatacagcggcgagcggtttatattttcaagtattacccgttttgtttcgtcatttgtatacgccatatggcaaacaacggtgttttcgggcggggaatcggttgaaaagctgaagggcataaccgtttcgtcgccctcctgcacctcggtgtttgaaaaatcaatactgcttttaagcacgcgcgcgggcgttcccgttttaaagcggcgcagcggaagccccagctttttaagcgcaaggcttaaatcggtcgcggggaaatttccgtcgggacccgacgggtagtttacctcgcccacatataccctgcccgcaagaaacgttcccgttgcaagcactacggtgcggcaggaaaaatccgcgcccagctttgttatgcagtgccatatgccgttatctgaatatatatcggttatctcgcactgcttaacgtcgagattttcctgtaattcaaccgtgtgcttcatatagccgctgtaagcgcggcggtcaatctgtgcgcgcagagagtgcaccgcagggcctttgccgcggttgagcatacggctttgcagcgtgtttttatcagccgccttgcccatttcgccgcccagtgcgtcaatttcccttacaaggtgaccctttgccgtgccgccgattgaggggttgcagggcatattgcctatccagtcaacgcttattgtaaacataattgctttgcaaccgagccgcgccgctgcgagagccgcctcaattccggcgtgacccccgcctataaccgcaacgtcatattcccctgcggcatatttttttatttccaaaagttattaccccttatttccccattttttcaacagccttttgctgccgtatatcggggcctataaatttatacgcgtcaaagctgcctataagccgcgaggatattctcggcgtatagcgcgtttcgatttccttcattgtaaggttggtatttattatcatgggacgattcgcaagcaggcgggtattcacaagattgtaaagcgccgattttgaaaaggacgtagccatttccgcgcccaagtcgtctattacaagcaggtcgctttttatcatggcgtcgtatgcaccgcggttttcaccagtaaatttttccttttctatttgcgaaaaaagattttccgccgcaccgtaaaccggaataaagcccctttctataacctcgcctgcaagcgctaaggtcaggtgggttttgccaagccccgcgctgcccataaataaaagattacccgaggttttcgggtcaaatttaagcgcgtattcgcggcagacctttaatatcgtcgtcattctgcggcgggggttgccctcttttgtatccttatcgggataatattttaaatcaaaattatcaaagcgggatgtgccgagcggcatttcctcgctcatttcttcggcaataaacgctgacaccaagtgctttacgcaatcgcatatcttaccgccgacatagcccgtatccgagcagagcgggcaatcgtaccttatatcctgcaccccgaatttatcaagcagcactcgtttttcgcgtgagagtgcctcggattgctttttaaggtcggtaacgtccccgcccgacagcgcggcaatggcgagtgacgcacctatagccgataacgagcggtcaatttcggtaagccgaggttcagcattatatgccgccgcaattgccgagctgcgcagcgcctttttttcgttcagcgcgtttttcttagcctcaaacgcttttttgtatatatcctctttaataatcattccgtattaccctcagtcgctgttaagcattttttcaaaaaggtctatatcatatgcggcaaagctttccttttctccgccgctgtttttcttttcttcaatatcatcgggcgttttgtagcccttttcgtgccagttttccaatattttggaaacatatttcatatcaaattttgaaatcccgtccacacaggcgttatatgccgccgtgagcatctcgcgggacattttccactcatccacccacataagcgaaagctttaattcgtttttgctgggttttcgctttccaaacccgaaagcggagcaaactatgccccacgcctgctcgctcatggccatttggttaagctctttgtcggcggcggctattgtgccgatcccgcggtttacccagtcggtcgcggtggattcaataaagccgattcgcgccttgccgtgcgctgcggcatactgcacaatcataagtataagcgaaacgtcaagccccaaatcgtcataaagccatacaagggtagagctttcgtttgattttaaatttctgccgagcttcatttgcgtttcggtaagcaggtaacgtattttttcatcctcagcgccgcgccgcgcaacgtccgcgcggtcgggcttggcattttgctttacggcgggggctttcacttccgctttttctgcgggctttccgtcaggcataagtattcccgcgccctcccagtaaagcagcgcttccgccacatcgtattccgaaagccccgtggcggcggcaatctcggcgttattcgggtttaccgacatattacgcataatataaagcagcacctttatatgctcgccgcgcgcaagctttaagtgcttgtccgcaacggcggcgggcactgtgaaaacggcggaaaacgcctttggatttataaggtaattcatttttcctcaccgcttgtatcttcaaacattccaaacccagcaacctcgcttgcaggcagcgaaaaaactatcgctcccgcctcggtagagggtcccgcgttttcaattatcgcgcgcataatatcggatttctgcgcagcccttgaaactattaaaataacttccttttcatcggctattgaaacattgtaaaaagccttttctgccttaccgcccgtgcctttgccgtgcaacacggtgccgcccgccgcacccgcggctctcgcagcgttcataacaaggtcggttcttccctcgtttgctattgctacaataagctcataattgtaagacacttgcggagtatatttttccgcatttccgccgcttaaaaattccaaggtttttccccctcccacgctttttatcggcacggcaaccgttattccgtgcccgggtacgcctataaacatacggtttcgctgttcttttataagtcttttggttttttctctgtcggcaacggttataaacacgcgtttctcggtgctttctattcccagaatatcaagcatactttgaaccgccgttcccctgccgtacagcttaatgctcaacggtaagcacagctccgagcaaatatcgccgaaaaccgccgcagcctcggggcggcaaacagaaataatataattcatatttcttatccctcccaaagctcaacaatatcgaagtcgccgtattcctcgcgcgtttcctccgtaaccgcttcgcgctttttatatataagccccaccgcctgaatggatataagcggcaccattgccaccattgccaccacaccgaaagcgtcgcttaatatattgccgcccgtagtagcagccgcgcctataaagaattgcagcataaatgtagccgtcatagggcccgaagccacaccgcccgagtcaaaggcgatagccgtgtaaatatcaggcacaaaaaacgaaagaattaaagcaattgcatagcccggcagtaaaaaccaaagcaccgaaatgccggttattacccttatcattgaaattcccattgcaacggaaacggcaagcgaaaggcttaattttatggctttaccgggaatagcacccgcgcttacctcctcaatttgcttttcaagcaccgcaacggcaggctcggcggatattataaaccacccgaaagccatagccagcggcacggcgaaaaccgccgccttgccgctcataagctcactgcccaaaaccgtgccgaggggtgaaaagcctacgtttacacctgttaagaaaagcacaagccccgcatatgtataaagtataccgaagcaaattcttataaagttgcggcgggtaagctttagggataaaaggttgaatataacgaaaaccgccgcgataggcaaaagcgaaaccgccgtttcaagcagggtgtgcggcagcgaacgcaaatatgcgttccctatgtgtgcggtatcggcaaactgcgcggcggcaatatccgcctccgcattttccgcgggataaaaaagtcctaaaagcattaccgcgattattggtcctatagagcacagcgccacaagcccgaagctgtccgcctcggcttttttatcgcttcgtatgtttgaaacgcctataccgagcgccagtataaacggcacggtcataggccctgtggtcacgccgcccgaatcaaaggctatgcttaaaaaatcagcgtcggtaaaggcggcaagcgcaaacaccgccgcataaaatactataagcaagcggcacaggtttatgcccgttataatgcgcagcatacacacggtaagaaaaaagcccacgcccacacctacggttataagcagcacggcgctgtttatatgcggcaccgtggcggccaacacctgcaaatcgggctcagcaaccgtaaccgcaaagcctaaaataaaggcgacaggcaaaataagccccaagcgccgcgttttggtaagtgccgtgcccacctttgtgcctatgggcaccattgaaatatcggcgccgagagaaaaaagccctattcccaatattacaaacaccgtgcctattaaaaagctcagcattatatcggttcccaccggcaaaacgcaaaaacagagcaaaacgacaataaggactatgggaaacacgctccgcgcggcctcccttattttctccgttatggcggttttgtccttaaaaatcgctgctctgctcataattcatcctattccgaatttaatatgccttgccccaatacagcatatgctttgcttccttgccgcagcacacacattttccgtcaatatgctcctgcttaaacggaatacagcgtgaggttattcccgcgtactccttaagcttatcctcgcactcgcggtcaccgcaccacatagcctttataaatccgggctttgtatcggctatttcctttatttcttcaaggttatgcgcctcaaatgtcattgccgcgcggcgttcaagcgccttgttgtaaagtccgtcgtgtaccgcctttaaaagctcgggtaattttgtttcaagctcgtcaaggtttacaaccgtcttttcgccgttatcgcggcgaacaacaacgcactgattgttttcaatatccttaggtccgagttccacgcgcagcggaacgcccttcatttcgtattcggcaaatttccaaccgggcgactgctcgcccaaatctattttggcgcggcaaattttactcatacgggcgtatacctcgttcgctttatcaagcacgccctccttgtgggttgcaatcggtattaaaaccgcctgtatcggcgcaatggcgggtggcagtaccaagccgttatcatcaccgtgggtcataattatagcgcctataagacgtgttgaagaaccccaagaggtttcaaacggggttacggggttgttgtttttatcggtatactctattccgaaagcgcgggcaaagccatcaccgaaatagtgcgaggttccgctttgcagcgccttgccgtcgtgcatgagcgcctctattgtgtatgtagcctcggctcccgcaaagcgctcctttgcggtcttttcgccctttacaaccggaatagcaagcgattcctcggcaaagcgggcataaacattgagcatgcgtattgtttcttcctttgcctcctctgcggttgcatgcagggtgtgcccctcctgccagaggaactcgcgtgaacgcaaaaacgggcgggtggttttttcccagcgcacaacgctgcaccactggttatataatttcggcagatccctgtaagaatgaacgatattcttaaaatggtcgcagaaaagggtttcagaggtcgggcgcacacaaagcctttcttcaagcttttcatcgccgccgtgggttacccacgcaacctcgggcgcaaaaccctcaacgtgatccttttccttttgcagcaggctttcgggtataaacataggcatataaacgttttcatgccctgtttccttaaacataccgtcaacaatatgctgaatattttcccaaatcgcgtagccgtaagggcggattatcatacacccctttacagaggaatagtcaattaagtccgctttcagcacaacatctgtgtaccattttgcaaaatcctcctccattgaggttatggattttacgagtttttctttagccatataagggagcgccgcggcgctcttccccacctttcgttgataaatgtataatcgcattatattataaactaaaaagctctgctttgcaataccttttaactgtattttccttaattagaatatttttttaaaaaaagaataaaaatatattgacaaatgcgccgtaagaacatattatttgtttagtgtattgccgttgtgttttttaaatgcggcggttaaatttttcaggaggcaatttattatggtatttgagaaagttaaagaaatattggcagaacagttggacgctgatccggatgaaatgactatggaaacaaaaatagccgaagaacttgacgctgacagtcttgatgtagttgagttacttatgtctattgaggatgaatttgacgttgaaattcccgatgaggaaattgaaaacctcaaaacaatcggtgacgtggtagaatatatacagaacaatatgcagtaatatcaacagagtgcaaaacggtcttacccttaaattcggtaagaccgttttttaatattcaattatcttccgcagtggtggtgtttataaaatctggcagagtgttttttacgcgctcgtagtacccctgttcccaaaaaagacactttgcggggtctacgcccaatttatcgtttgtaagcgccaaagcaatagcacggcagccgccaaggcagtgctcaaaatatttacattttccgcatttatcgttcttttcgcgcaatgtgcccaccgtcaggcagacctcgtctaaatatctgccgcctgatagcagctcgcgcagcggctctttttttagatttcccggaatatcgttatgctgctcgtaatagcccgattgctggtggcaggggaaaacgtttccgtttgccgctacggctatcattccgcggtttcctcggcacacgggcaaactgtcgcggtattcgccgctgcatgcgcccaccgccgcaagggagtaatgccgcgttacggggtacagcgtgccgaactgccacacggtaagcaccattttatgcttttttgcagcataagctttccaaagctttaaggcttcttcgtaatattcgttaagcgataatgcggcgtcgcccgcgttctgaacccagcgcggtgcctcagttgtgcggataatacgcatttccgaaacgcccatactgtcaagcagctcggcggttttaagcattgagtcaaggtttttgcggtttacgtttgtttgcaccttaacgggaaaaccgttttctatgcaaagccttattgcgttgagcgcgttttcctcagcgccttcgcggttgcgcatccagtcgtgaaagcccaatccgtcaaatgaaattttcataagtggaatacagccgattttcttaagcctttcaagagcggcggcagttatgtaatatccgtttgtgttaatttcctccacaaacatattacgtttataaatcccctcaataatatcaaagaaatttttgtgcagcataggctcgccgcccgttattgtaaaggcgtttattccgcattcatacgcctcgtcaagcagctttttcgcctcttccgccgtccattcgctttgcagcggcgcattatccgccgcgttaaagcagtgcaggcagttgtaattgcatttgccggttatcatccagttcatagcgggaaaatagcggttatcgcaaagccgaggtctgctccactgctctgtctcttcgccgttttccgctatgcggataaagccgtttgcaagaaatttttctgcaagcgggctgtccgcagcgctcggcagctcggtctttccgtcgcaggcggataaaaagtcaaattcttcacttttaagcccgcgcgcgttgcgctcgccctttatgtaataggcaaagggcaccagccgccatgagcgcagggcaatattcggatttaatacatagtgcatagctgtaaccttgcaggctgccgaaaaaacggcagcctgctttccttttataaatattgggcgataggcttactttttactgttttcatagttctcacagtacattattgcacctaccgatttagaataatagcagctcggacaataggagttgcgcaggcaggtttcgtccctgttgccgtttttatggtcgcgcccgcactgagtacattcaaatttatcgcaggagtggcgcgaggtaactataagcttgccctctatattgtagcatccgccgcccgatacattatcgagctcctcatcgtcaagctcgcccgctttaggatgcaaaagctcaaaatacgcctttgcgccgtcaagtgtcatttcttcgccgttttcttttgcaagacacagcaattcttcaggagtttttacagctttcgcttttgaaataagttcactgttcatttttataatttcctcccgtattcggtatttgggttgttgcaaagccataggcctctttcatacgagcaatacttgcagtattcgcaccaggttacatttccgcagtttctgcatacacggcggtacgggaaaaccgaagtttcaaccgtatcctttgcgcagccgtttttgcactgccaatcccagcagcgaaatcgcgtggtaacaacaagtcgtccgctgttgtagcagttgccgcccgatacattatcaagctcctcgtcggcaatttcgcccgtcttcgggtgcaaaagttcaaaatatgcctttgcgctctcctcggtcatttcttcgccattagtctttgccatttcaagtaattcttcgggggtttttgcctgtttcgcctttactataagttcgttattaagccccatttcaatgcactccgttcgtctaattctttcggtgattgcttttgttgcaaagccacagtcctttttcgtatgtgcagtatttgcagttgttacatactgtcaggcggccgcatttgcatatcccaacactgaccgcatttttatcgatttgattgccgcattttttacactcaaaacccgtacagccgtgaccgacggtcacaatttctctgccgtcgtctgcatgacatccgccacctgaaacgttttcaagttcttcatcggcaattttgccggtcttcgggtgcaaaagctcaaaatatgcctttgcgctctcctcggtcatttcctcatcgttttcctttgcaagacatagcagttcttcgggtgtctttgcctgtttcgcctttgctataagttctttgttcagttccatttcaatgcactccgttcgtctaattctttcggtgattttctttattgcaaagccacagtcctttttcgtatgtgcagtatttgcagttgttacatactgccatgcagccgcatttgcataacacaataccgaccgaattgataatatttttgctgccgcattttttacactcaaaacccgtacaaccgtgaccgacggttacaatttctctgccgtcgtctgtatgacatccgccgcccgctacattgtcaagctcttcatcggctattttgcctgttttcgggtgcaaaagctcaaaatatgcctttgcgctctcctcggtcatttcttcgccgttttcctttgcaagacaaagcagttcatcaggggttttggcaagctttgctttttcaagtatttcatttgtgtatttcatagctttcactccttaacgtccgaaattgcaaagccacaaacccttttcataagagcaatgctgacagtttgtgcagttggctaatctgccgcactccttgcagcaagcactttttacggcgtttactatgcacttaccgccgcatttactgcaggcataattattgcatatgcaaaataccgaaacgatttttcttccgtcgtttttgttgcacccgcccgctacattgtcaagctcatcgtcggcaatttcgccggtcttcgggtgcaaaagctcaaaatatgcctttgcgctctcctcggtcatttcttcgccgttttcctgtgctaaacatagcagttcttcgggggtttttgctttttttgcttttgagatcagttctttgttcattttaacactctccgttcgtcttatttttatttattgcaaagccacagccctttttcataggtgcaatatttgcaatggttgcaaatcgctgttttaccacattctttacataccggaaacgtagatgtatctaaataacggccgccgcaatctttgcatacaaaacctccgcaggtgtgacataccgttacaatttctctgccgtcctttgcgtggcagcctccgcccgatacattgtcaagctcttcgtctgcaatctcgcccgtctgcgggtgcaaaagctcaaagtatgcctttgcgctctcctcggtcatttcttcgccgttttcctgtgctaaacatagcagctcctcaggtgtctttgtgttctttgcttttgcaagcagctccttcttcatttccatttttaaaatcctcctaaaaatattttttaagctctgtaagagctttattatgtaacagctttgtgtgggaataggaaattcccatagcctccgctatgcttttaagcggtaagccgttataataatgtaaaattacaatgtttcgcgagcgcacatctatgctttcgagcgcggcggctaaagcttcaagcatttcgtttttaaaaagtgaggtgtccgcgttttccgccgtcaggttttcgtcaagctcggcggtatcctttcttgtgcggtagtagtcaattaccgtgttccgcgccaccgtgtatatccaagtggaaattgatgccttattttcgtcaaagctttctatgcttttaaaaacctttagaaaaacctcacttgtaaggtcttcggcgtcgtgtgggttttgcacctttttcagcatataccgcattaccttttccttgtactcggtataaaccttatcctttaagagaaagacattcataacggcttttcctcgctgtttggctttttaccgttatctatttcgcccgccgcatttacaaaatcaagctcatcgtcagatagctctctgctgtaaatctgcgatttatcaataagctttttaagccgcgggttttcctcaatttcctgataatcgaaaagggcggtcagtaattgctgaaaattattgtttttctccacggttaccctctctttccgtttggtttttccctttcacttatttatacgaacaaatttgcaaaagggcttattatttattaaaaatttttatgtatcaagccgctgccgctccacaagctctgcaaatacgccgttttgggctatcagctcgtcatatgttccgtcctcggttatcttcccgccgtccagcaccaaaatgcggtcgcactgctttatggtggaaagcctgtgggctattactattcttgtgcatttaagggaatcaagcgattccgaaacccttttctgcgtaaggttatcaagcgcgcttgtagcctcgtcaagcattaaaattttaggctttggcgctattgcgcgggctatcataagccgctgccgctgtccgcccgaaatgccgcccgagccctcggaaatgattgtgttcattcccattggcatacggcgtatatcctcggctattcccgctttttcggctgcgtcccacgcgtcgctttgcgtaagccatggggcggatattactatattggaataaatatcccccgagaaaagcttgccgttttgcattactacgcctattctgcgcctgagggatttcaggtctattcgctcaatatccctgccgtcgtagtaaacggcgcccttttgcggcttttcaaagcctaaaagcaaacgcataagcgttgattttccgcagcctgttttgcccactatggcaacatactgccccgggcgtattttaagggacatattatcaagaataagcggcatattttcattgtacctgaaagaaacgttggtaagctctattccgcccgaaagccttgttataacctctttaccctcggaaatctcgggcacggtgttaaaaaagggctgcaccgtttccaaaatcggctttatctgcgctacggtaagcgccattcccgcaagggacataaacgcgcccgaaaccataccgtaggctgtgccgaaagcatagtaatccgccaccgaaacacccgattttaccgccgccgcgtacataactatattacctataagcgaaatggcaaggcttataaccgaattgagcttaataaatgcgggcgggttgtatgtgagctttgcgttttgcgcataaaggttgccccaacgggcaaaggctcttttttctgcgcccgcaagcttaattttctgtatgccgcttataagcgcatagctcattccgctttcctttgccgaaagctccatttgcttttttgaaatacgcatttgtgcaaacgaggaaataagggagaaagcaaccgttgccaaaataaccgctattgcaggcgctacaagcacaggagcgtatataaatatctgcgaaatgtagatgagcgaaaacgccgaggtaagccccgttgtaagcacggcggaaaccagcatattgcaaagtgatgatatatgcgccgcgcggcttgataaatcgcccgagccgtaccccttaaaaaagtccgccggcaggctcattattcgcatcattgccgccgcctgcaccgaaacgctcattttggtatttattcttgcggttatcatttccttggtagcggaaataagtaaagagcttacggataccgaaaccgtgaacaccgcaattgataaaagcagccttacactgcccgacggcaaaaccgccgcaaacaaaatattgttaagcttaggcgagagcatacctattaaagagagtgctaaagttgcaagggcaataagcgcaaaatcggctgccgagagcgtttccgcaatatattttgcaaccgagccgagaccgatttttttaagtggaaagggcttgtaaaaggctattgcctcgctatcaaaaaggcgctgatttctgcggtttattttaattttcttcccgctgtccgggtcaatatagcagtagcccgaaaaccccgcgggaataagtgcgactaccctgccgctttccttcataacgccgagcattgcgcccaccgcgtcgcgataccagcccttttcaagccttaccgtgcggcgcattatgccgtaggggcgcattaaatattcaagctgctcgtttgtgtcctttatattatcgggcacttcgcggctttttacgtggtaatattttaaaatttcgtcaatcgagcttttcgccgccgcgctgccgtctgaaaggctgcccgtcacctttgagcctaaaacggcagccgccatatttacaaacgaatcggcaaaaacatcgtcgtcgttttgctttcgctgccttatctgttcgtcaaaccaacccattaagtctttccccctttactcgttagttacaagctcggcatacattccgccctttttcataagctcgtcgtgcgtgccgcgttcggcaaccctgccgttatccattactattatttcgtcgcaatcccgtatagttgaaagcctgtgcgccacaactatgcaggttatgccgcgatccttaatggagtttacaacattgtactcagttttagcgtcaagcgcgcttgtggcttcgtccaaaattataattgtggggtcctgtgccaatacgcgcgctatttccattcgctgccgctgaccgcccgaaaagtccttgccgccctcggtcattttgtactgataaccgccctcgcgctgcataatatcctcgtgcagctgtgcgtcgcgcgccgccattatcatttcaaaatcctctattgaattatcccacattttaatattgtttgctattgtatcctcaaacaggattatatcctgatccacaacagccagtgagcctgtaaaaacgctgcggtcaatttcggatatttttttgccgttaaaaagtatttcgccgctccatggcttataaagccccgaaatcagcttcgaaagggtggattttccgcagcccgatggtcctacaaaagccacgcggctgcctgttttaagcgataaattaaagttttctataagcggctctgcaaggcgggaatagccgaacgtaacgtttttcatttcaatattgcccgaaagcttatcgtactcgcagttatcgcttacgggttcatcctcgggaacgtcggtcgggtagcgcattacgtcctctatgcgctccatttcggtgcgcatttcctgtaagctctgccctgccgaaataagcaacgttgcgggagaaataaacgagcccaaaaagccctgaaacgccattatcataccaacagtaaacctgccctgcattgcaaggtacacgcccaccattaaaaccgccgtgttgcaaaccgagcttacaagcgcgggcagctgaccgagcagctgattaagcttttgaaattttacctgctgtgtattggcgcttgcctgatagcccgcccatttttcaaaaaatccgttctctgcgccgcttgccttaattgtttcaatcatttctattccggcaacggtagcgcccgcaagcttacctgagtcgcgcatttgcacgcgggtaatatttatccgcttttttgaaataatgtttgagaaaacaagatttataagcaccgataaaatgccaataacggttaagagcaggctgtaccttatcattacaacaaggtaaaacaccatcattaccgcgtttaatgcaagcggcgcaaaggtgtttacaaggctgcccgctatgctcgcatttgaggactgtcgcccctgaatatcccccgccatacgctgcgagaaaaattccataggcatacgcagcaccttccacataaaggttgtgctgcccaccatagcaagctttccgttaattttaagggaataaacggcgtttatccaccccacaacaagctgtaaaatgccgaggagcgataagcctataataaacggtataaaccactcggggtttttgccggttagcaatctgtcaacaaaaacgcgtgaaaaggcggggcttataacccccgttatggcagttataagcgcggtaattgcagcaaatgcaacggcgctgcccgcaccctttaagcgctttttggcatacgccaaaacagagggcggcttgccgcccggcgtaaaatcttcggtcggctcaaacaaaaggcaaatgcccgtgaacgaatcgtcaaaggttttcaaagacacggcgtattttccctttgcagggtcgtttaaaatcgccttgttgccgcgaaagccgtccaataccacaaaatggttgaaattccagtgaattatgcagggaaattttccgtcacgccttaaatcgttcggctcatacctgtagcccttagcggcaagcccatagctgcgggcggcttttaaaatattgcgcgcgttagagccgtcacgcgatacgccgcagtcaaagcgcacctgctcaagcggcagccatttgccatagtaggcaagcaccattgcaaggcttgccgcgccacattcaagcgcctccatctgcattattacgggcacgtcagcagcaccgtgcgttacgggctttttaagctttttagtttcttttatcttttccatataagcgtcctcagttaagaataaaagagataggcgctacccgctctttaattaccgtcaccttatatgcgccgtcaggcagtcccgccgcgtttgcccgaacctcatacaccgcgtcggtctcgtctattcccgcaaggcttaaaatactgccgtcctttttcttatccagccgtatgggagttgccgcaatatcggttacggggtattcctcctcatttaccgaaataaacgatttatcggtaagagaagatatatccgccgccttaacataacatacaatttcgccgttttcggctgtgcccgcggtttgaaccgccgaatcaagccgcccgaacacgccccaaacgcacgcgcccgcaagcaaaatcacaaccgccgccagcaccgtccatacgccggggtttgatactcttatgtaatcgttaagctgctcgggcgaggtaaccttttcaatacttttctttctgaacaaatcgctcatttttcgctctccttacaggtattttgttacggacagtatgtttttaccgtctttccgctcgtattttacttcgtccattgtctttttaacaatataaattccaagcccgcctatttcgcgctcatcagctgaaagggttacgtcggggtcgggcttctcaagcggattgtagggtattccgctatcggtaaaggtgagcgtgacagccttcgggttatcgcctttttcaagctttatttctgcgctgccatctttactttcataagcgtagtgcgctatgtttgaaaaaatttcatccgccgctatatctatctgcttttgagtttttttagggcaatcaagcttttcaagctcggcatttataaactcggtaattttatcaatgctttctgctgcggcaggcacggttataacacacccctcccccatttttgccttgtattcaaggcagagcattgttatatcgtcaaactgcggcgcgcccgatacaaatttatcaatatcggctttaactgcgcccagaatttcggcaggagcagtgtttttaacgctgttaagcgcgtttttaagcctatccataccgtaaagctcgttttcggagcttgtagcctcggtcacgccgtcggtatactggaaaattttatcgcctgcgccaagcgtaatgctgcccgcgcggtatttcatattttccatacccgcaagcacaaagcccgggcgtattttgtagggttcaaattcgccgcctgcctttaaaataaacggcatttcgtgccccgcgtttacgaagttaaattcgcccgtagcaaggtcgagcacaccctcaaacgcggttataaaaaggccctcgctgtttgattcgcaaagcatattgtttacttcggtgaaaacctcgcccaaatcttttccgggaacggtgtggtcgttaataagtgtcttgcctataaccataaacagcgcagcgggaacgcccttgcccgaaacatcagccattacaattgccaaatgtcgttcgtccaccataaagaaatcgtagaaatcgccgccgacctcctttgcggggtccattgtggcgtaaatgtcaaattcgcgcctttcggggaacgcaggaaaaatgcagggcagcattgaagcctgaatgtttttcgcaatatcaagctccgcgcctattctttccttttcggcagtaacccttgaaaggtttgcaatgtagctctcaagcttttcaagcatatagttaaaggagttgcctaattgctctatttcgtcgcctgttttaagtgaaatacgctgattttcaaatacgcccgtctcggtaatattctttgtaaatgcggcaagcttgcctatcggctttgtaaccaccctgcccacaaagaatatataggctaaaatggtaagcccaataaccgcaaaggctattaaaagcatatttataaggaaagagttaaggtgcgcccgcaccttgctcatatcaagtatatactgtatttcggcaatcgctttgccgttttcatcggttataacagatattcccgtgtagttatagccgtagctgttatcggttacaatcggcttttcaagccccttgttttgcgagtacatttgccatattgttatgtatttttccatatcccgcgggtcatcagggttagccgcctcggtatacggcacgtcgctgccgtatgccaactggttttcggggctgtcccccatttcctccaccattgcgtcaatgtaaaaatgaacgctgtcctcatcgggcacaacaagcgaaagaaaggttacgtttccgtcctttttaagcttattgaaaagcgcggctgttttcttgtaggcgtcggtcttatcgccgccgcttgctataattgctttaacatcctcggcgggcagcattgcggcaatggcattgctgttggtcataacccgctcggcatacatattttcaaggtatgattttgaggtggcgtagctgaaaagcgataccgcaaccgtcataacaagacctattacgccaagcgaaataataaatttaggtaaaagccttattttcatacccttagttcctttcctgttttttaaagtatatttccgcaccgcagcggcagcgcccgccgcatatggggcaaataagctgcttttcatcgtaccacacattttcggcggacgctaaaaagctaaagccgcggcttttaagcgcaggtgctaaaaacgcgccgttttccgctttccagcagaccgtaaacaccgcgcttacatctgctttttgcaggcggtctgcggcaaattctataagccgcgccgcaatgccgagtcctctgaatttttcttttattcctaccgactgtatctgacctattttctcgccgctgtcgcttactccgagcagaattttttcatccagctttgcatattttgcaaggcttttagtattggtcaatttataataaatatatcccgctgtttccccgtcctcggtttttaaaagccaaaaaaacttctttttatct

SEQ ID NO: 163 - DNA, 3391 bp, Unknown
  16S sequences of unknown bacteria
gaggcgataaaatggtacaagaaggcggcggagcaggggcatgcggaagcgcagtccgttttaggagggtattattatattggtaaaggtatggagaaggatatcgtcgaagctataaagtggtttaaaaaggcggcggagcaaggaaatgcggaagcgcagtataatttaggtgtatgttatgaaaacggcgagggagtagataagaatcttgcggaggctgcaaaatggtataggaaggttgcggaacaaggggacgcgaatgcgcaacgcaatttaggcctgtattatattcaggaaaagcgcgacaatgtaattgggtatgcgtggatttttctgagcgtcaaaaacggattggaagatttaacttccaaacttgccgaattggaaaaacagatggacaagggggaaatcgagcgcgcaaagaagctcgccgagaaatattccaagggtaatttcgataaatagaatcctaaaaggcccgattatggccgcgtatgccatatttttatggcatatttattatctgtataaaaataaggctatacaaagaaggaattttttaagaagcaatagtcatgaaaaaaataatgctcagaatattttttcttttagtggcgtgtttgccagtctcaatttttgcggagactggcggcatcaaaattgaaaatttgcgcgggggcgcattcggcaaagcggcaaaaatagaaggcattgcccccaatgcaatggctctttgcatagagggcaagatactttacgcaggcagctcccactacctctacacggtcgatatttccgagccgatggatccgaaagtattggggaaaatcggcggacttggaaatgtcaggcagattgccgttcagaacggaattgcgtatgtggcggcgcgcgagagcggcttgtggatagttgacgcgcgcaatcctaaatcgccaaaagttctgtcgcgctacgattgcatagagcttgcgactggcatagatgttgcgggcgacgttgcctttttgggacagcgaaacaacggggtcgagttcatcgatatttcagatccggcgaatccggagcacatccggattgtgaaaactccggagtcccagtctgtgaaataccgcgacggttatttgtttagcggcgagtggcattcgggggaggtgacgatttttgacgcgcgcgacatggctgatataaaagtggtgtctaaaccgcaaatggacggctatggcgacggcattgacttgtgcgggaatctgctattcgcctctactggccaccattcaaagactcttggaaaaacgaaggaggagcgcttcgggcttgggcacggacttgaaatattcgatatttccgacatctcaaacccaaaaaagctttcgtctataaaatttccgaaattctacaggataggcaacgactattggacgccccgctgctcgggcaatgtagtttttgccgcggacacctacaatgggctttacgcgattgatatatccgacgttaaatccccctcgatagtaggccggattaccgttccgcccgccgacgggaaaagcccgtcggttccgataagctcaattgctctcggagacggagtggtatatttgtcggctctaaaaggaggggtttttgcggtcgagtcgaagtctgcgaaggcgcctactgaaaagaaggggattctcccgaagaatgtcgcgtttcgggcggagtatccgagcgacaacaaaaagtttttctcatggaagctcgatagaagcgtgcaagtgcgcgccgtcgctattgacggcgactacgcgtacgccgcatgcggctcggaggggattgtgacgttaaagctttcggattccgggtttaaaaaggtcgcgcagatgaaaatgccgtttgcgggcgaccttaaagtaaaaaacggcaggctttacgccgcggaaggaatggaaggacttgcggtttacgatataaaatcccccggaaacttttctgagattggaaggcttaaatcattgagcgcggcgtcgtcgctcgttctgtgggtatgggttccgaaaggaaatttcattgcggcaaccgacaggcaaagtggcatattttttatagacgcgcgggatttaaaaaatatgaaagtcgcgttcaacaagggcggatgcccggggtggaacaagtatttttcgggcgatgtcgtaggcggaaaatacgcgggaatgtcgtacgcaaacagccgttttgaatggtttgacttgtctggcgaaaagccgaagcctgcaaacgcgagctataagaataaccccggtgtttcaaacggctgctgcgtttttaaggatagggttttgtggacgaatcgggccggcgaggctgtgttattggaggcgaattgccctgaaaatccggacggcagccaatggaaaggcgtgaaggtcggcggcgaaaaagttgcggcgcttcccgcatgggacgggaagaacaccgtcgcattcacccataggattaaccgcgacatatggcttgcggacttctccgacgagaaaaatccgaaacttatatggaaggcgaaaatatcggggaatcccgacactcccgacttctggaacggtcggatactgattcccgcagggtacgaaggcttgttgatggagcgcaaatagttttgccatttgctcggaggcagtttgccgcgtaagccggcgcgttcggctccaatttggcggggatgggcaaaatttccaaaaaaaaatgaaaaaaaagcttgtgcggcaaacaccgttatgtatctttgaaactcaatttacacgatggtagggtatccaagtggctaaagggcgcggactgtaaatccgttcagctttgctgttcactggttcgaatccagtccctaccactgtgtaattttttttgcggcttatggatttcccataagtctttttttttgcgattttgatggatgttgcctctctgaggaatggtctccggcgttggcgcgcggccgccgttgcgcttgtataaacgcaatgggcggcaaaacgaatgctgcaatcgcacgctgtgcggaaattccggctttgctaaaagtaaaaaagggcttttggcgcgctactctttattctcttgcctcacgtgcgacaggtatttcgttgttgcatttattgcggagttaaaagcccccagacgctcttggggcagtttgctgagcgaccagcttatatatttttttgcgagagggttggtattataattggaaaggaggctccagcatgctgatattgcggtggctcccatgaatgattcaatatcgctcatttcgtccttaacgttttttccggcgcaaatcagttccgaaaattttatgggtcaaccccaaagtgagtggattttaatgaaagacaccgcatagaaccaa

SEQ ID NO: 164 - DNA, 2907 bp, Unknown
  16S sequences of unknown bacteria
gcaagacgaaggccacattaagtggccttctttgcgtgcggaactcgcgatgaaccttatatgcctccgcctggacagacgccctgatgttggggcgtggcttgtcttgggtgtatcgccgaacatatataagttgaaggccacgttatgtggccttctttgtttgcggaaagtgtgtcccggaattcttgtctggaatgggatgcagtttccgcttgggacccgattgggaaagtgtgtcccactattcagctggattccgggatgtattttccggttgaggctcgttgggaaagtggggacctcggacaaaatctcggacccaatttgggtccaggagggagtccgatgtatacgaaagaggagcgcgaggggattctctgggagttccaccggagcggcctgtccgcccccgccgcctgcaggagcctgccgcttttcccgaacaaggacaacctgtatgcttggctcaagctggaggaggcgggcgagctgaccgcccgcgagatgcccggccgggcggagcgcatgcactgctcgcacggcgagggcagccccgcgttcgccgcgaggcgcgcgggcgccgcgcccgcctccccgcggaagcgtcgagccgaagggggcgcgggcaggatgaagggaaccgggcgcggaggggccggcggcgagccgcccatgcagacggactggcgggaccccgccgagcgcgcccgcgaggccgaggtcaggctcgccgaggccctggcggtgttggacgtcctaaaagcaccaggccctggctctttgacgaacgaggagaagcacagggcgggagaggcggcgaggaggctctcgccggcggtgaggctcgcggacgtgaccaggaccctgtcgatcccgaagagcacctatcttgaccaggcgtccaggatctcgaggcccgaccccaaggccgcgctcagggagcgcgtgcgcgcgtcgttcgaggcgagcggcggcgcctacgggcccgagtccgtgaccgccgacctcaggagggggcccggcgagcccgtctcgtggcgcgcgctcgcgcccggggacgccgagacccccgtcgtcgcgtccgagaaggtcgtgcgccggatcatgcgcgaggagggcctggttgcccgaaaggcggcgcagatgcgcaggagggcgaggtactgcagctacaggggcgagctcgcggagcgcccggccaacgtccccctgcgcggggacgggacgcacgacttccgcgccgccgcgcccggcctgctcgtggtcaccgacgtcacggagttcaggctcgacgggtacagggcgtacctgtcgccggcgatcgactgcttcgacggctggccgatctgctggagggtctcggtccacgccgactcggacctgatggtcggcatgctcagggacctggtggggatagtcggcccgacggaggggcggcctctcacggtgcacaccgacggcggcgccgtctacatggggcgcgagtggcgcgaggcgtgcggccccggggtggtgcgctcgatgtcgaggagggcccggagccccgacaacgcgcgcgccgaggggttcttcggcacgctcaagtgcgacttcttcgagggcagggactggaccggcgtgccgttcgacgagttctcccggctgctcggcgaatatatcgagtggtacagggacggcaagctcaagaaggacctaggatggaagaccattagggagtatcgcgaggagaggggctatgcggcatagcgccggggcatggtccggaaaaacgtccgaggtccccaatttcccgttggagcgcctttgggaaagtgtgtcccacttcgaccgcccagagtgggatgcactttccgcaaagcacctcaacgggaaactacgtcccattccaaaggcaaattccgggacgcatttttcgaaagcctgcccatccggaaagcccgtcccactttggacgcatccgggcacggaaccatcgacctatcaggcctcccatcaataaagaggcgtcctcccggacggcggggcacgaagttcatcgcgagttccgcacgcaaagaaggccacttaatgtggccttcgtcttgcgcaggactgtagagcagggaacttcgtgccccgacgcccgggaggacgtttcatttagaaagatggaccgaccgccgtcagcgatgggagctactcccccagcacggccttcttggcggctgcagccatgttatccagatcttccttggtgggatggtccttcgcggcaacccagttgtcgagcagcatcttatagcgagcgttttcgggatcttgctcgagcatggcctcgtagcgctgcttgaccgcggggcccatcttgccctgacacatcgcccagcccgcaagctcggcatccccagccaaattggaagttacgcggtcgataatctgctggtaatagctctgatcggccccaaagccgcaggtgccaaacaggaagacgcgcttgccatgcaaagcggagagcaacgccgcgaccgaaggcgtgcacgcgcccttgtcgcaccaaaaaccgacgagcaccgtgtcggccgcgcaggcgccctgtgcctcgagcgcaacctgatctgcatccgcatcgtcgctcaacgccgcggcatggacaaaatcaacacccgcagcctgcagagcgcgcttgatcgcgcccgaaaccatcctggtattaccgctcttgctgttaaccaccaaagagcacgtcatagtcacgttgcctcgtttcccccaaaactaaagccactaatgcaatttattagatgaatatcttagtacttacgtgacagatgtaaaccaccgtctgtcgattgattaatttgccccacgggcttgctcactgggcaaactggctgcggtagagttcggcgtagaagtcgcctgccg

SEQ ID NO: 165 - DNA, 8360 bp, Unknown
  16S sequences of unknown bacteria
cgcgcccatccactcgctccacttcgagaaagcgcccgccgcgatgatgtccggcacgtcgcccgagattatacgctgactgagaagctcctcgccgagggtgtagtttccgccctcctcgtccctctgatcccagaccgagagctttacgcgatactcgtcgcttgagcggttgaagcgcacgacgcgatccatgatcctctgatccgtgttattgaccgcgagctcgagcacatacttctccggaacctcgtcgtccgggacatggtcaagcagaagcgccgtcgaggatgaggtcatcgaactctcgtcatatgtatagctcatcgcgaacattctctcgctgtttatgacgttgaagtccataagctcgttccccatgatgtcggagttcacgaaatcgagcagaagctgaggctcgcccgccttcccggtctcgtcgaaatccagcgcgtacacgccgacgctcgtcttgtagtaggcgtcatgcccctcggcgaaatagaacttcgcgttgacagtctcgttcccggacggcaggtcgacaggatccccgaacttcttccccgcgacgtcgatctcgcgcacagaccggctgaagctctggtagtccagatacgagagatagaccttcccgtccggagtagctgagacgctgtcgatatccgctccgtccgacccgccgaccggcagctcgaacagcttctttccgtcccgtcccgccgccgcgaccgccgttcccgacgcgaagatgaagttgccgtccctgtcgatcgccgtgccctggagattgaactcattcagccatggtctgtcggcggattcgacctcctcgacgaagagctcgccgatatcctcaattatagtctccccgacagccagcccgtcgtaatcgcagagcgagaagaccgtggcgttcccgtcataattggcgatcaccgcgaagagctctccgttctggtcggcgacaagctgccttaagtacgtctgctccggcaggtcgggcattatctcgtccgactgtactttcccgtcgtaggacagccgcagcaggtgctgttcgcgcgtgcccgtttctctgtccgtgacctttgtcgcgcggacgatgatccctccggcgtacgccatgacctctgacgtgtagtcatacataccgagatcgatctcggtcgccctgtagacgttgctgaccctttccttgggaggcagcttctccccgccgcaggatgagagagccgtaagcgacagcgccgccgtcaggagaaaaacgaatctgcttgttttcatggttgacacttcccttcccgatattgttttgtattctgttttcttactgtttctccgcgagataaatcccgactctgctctgaatgaccttcacggtctcgtcgagcggcttgtcgcccgcgaaatagttctgcacttcctccattatcatttccgccgccttctggtcgatatcgggcattgcggtcgagccgtcaatcagagcctttatacggtcgatatccgcctgcgtcacgtcgcgctggattccggagttgtcgtcctcatggctcgagccgccctcgccggaccatccgctgtagccgccgtcgtagtagaagaagtaatgctggtccgagtacgccgccatcgtcttgtcgaacgcgtcgcgggaaatcgcgaaaccatcccttccgtatctgccggtggattcagagagcacagccgacttgacgaactcccacgcgccgtccttcagccgcgagcccttgaatatggagtagctctccccggcgctcagaaccgctccgttgccttcgtagcacggatagccgacgaacacgacctcctcgcccgcgccgacgctcacctcgtcgctcagcatactcgcgacctcatagatataggacgagtcgagaataaccctgttgtcgcggtacatcttgttccggtcgctctggtagtccatcaggtcgtcgccggacagggaatcgtagaagttgaaatcgtcaggctgagacgccgaaaactcgagcatggcacggaaatcgtcgttgtcaaagtcgcaggttccctcggcgcggttcacaaagcgcgtgagagagttgttcagcagtgtcgacagagtctgcatctttccgccgtagttcatcatgtactgcccgtcgccgagccccttcgcgtactcgatgtactcagatggcgtccagccgtcgaagggtatgttcgacctcttcgcgagaagggtcattatgtagcagttcacgggcatcgtgtaaagcttcccggcgctctcgaacttctgaatcacgttcatgaacaccttcgactggtcaaagctctcgtccttcttcatcatttcgttcatgtcggcgaagctgcccgcggtcgcccactcggacccctttgaaaagttgcttatcgcgatgatatccggcacgtcgcccgagagtatgcgctgaccgagaaggtcctcgccgagagtgtagttctggctctcctcgtccctctggttccagagcgagatcttcacgcggtactcgtcgctcgagcggttgaagcgcacgacgcgctgtgtgacagtctgatttgtgtatttgagagcgagctcgaggacatacttctcctgcacctcctcgtccggcacacggtcaagcaggaagaccatcgaagaggacgtctgcgaaccctcgtcatactggtagctcatggcgatcatccgctcgccgtttatgacgccgaattcctgaagctcattcgcaatcaggtcggagttcacgaaatcgagcagtaactgcggctccccagccgccccggtctcatcgaaatccagagagtaaacgcccacgtcggtcttgtagtaggcgtcgtgtccgggcgcgaaatagaagtcggcgttcaggatgtcgttgtcccccgacggcatgcttatcgggtcgtcaatgcgtttgttctcggtgtctatctcgcagacgacattgtcatagttctcgtagtccatataagtgatgaaaacccgcccgtcggacgcggacgcaagatctctcatctccccgttatcgagcgtcgcctcgaagagcttgttgccgtccctgtcggtcgcggcgatcgctgtttcggacgcgaagatgaagttcccgtcatgatcgacagccgcgccctgaaggtagaacccgctcatccacggtcggtttgaggtgtcaacctcctctacaaaaagcgagcctatatcctcaattatcgtgtccccgacagaagtcccgtcaaagctgcgcagagagaacagcgtgccatcgtccgtgtactgatacatgaccgcgtagagctttccggactggtcggctataagctgattgatgatattggtccgctcgggcgtctccgccatcacctcgtccgacttcacttccccgtcggtcgacaggcggattatgtgtctctcgaccgtgccttcctcctgattgagaatcttgttcgcgcggatgatgatctcgtccccgaccgtcagtatttcggaggcgtaggagatgttcccgatatcgacctcggtcgtcttgtatacgtggtcgaccttctccttgggcggcattttctccccgccgcaggatacgagggaggttgtcacaagcgccgatacggcgaggattatggcgattttctttttcatggtgttgtcctttctgttgtgggttgtgggtttcgacgttgacgtggtaataaatgttccattaaacgttggttttatgcttccatgtttgccatgtccctgcggtttatgtttctatgttcgctctacccccgtaggggcgaccattggtcgcccgtcaaacacatcgctcaaacatagaattggaggcagatataagcgtcagaaggcgggcgaccaatggtcgcccctacaaaggtagtgcgcgattgttagttggtacggagatgtgtagttgcattcaggtttccggaatccgcttcacgcttatgaacgccttttccgccgcgcgtgcctcatccttcgtacattcggcgagcttcccgttctccgcgtctacacggaggaagatgtttttgccgtcccgtctgacacgcagatacattgtcccgtccacgttcgagattccgtccggctcgtcgtcggcgggtatgtacacgaccggaatcatatcgtcgtcaaacaccgcgacaccctgcttcagaacgaaacagaacatcccgtcggtatgcgccgccgcggcagccgtcatgtcataatccgggtcgatatcgtcccccatgtagccgaaatcccgcgccgagtcgagactcgcttttatcgtgagcttcggtcctgtctttccgtcggtgcatagcgccatgcgctgttgggtttccccgctctcagggtcggtcacgtcaagcaggatgaacgtcccgtccccgtccgccgaagccgacagaacagtctcgttcgcgccgatcccctcaatcgcggacggatcgaagacctcgccggcgtttttgccgcaggagacagaagagacaagcatggctgcaatcacaagagtcagaatttttcttttcataagtgtttccccttcataaataatatcagatatccgattaagtttcaaccgtacaaacgcttaagatttccttaagatgacataccggcggcagatgtcacaattttgctctatttgtgtggctggttttattatagcatattgttttacgtttgtaaatagatttttgtgctgttgggtataatttacattcagttcatatttacgcttgctttccggtccggcgcgtggtataatatatgcgtgacgatattccgcgcacaatctgaaacgaaagcgatatttgtatatatgagaagaaaagacacgatggcaagggtggtcggcatatccgccgccgtaatgctcatcatcgccgccgccgcggtggctgtcccggcgtacatattgtcgagggacgagcctgagactcccggactgacgataactcccggagccacagagggacagctgtcccccgccgttccatccgaggagaacgagacagagccgccgcccgagcatgtcatcacagagataagcctctcgttcgtcggagactgtatgctcgcgaccgacggcgggtatgaatatgagggctcgttcaacaagctcgcgaacgaggtcgacccgtcatactttttcgaggattttcaggatatcttcgcaagcgacgactggacgatagcgaacctcgagaacgtcttcaccgacgacccgaatatacagcgccgcggcaaaggctacacgcccgcatactggtacaagtcgaagaccgcgaacaccgacatactgaacgccggctcgatagaggtggtctccctcgcgaacaaccactccggtgactacggcacaaagggcaatcaggacacaaaggacgcactcgacaaagccgacgttatctggggcgacgacgacaagattgtcacgctcgagaaggaggggttcagaatcgcgatatactgctgtacattctattacggcgggtacgagaagataatcatggacaacctgatggcggtcgacgccgactatcgcatcgtgtatttccacggcggcacagagcgggttcatgtcccggacggctggaaagcggcgggcgcgagacggatgatagattccggcgcggatctcgtgataggcgggcatcctcatgtcctccagccgatcgaggaatacaaggggaagaagatactccactcactcggcaatttctgcttcggaggctcaagaagcgaggagaaccgcacgatggtctaccgcctgtggctgaccgtgaccgacggagagctgacagagacgcgcgacgaggttgttccgtgctacctctacagcaccctctacaagccgacgccgatcgccgacaagaatgattacgacgccgtgatggcgttcctgaacggcgagactgaatcaccactcggataaatcatggaaacgaacgaagaattcagcgaatatatatgctgtgagctctgcccgagaaaatgccgtgttgaccggagaacatcggtcggatactgtcacgaaggcgcggagccgcgcgccgcgagagccgctctccatatgtgggaggagccgtgtatatccggtgaggagggttccgggacggtcttcttctgcggatgcacactcggctgtgtttactgtcagaacagcgggatatccggcggcggcgccgggaagactatcacaacagaacgtctggctgagatatacctcgagcttcaggcaaaaaaggcgaacaacataaatctcgtgaccccgacgatgttctcgccacatatcatagcgtcggtcaggcttgcgcgggagcgcgggctttcgcttccggtcgtctataacacgagcggatatgagacggtggaaagaatccgtgcgatgtcagaaacggttgacatctggcttccggacttcaagtacctcgacccggacacggcggcaaaatactcgatggcgcgcgactacccggagggcgcgaaaaaggctctgcgcgagatggtgaaaatgaccggcagagcggaatacaataaccgcgggatgatgaagaagggcgtgatagtccgccacctgctcctaccgggaaagctcgcggaatcgaagcttgtcatagaatatctcttctcggaatacggcaacgacataacctacagcctgatgagccagtacaccccgatgaagacgctcgacaaagataagtaccccgagctcgcgcgccgcgtcacgacatacgaatacacaaagctcatagaccacgccctgtccctcggaataacgaacgccttcatgcaggacggcagaccggcggatgaaagctttataccggagttttcactcgagggcgtctgaatatgtgaatttccaacaaagttcacatttacccgcgggtttatattttcagacaacaaaccgcgtcagaattgtctgtacgtgtgattttttggcttgcccgtatgatataatagtcttgtaattatcgctgacggttgtcggcggaagattattattatcaaggagagataaacatgaaaaagatcacatcactcgcgctcgcggctctgcttgccgtttccctctcatacgccgtttccgccgaggctgtctcgacagacataaagaacggaaccccggtgcttgacggtgagcttgacgaaatctacacgcagtccgcgtcctacaagctcgacaatttcggcttctatacatggggcgacggcagcgccgacaacacctccgacgccaccgcgtacttcctctgggacagcgattatgtctacatatgcgttgtcgctgacgacaagactccttcctccgccaaggacgcaccggaaatcaactggcagaacgacgccgctgaactgtggtttgtggacgacgacatgaccttcaagattcacgcggcgggcgacggcaacttcttcctcggcggcgacaaggacggagctgtcgcgtgggacaagggcttcgaggcttcaaagcacagcgcgaagatgaccgacaagggctggacagtcgaggtcgctctcccgatgaacaagctgaaggctggcaaggagttcggcttcgcgcttcaggtaaacgatatctattctcctgattacgcggcggcaggcgcggcttccggcacacagacgcccgaggacacaaccatgaagctcgtcgctgacaaggtcgaagtccccgccgcagccgaagagcccgcagcagacgacgcctcttccgcctcttccgtcgcgaccgctgatatgggcattgtcgcttccgctgtagctctggcggcatccgctctcgtcatcttcaggaagaagcactgagataaaaaaaaggaacgcccgcgagaaacgttccttgtgtaaagcaatatccttgacaaggctgtcgtgtgatcatgacggcctttttatatcccgggcggtatatccggcttcgtgtccttctcgtcgatgtcgtcgctgaactcgatcctgccgcggacggtcttcgcgaaccggcgcggggacataccgataaaggcgctgaacatcttcgagaagtgagcgagatcgctgaacccgcactcgatcgacgccgagagcggagacattcccttggcgatcatctcagccgcgcgcgagacgcggaccgccatatggtactgatgtatggtctcacccatcatgcgcttgaagtcgagattcagcttctgccggctgacgaagaactccttcgcgataatgtcagacgtgagcttttcggcgaaatggtcctcgatatattttgtgacgtcgaacacatattcgacttttgtaggtaggtaggtaggtaggtaggtaggtaggtaggtaggtaggtaggtaggta

SEQ ID NO: 166 - DNA, 5853 bp, Unknown
  16S sequences of unknown bacteria
tgtcccccttcaccccctcctgcccgcggggtgtgcccctcggactcccccgaggtggaaagggttttacgtttctggcaggattatgctgcttggaccgcccggccctataccgcgccgggctttttatagcaggtgcgtaggcggggcaccttgcacagcagcgagccggggttcgtcggcgagcggtgcttggcaggcgatgcgctagaaacctgttcccctgcttagctcggggtttacgaagggcactcccttcggacgttgaggggtgtgggggcatttcggaagcccccacgtttttggtacttttgtctcacaaaagtacaaaccgtccctctatgcgctgttgtatgaataaatactgtggattgcatctgctcttgctctgccctgccttcctgctctccaccccctaaaagcaatgcggctcgtcctcacactgaaatatctccctacccagccgcagccccagcttgaatccccttcgaaaattttcttcctgtgcttccagcctctccctatccttttcgtcaatcagctccagcacccagtccctttcctccttccccagccgttccgccagcctttgatgcagctcctccaccctctcgttttccttttcctctttgccgaatatcctggacaatttttctaccagcatccctttcctcccttcctcaaccaaaggataccagcttttttctttctttggcttttttagaacaggttgttctaaaaaaaagggagctttacccattggaaagccccaacccatatttgatccagcttaagcattcccgcacgcgtgaaaaccatatacccggccaatcgctcctggcgcggctgcatgtaaccgaaagcccctcctgcccggccagcatcctggcccgcatcatgtggtagtcgctggtcaccagcacgcaggtctggtatccgtttgcctccatgatgcgcttggcaaagcggaggttttcgcgggtgtttctgctttgcgcttccagcaggatatcctcgcccggcacgccccgcgctttcaggtacgccgccatggccaccgcttccggcacggtttcgtccgtgcccttgccgccgcatacgatgatcttgccgcccagcccctgttcatacgctttctgcgcctgctccagccgcaaacgcagcacccggctgggctccatgccgcgcgccttggcccccagcaccacgatgcagtctgacggcacagcatcgtcctcttccccgcttttgatccataccaccagatacagcgccaaaaagcccagcgccagcatccctgccgccgccaggcaaagccaccgtccccaattatgccaagccagtttgatcttactcatgtccgttcctccgccgccatcttgtcctctcccgcccacagcgcagcgatagagtgccgtacatacccgtcttcccgctgtacaggccgccccgcatacgcacctaccacaacaagcccggcgcggtatcgggccgggcgggcccacaggcgctgcctgctaaaactcgtcctcagcagcatacatcagcgcggggcgcggctttgcgccggtatcgccgatctggttgttcataaagctgaaatacccgtccgccccgatgatcagatgatccaccagcagcacctcgatgctttccagcgcatgcatcacgcggcgggtcaggtctatatcctctgccgtggggcgcagcgagccggaagggtggttgtgcatcatcaacacgtttttcgcctgcgtgctcagcacggcgcggatgatttctcggttttgcaccggcacgcggtcgatggtgccctccgccagctttaccgcctgcaacagccggcactttacatccaaacacagtaggtacagcgtttccacgcggcagtccgcaaacagcgcccggccgtattcgcccgcgcgttccgaggtgttcaaaagcggcttttcgccagtgcggctcaaaagataccgccgcgtcagcgagggaaacagcgtcaaaagcgtggcggcgttttcccctacgccctccacctgccttaaatcttcatacctagcctccaatacgccggatagcgaaccgaaggtatggatcagccggtgtgcggtgcggttggtatataccctggggatggcataggtcagcaaaagctccaacacttcatgatcggccaggcccgccagcccggtttcccgcgcccgctgccgcagccgcgctctatgcccgttatggggatgttttggcgttgtcgtcatcgtttgcctttctgcgatgcgggcgcacggcccgccggatttttttattttaccatgattcggcccgtttcgccattttttgggcggcctgtccattgacgatgccgcgcccgccacagtatcataaggataacgaaacggaggggatttcatatgcagctcaacgacgttgtattgtcctacaaggaagaaatggtttcccagctttgcaagctgatctccatgcccagcctggaggcgcccccgctgccgggccagccctttggccgtgccatgcacgactgtcttttgtatacgctggatctggccaaaagcctgggctttgcccggatgagggatgtggacgggtacgccggctatatcgagatgggccagggcgaagaggagatcggcatccttgtgcatctggatgtcgtgccgccgggcgatgggtggaccctgccgccgtttgagggcacggtgcaaaacggccgggtctacggccggggcagccaggacaacaaaggcggcgtcatctcggcgctgtatgctatgcgcgccctgctttccgaggaaaatacctttcataagcgcgtacgcctgattttgggctgcagcgaggaaacggggatgacgtgtatcgaccattacctcgaagccgagcacatgccggactacggcttttccccggacgccaactatccgctcatcaacctggaaaaggggcttttgaatgtggtggggcactgcgccgcgcccgtgtccgcagaagggcttcgggtggtttcgatgtccgccgggcagcggcccaacgtgatccccggccgggccgaggccgtcctctttgcgcccgatacggatgcgctttcaaaggcgcttagcagcgctgcgctttgcgatgaggatagggcgcgcgtgcatctttccctcgacgggcacaccgctacgctcatctgcgacggcatcgtcggccatgcctccacgccggaaaaggggcgcaatgccgccagcctgctgatgcgtgtgctctctgccctgccgcttgccgatgcgccgcgggaaaacgccgtcaaagccctatcgcgcctgatctgcgacgaatccgacggaacctccctgggcgtggcctgccaagacgaattgtccggcgcgcttacctgcaacctcggccttttgagcgccgatgaagccggcgtaaactttacgctggatttccgctatccgctgtgcaccagccaggacgccatcatggcccagctggcaagcgcgtttgcggacagcgggtttgccttaaaggccgagcacggccaggcgccgcaccatgtgccggaggattcgccgctggtgcaaaagctgctgcgcgtctatgccgagcaaaccggccagccatcctactgtatggccatcggcggcggcacctatgcgcgcaagctgccgggcagggccgtggcctttggcatggaatttcccggcacgcccgccacggcgcatatggcggatgaatacatcatcatcgatgaattggtgcaaaacgcccagatcattgcccacgccatccgcgccctggccatagagccctggtaaacgcaaggctgtggggcgccgtgggcgccggccctgaaaatttccaaatcgttgcaaggaatgcgttgactcttgtgtgaatttttggtatactttcagggcattctattggagagatggccgagcggttgatggcgctggtcttgaaaaccagtgatgccgaaaggcaccgggggttcgaatccctctctctccgccagcattccaatggaatccatacagcctggagaagtacccaagtttggctgaaggggctcccctgctaagggagtaggtcgggtgtaccggcgcgagggttcgaatccctccttctccgccaaaaagcctgaaaacgccgagttttcgggcttttttgatgctttgaatctcttacttttacaaatgcctaaaaaataaagtggagaaaagttggataaaatgggtttctattacgcccgctattacgccccacttatctttgctattacgccccatccatttttgctacttcactcccatttcacttttgggggcttcctttctatcaacgtccactaaatcccaaggcataagctcccgcttttcctctatcactttgtctggaacttcttgttgtttattgtaaatatatgtagaaattggttgtaatgattggttatagtggtgtaaagtaaaagagtataggataaatgaggtcggaaatggttcccgacacactcgcatagacgagtacctgagatgctggatacaccgcccagccatttgcctagtgtaaggcccacagattttctgtgggctttcgcaaacaaaaaaggccggattgctccggcccttttagaatttcatcaaggaatttccactttatggccctttagaatatttccgtcagttatgttccgatatgttccttctccacgccctgataaatcccagggggagccctgcctatgtgtaagcgataccaatgcccctgctgataactgtccatacatttccaatgtcctatcgatcgatttcatcttctctataccgtcttttgaaaaaagaatcctgctcccggtcatgggctctggtatcgtttcttgaatatcttgggccttgggccattctttttcttccaattctattgtgtcatgtccatgtttcttgaattctctatagactgaatctatcaccggcccataccgaaatgcatatatattgtcttggaacagctgacgttttttattgcataaatagtctgcatagcaaaaataagttaatttttcaagctttaggtgcgtacattttaccttggaaagaatatagtttgcgacatccattccactcaatttttgatcctgtcgtatcaaattgcagaattcttctatcgtatctattctttccacgtcttgaaaaaacagatcagaatccaccaccgactcccaactttctgctttcgtacttagtaaatgtgtagaaatggatacatctgatccgcattcttccataatctgccttatacaactatctattgttttttgctctattgcccctgggaaagatacatccaaagcaatgcgcctgccaagagagtatgaactactcataattataaagtgccatatcattctaaattgcctcctttcttatatgtctcttcccattttgtatattcctgcttataaaaatgatggttttttttattgttttcttcgtcttcattgcaccagatttgcaactcccacggaaaacataggttatctttcattatgtacacatgcagcgctctgtaaccatttttactgctatccttgcagctaagcttcctatgcttcaaattctcgcctaggaattggtccaactcttgttttcccaaccttcccggcccaataagccgtacaccaaataaatcattcaaacactttttaatcggaatctttccttgttcttttcttgtcttatagcgcctgatcttatcctgtatcgagttttccgctttgattctttggcttatgcaacatccttcgtttagtttcaggcttgccaagtcctgtatgatctcctggctacg

SEQ ID NO: 167 - DNA, 13088 bp, Unknown
  16S sequences of unknown bacteria
ggggcgctcatcgagatgatgagctgatcggcgtcattgcgacaaatgaacatcgaaagtatatctgctgcttttttgtgaagtctgcgtaccatcggcaaggaatcgggagaaggctgtgggaatatgtgctggatcacagcgatcattccgtctatacggtgcacgcttctccctatgcggttcctgtttatcaccatttgggcttcatcgatatggatgaggaacagacagccgatggcatgcggtttaggccaatgaaattcgagagggacgatcacgaaatatcaaattgacgataaacagctggatgcttccgtatttctttcgctggtcaatcaggtatggccgaatgattatgatgtgaaacagacggaaaaggcgttggctgccttcgcatccttacagatggatatttcttcggcacgatcatcgagctgctcatccttcctgcgtatcagaagcgaggatccgttgacattggccaagctggtcagcttggtatacagctgctattgtcggaagcagcagcgatcggtgcggtcattggcgctagcgtaagctggatatttaagcgctatttagcgaacaaagaatgatttgctcttcctctgtgaaatgaaaaggagcagctccatcagatcctccaacgaccttgaacacagcggaggatctttttcaatgaatgagcactttgacgatgatcacaacggtctatgacatgaataacgaggagagggtggtcctcattacaggaaggtggcagagaacgatctttgccgcctaaaaattttttgaaatggtcttgcttgtgacgctgcgtaatgatttatagtaaacgtgtcaggaggtagatgtacatgacaaaatatagagcaattccgcaaggatttatgacggttggcgaggtcgcaaagaaaatgggagttactgtgcgcactctgcaatactatgataaagaaggactgctttccccatcagcagaaagcgaaggcggccgcaggctgtacaccgataaagatctggtcatgcttcatcagatcatatcgttgaaatcactgggcttttctttggatgatataaaagagcggttgatctctttggaaacgccggctgatgttgccaatgcgcttacagagcaggcagatgacatacgcttgaaaatagaacagcttcaggcttcgttatccgcaatagaacagttaaaagcagaagttctgcaaatgcagaccgtcagctttaagaagtatgccgatatcatcgtcaatctgcagatgaagaatgagttttatcctctgatcaagcgtttcgacgatgatacgctcgaccatatacgcagccggttcgatcaggaaagcggcttggattttatggacagattcaaccgcctgagcgatgagatcgtacagcttcaacaagaggatgtaccgcctgaaagcgaaaaatgccagcaggtcatcaaagcatattggggcttgatcatggagttcacaaacggcgatatgcgcatgcttccgaaattgatggaagttggcaacatcgataccgccgaaaacgactgggaagaacggcaaaagatcgtcaatgattatgtcggcccggcgctgcaagtttatttttccagacttggcataaatccgtttgaggaggtggaaccgtgaaaggcacaatacaagttcgcggattaaagaaaagctatggcagccatatggttctcaatgggatcgatgttcagattgaaaaaggagagatctttgctctgcttggtgtaaatggagcagggaaaacaacgacgctcgaatgcatcgaaggactgagaagatatgacagcggttcgatcatggtaaacgggagaatgggcattcagctgcagtcatcctctttgccagcccatatcaagccgatggaggcggtaaagctgttcgcaaagtggcataagacgacaattgatcatgccatgcttgaggcccttgggatcaaggaaatggaaaaaaagcagtatatacaattatctacagggcagaaaagacgattgcatcttgcgctttcgctgatcaatgatcctgatgtcgtctttctcgatgagccgactgcgggacttgatgtcgaggggagactatcgctccacgaacagatccgaaagctcagcgcacacggaaaaaccatcgttttggcaagccatgatatggcggaggtagaaaccttatgtgaccgcatagccattctaaatgacggaaatatcgtcttctgcggcacagcttcggaactgagcgacagggtcggaagaaaatatgtcatccatatcaagacgcagcaagggaacaacatggtggaaacggacaatatcgaagatgctttaatatccgtattggacgaattaaaacagaaaaggctccacgtattggatatcaaggtagatcggggcacactggaacagcactttatcgagatgtcaaggaggaaaagaggatgaacgggtttttatatggtgtggcattacaatggaaattggatatccgcagcaagtctttgttggtcacctgctatatcgtaccgctgattttctttctgctcatgggtggtatttttacttctgttatgcctgaaatgagaaatacactgatacagtcgatgatcgtgatgagcgtttccatgggtgcgtttatcgggctgccgccatcattgatcgaaacgtatggaagcgatgtgaaaaaggtttatcaagcaaatggcatcccgttatatttagggcttgtgaccatgttcctttctgcatttgtgcatctgatgatcagctgcaccatcatcgtactgcttgctccgatactgtttgaggcggctttgcccgcacagcttccatctttctttcttgcgcttgccctatacatcatcgtgtcgctgagcattggaagcatattcggcttggccgtaaaaagtcaggcaaagctgacgatgctatcacagcttgtgtttctgccctcgatcatgctttcagggatcatgtttccgatcagcttgctgcccgatcttcttgaagccatagggcgcgtgtttcccgctttctggggataccgatcgatgttggataatggtctttgctttgacaatctatggtatttagtttttgtgtgctgtatagcagtaatggtatgtgcgatactgttgaacaagcagaaatccaaataagagcagagagactgcttttctccgaccgtctcattgcatagagcatcacacctcactataattgaggcaggaggtgtcaagatatgccaaatgaagataaaaaagatttcaacgctatgctgcacgatagcaaggacatgcccaaatttcaaataattactgaccaaaaaagcattgagaaatatggcggcaataaaatgtattttgccccgcctatcgactatgacaaggtgatgaagcagattccttatggtaaggtgatcaccgttggaaaaatccgtgaatattttgccaaactgaatggggcagattttacagacccgattacggccgggatatttgtatcgattgcagcgtgggcaagtgctcagcgtattgaagatgaaactccctattggagaacattaaaagctaatggagaactgaacgctaaatatcctggcggtgtagaggcacagaaagtaaaactggaagcagaaggtcacatcatcatacaaagggggcgaaagcatatcagatactatgtgcaagagtatgaaaacgccttatttcatctacaatgaacagctgcgcatgaataataagaaagctgccgttgaggaatgaatgttcctgctgcgacagctttcttttctgcttcttattctgttctgcaaagcagatcaatatctgtatccgtctctgtgttctgtctgcatagcgctcagatggatctgttccttcgcatgatcagggtccaggagaggggagagacatgcatacagcttatcgatctgtgcaggcgtcaatttattgttctgtaagagatcgatgttgagctgagcaagaacattgcggcgatgaagcacatgatccgtgcagtcattgagcgtcagcttcttgaatgtgcatcggtcgctgaatacgatataggaatggaacagcccttcaggcacaaaattgaatccggagatgtgcaaataattgctcagccacttcaagtgcccttggttttgccaaatcggattgtaaaacggattctttttagatcttcctcggccatttggaagcacctgtgtccaatatcggtcatggctgttgccaaagatccatccgccaaggttcttggattcgaagacatagatgccggattcatgcacgaaaagcagatcgacctctgtcatgcctccgtttggtttggggatataacaattacaaaggcattttccatatctaggcacttgctgaagctgtttccataacaagtattctcctttggttcccgtattgcaataaacatcccacagcgtgcgcttggtctgcgcaaaataatctgtcttcttatgctggatgctggcgatgatccgccagatcacgagcaggaagaaagcgatgatccccaataatggcatatccgatccctcattttctgtaatttatattaacacgggcgtatgcctgttgtaaatcattgaggagatcgatcatcaggttcaaggaaaatcagatatattcatggtgtgcgagctgtgcatcgatgttcaaatattacataatatacattatgcgaagtaacgtgaataaaggtaagcaggaatttcctttgtattttctccattgaccataaaaagaagagcggtggtttcactgcccttctggttcttcgctgagtccgagcacctttacagattcttccatctccatcgtgtcgaaccgtcttaagttcttctggatgatattgcttcgatgcatgagatcatcagtgtttttctgtgcttctgaaagcttcttctgtgtcttgctgatcagttcggcaaagcggccgtactgtgtcttgatcgcggagagcgtgcgcaggatctcctcggacttctgattgacgctcagatatcggaagccgacgcacaggctgttgagcagcgcggccagcgtcgtcgggccggacaggatgaccttgtattgcttctggcattcctccgcgagcccgtccatgcgcaggacctcggcatacaggctttcggtcggaaggaacatgatggcaaaatcggtcgtatccggcggtgcgatgtatttgtcccggatcgacatcgcttcgctcttgatgcgctgtctgagctcgctgagcgcggatcgcagcgattccgtatctgcctgctgggatgcgtcctggatccgcgtgaacagatcggccgggaattttgaatcgatcggcagatagatgaactggtttggattctccttgtcggggatgcggaccgcatattccacacgctccgatgaatttttcctggtggcgacatcctcatcatactggctgctggtcaatatgtctgccaggatgttgcccagctgcatctcgccccagatcccgcgggtcttgacattggacagcgtgcggttgagcgactgcacgccgctttccagattgcgcagctcgcccaggctcgtatacaggctgctcagccgttcgccgatctgacggaagctgtcatccagccgtttatccaatgatgaggaaagccgcgaatcgatgccgctttgcatctcctgcagcttcttggaattctgctcctggatgatgctcagcccgtctttgatctgcgtcatcagagatgcgctggcccgctggttttgttcggaaagatccttggtcagggcggactgcagatccttcatcgtcttttcattttgtctgccgctcgtctcgagcaggtccagctgcttttgcagcgattccagcatctgtgagcgcatcaaagaaaaaccggcctggatgtcttgctgaagctcggccttggtcatattgaattccttctggaacatggtcagtttttcgccggtcggctgcatcgcttcccggatgtcagcgcgcagctgattctgcagacgctgcatgctctcattgtgatccttgagcagatccaggcgcagctgattcagctcgctctcccacgccttcttgtcctgcgggcgcatcatcagataaaccaacaggataaggacgaggatgagcaggatcaagatgatgatttccatagctgttcttcccttccctcatttatttctcttcgacatgttccatgccggttgccaggatggcgcggacatggtcatcgtcaagtgcgtagaacacggtcttcccttccctgcggctggcgaccagtctggcgtccttcaggatgcgcagctgatggctgatcgcggactggctcaggccgaggatcgatgcgatgtctcctacgcagagctcatcggcatataaggcatacatgatccggatgcgggtcgtatccgcgaacacgctgaacagatcggataaggcgcgtacagagcgcgcggatggctcctgtctgcggatctgatgggcctcatctgcagagagcgccagataatcatgttcattcatcttcgacaccttcttcccgcttgaagatctttgccggaaaccgtggtgtctgcagcagatcgaccgctccttggtaggcatgcagcgaaaaaggccgctgtgccgccaggatatcatagcgtacgccataccacaggttgccatagccggtatccgcaaagccgcggtccagataaaaccgtctccgctgcaggcgctggagctgattatctgcctgcggctggggcgattcgatatctgcgcagatgcagtgatgcggatactgctggaagaggtcgttcagcagggcgctgccgtatccctttccgcgctgatcatgcctgacggccagataaaacagatagatcatctcttcatggcgcatgatgaagctgaacccgcagaaggcgccatcgtctttgagcgcgcgcagcgcataacggtcatccttgctcagactgagcatctgtgaaaaaggcatgcgttcattggccgggaaggcctctgtatatagctcctccagttccttcaggcaggcggaggaacaaagcactgattccatatgctgcataagctctctcttcccttctttgtgtcattttagcatgtctgggacgcgctgataacccattcacgcaaaattcagtgttttttttacattcgcttacaatgcggcacagaagatacacagatttatgatataatttgatataacaaagaaagggatgtgaggggaaatgaatactatcgtgatcggctgcggctttgccggcgcagtcatcgcccgaaagctggcagaggcgggagagcatgtgcggatcatcgagcgaagggcgcatatcgggggaaatgcgcatgatgcgctggatgagcatgggatcctgatccatacgtatggtccgcatatctttcatacgaatgacgaggaggtctttcgctttctgtcgcggtttaccaaatggcggccgtatgcgcataaggtcgctgcttctgtccatggcaggctgatccctgtgccgttcaatcttcgctcgctgcgcctcgtgttcggcgaagaggcagagatgctgacgaagcggctgaaggcagcgtatggcgaagagaccagcgtctctatcctggagatgatgcaaaatgacgatccgcagatcaggatggtcgcccgttatgtctatgagcacatcttcctgcattatacgatgaagcagtggaatcagaagccggaggagatcgatcctgcggtcacggcacgtgtgccggtccgcatcagcgaggatgaccggtattttcaggaccgctggcagggcatgccaaaggagggctatacggcgctgtttgaacggatgctcgatcatccctcgatcgagctgtcgctgaatacggacgcgcgcgatgtgcttcgctttgaccaggcgcaggggatgatctatgcggatggccggcctgtcgaaggaagagtgatctgcaccggtgcggtggatgagctggcagatcatctatacggtccgcttccctaccgctcgcttcgctttgagcatctgcacgcacagcaggaatatatccagccttatgcggtggtcaactatacggtgagcgagccgtttacccggatcacggaattcaagcatctcagcgggcagaaagcgccgtccacttcttatgtccgcgaatatccgatggcccgcacctcgctggatcaagagccgtattacccgatcgttacggatgaacatgagcggctgtatgcccgttatgtgcaatgggcagaccgctttccgcagctctatctgctgggcaggctggcacagtatcgttattataatatggacgccatcgtgaaagaggcgctgcggctggctgatgaattgacgaggtgaggaaaatggaagaaaaactgttgacgatcgcgattccctgttacaattcgcagggatacatgcgtcatgccgtcgattcactgctgcatgtgcaggagggattggagatcttgatcatcgacgatggctcaaccgacgatacggcgctgatcgcggatgattatgcccggcgctatccggataccatccgttccctgcatcagcgcaatggcggccatggcagggccgtcatgagcggcttccagtatgccagagggacgtatttcaaagtgctggacagtgatgactggatggatgcacaggccctggatgcactcatgcgcctgctgaaagagctgcgccgcagacagctgcagacagatatgatcatcaccaactatgtatatgaaaagccaagcgaaaataagcgacatgtcatttcctactgcaatgtgctgccgaaagggcgtttgctgagctgggatgaggtcggccatttcctccctcagcagaaccttctcatgcattcgatcatctaccggcgggccatcctgaacgaatgccggctggaattgcctgcgcatacgttttatgtggacaatctgtttgcctatcagccgctttcctgcgtcgattcactgatctatctcgatgtcgatctctatcattactttatcggccgcagcgatcagtcggtgaatgagcagatcatgatcagccggatcgatcagcagctgcgggtgacccgcatgatgatcgaaagcacggacatctcttttcgggatgttccccgccgttatgcttatcagatcaagtatctgaccatggtcctcgtcgtctcttcaatcctgctcattcgcaccgcaacgccggaggccctggagaaaaaagagcggttatggcgcatgttcaagcaggaaaagccatggctttaccgcgatgtgtcgcacacgatgctgggttggctgatccagcgggacagcgccgcaggacgccggttgctctccctcttatatacgatcagccagcggatcttctcttttaattgaacgataaaggccaggacatgagcgtgcatctgcaattgctcatgtctttttagatagccatgaggctgagcatcaaaaaactcccctttcagcaagaggggaaagctttccgctctctgtccaaaggggaggtatcatcgcaggatgttcctgattatttgactgcgtccttcagcgacttgctcgccttgaacttcggcgccttggatgccgggatcggcatcttttcctttgttgccggattgatgcccatgcgagccggacgctcgcttacttcaaatttaccgaacccggcaatgtcggcctttccgccttcagccaggacatttgtaatttcttcgaagacagtatctacagccacggcagcgtccttcttcgtcatattcatcttttcagcaacgatttcgaccagtgcttttttattgatgatcttgtccatagtcagttacctccatatatcgtaaacacatgactatattatcatcatgggttctggaattcaatagttttttcatctttttcgggccggaatgaacggctgatttggccgttttcttacagcacgatagcgattacatttccctttcctttgttgaccagcttggtcaggatatcctgcaggcgggccctggccgcctctgggatcatggacagcttgacgttgagcccatcgcggatgagatcggaaagcttgcgtccgaagatgtctgattcccagatgctgtcgctgtcttttccctcatcgcgcagcaggtagcgcacaagttcctcgctttgttcctttgagccgatgatcggctcgaaggagctttctacatcgaccttgatcatgtggatgctcggcgccacggccttcagcctgacaccgtatcggcttccctgtttgacgatctccggcttgctcagggagatgtcatcgagcgaagcgctggcaaatccatatccggtctgtttgaccatcttcagcgctgaagcgatggtatcatactctttcttggccttgctgaattcctgcatgagcgcgatcagctcgcctttgtctttgatctccacgccgatgatctctttcaggatcgtctgatacagtccgttcaccgtgctgatctcgacgttgacgctgccttccccggtatcgatatcggcgatattgctcgattcgatatactcattttcattgaggatatcggtgatcttttccacttctctcagcttggcgacgctggccatgctggaggcgatggtctcgttcacgctcttcttcagccaatggtcatcatcgagcacagagacccatcctggcatgttgatgttgatcgtggagaccgggaattcatagagggcctcgcgcaggatatgatacacatcgcgctgtgacatggaattgacggccatagctatgatgggcacgtcatgacgctccttcagcttgtcgaccaccatctggcatgccgagccctgcggatcggcgctgttgacgatgatgatgaatggcttgccgatctgattcagctcatcgatgacctcggtctctgcttcaatgtacgcttctctgggcaggtcagtgatcgatccgtcagtggtgatcacgatgccgatggtggaatgatcctggatcactttctgtgtcccgatcctggccgcttcattgaacggcagcggttcgtcattccatggggtgcgcaccatccgcatgccgtcctcatccttgtagccgcgggaatgacatatccgacacagtccaccagccgcacattggcgctgaatccgtcttcaaaggtgatgttggccgcatgattgggcacgaacttcggctcggtcgtcatgatcgtcttccctacgccggcctgcggaagctcatcgatcatccgcgcgcgctcatattcgtcgctgatatgggggatcactgcctgctgcatgaaattcttgatgaaagtcgatttgccgacgcgcaccggcccgaccacgccgagataaatgtccccgcccgtacgctttccgatatttttcagtaattcgctcgtatccataacgttcctcccttagtcatttgtactctatgtgaaaaaaagggagattatgactacaaaacgggaaaagagcgatgcttttcccgttttgttcattgggcgtttccgacttctgccagttcgagccccttattttgttccattgcccatttgatgccccagttgttcgcaaagatgatcaggttccttcctttcaggtccctgactcgcttggattctgaggtcagattgagcgtattgggatcgagtccttcattgaggatccagcgcacacactgatatggcaggatctccagcttgatctccacattatattcgctcttcagccgctgttccagcacatcgaactgcaggacgccgacgccgccgacgatgatctcctccatgccaatgttgatctcctggaacacctggatggcgccttcctgagcgatctgcgtgatgcccttgaggaactgcttgcgcttcatcgtgtccttctgggtcacgcgggcgaaatgctccggcgcgaacgtcgggatcttctggaattcgatcttcatggacggatcacagagcgtatcgccgatcgagaagatgccgggatcaaagacgccgatgacatcgcctgcgtaggcttcctcgatgatctcgcggtcctgcgccatgaactgctgaggctgcgccaggcggatcttgcgcttcccctgaacgtgcatgacctccatccctttttcgaatttgccggaacagatgcgcatgaaggcgatccggtcgcggtgcgccttgttcatgttcgcctggatcttgaacacgaatgcagagaacggcatggaggcagggtcgatgacctgctcatcaagcgtcactcttggcagcggtgatgtcgtcatctgcaggaaatgctccagaaagggctgtacgccgaaattggtcagcgcgctgccgaagaagaccggcgtgagctcgcctttggccacacgctcctgatcaaattcggtgctggcgatatccagcagctcgctgtcctcgcgcagcttctcgaagaagtgctcgccgatcacctggacgaaggtatcgtcttcgagagagccttcggtgatctgtgcggcctgcatgccatgatctccgccgtgaaaggcaatgatccgtcggttgtctcgttcatatacgcccttgaattccttgcctgaaccgatcggccagttcatggcgtatgtctcgatgcccagttcatcctgaatgtgctccatcagcacgaatggatccatggctgcacggtccatcttgttgatgaaggtgaagaccgggatatggcgcatcagacataccttgaacagcttcttggtctgtgcctcgacgcccttgccggcatcgatgaccatcactgcagaatctgccgccatcagcgtgcggtaggtgtcttcgctgaagtcttgatggcccggcgtatcgaggatgttgatgcaatagtcttcatattcgaactgcatgacggagctcgatacggagatcccgcgcttcttttcgatctccatccagtcactgaccgcatgcttgttcgccttctttcctttgaccgatccggcttcgaggatcgcgccgccgtatagcagcagcttttcgg

SEQ ID NO: 168 - DNA, 4786 bp, Unknown
  16S sequences of unknown bacteria
aggacaagggcgcagctcagctgatgggcgtaaacgtcaaccgcacgatctcgctgaccttcgttataggttctgcgctcgctggaatcgctgcggtgctttacgcggcgaagtatcagaacgtcgacccgtatacaggttccgtgttcggaatcaaggcgttcgcggcggcggtcttcggcggaatcggaagcattccgggcgctatgatcggcggattctcgctcgggctcatcgaggcgctgacgataggcttcctgcccgaccagatgtcggcggtctcggacggcgtcgcttacggactgctgatactcatgctcatcctgaagccctccggacttcttggtaaaaagcacatcgagaaggtatgaagcgggaaagataaatctttcctgcaaggattttgcgtccttcgttgtctgccgacaacgattttgccccgcaaaaccggacacaaaatcaacctcacgtgaaaggattaggacaaacatatgaaaaactccgaaggaaggcgtctcataacggcgggcgcgctcatcgtcgccgtctgggcggtcataacgctcctgatggtaacggggataatgccgcgcagctttcagtcgctgaccataaagatctgctattatgtcatactcacgctctcgctcgacctgattgtcggctacctcggcgacctgtcgctcggacacgcggctttctacgcggtcggcggatatgtcggctgcggcgcggcgatttggctgggtgacggggttcctctcgtcatacgctttatcgtcgctctgattgtcggcggcatcgcggcggcgattatcgggttcctcatcagctcggcaattataaagctcaagggcgactatctcgcgatcgtcacgctggcgttcggtgagtttgtgcgctcgttcgtcaagatcatcccgggcttcggcggcacgaagggtctcaacggcatcccgtccttcacgtcgaagacgaccggcttcacggcggcttatgtcgtcatggtcatcgtcatcgcgataatctacaacttcacccactcgcgtcaggggcgtgtcgtgaccgctatccgtgacaacgctatcgcggcggcgtctgtcggcatcaatatcagacagaacaagattctcgtcttcacgctcgcgtccttaatggcggggctcgccggagtcatcttcggcttctacaagtcgactctcgttccgtccgacttcacatacaacctctcgatcgaggtgctcgtcatggtcgttctcggcggcatgggaagcataaagggctcaatcatcgcgtcggtcatcatcgtcgcccttccggaagtcctgcgcggagcggcggattacagaatgctcatctacgccgtggcgctcatcgcgatgatgatgctcaacgcctctccgaagttcaaggctttcaaggaagccgtcacgaaccgcgttgaaaagctcggcagaacactgaagaaaggggacgccgcgaaatgagtatgctcaaagtcgaaaatctcggcataaccttcggcggtctccacgccgtcgaaaacctcagccttgagatagaaaagaacgagctctacggtctcataggtccgaacggagccggaaagaccaccgtattcaacatgctgaccggcgtctacaagccgactcagggacacttctggctcgacggggaagagctcaccggcagatcctcgatagaaatcaaccgcaaaggcatcgcccgcaccttccagaacatccgcctcttcggagaaatgacagtagaggacaacgttcgcgtaggtctcacgaaccagatgtcctacggtctcggcacggcgatcctccgtctgccgaagtacttcaccgaagaaaagaccttcacaaagcgcgccgacgaactcctctctgtcttcgacttatacaacgaccgcgacaccctcgcgtccaacctcccctacggcaaacagagaaaactcgaaattgcccgcgccctcgcgacaagccccaagctcctcctcctcgacgaaccagccgccggcatgaacccgaacgaaaccgccgaactcatggagaccatccgcttcgtccgcgacaaattcgacatgaccatcctgctgatcgaacacgacatgcgcctcgtcatgggcatctgcgaacgcgtaaccgtcctcaacttcggcaccgaactagccaaaggcgaaacctcggcggccctcaacgacccgcaggtcatcaaggcttatctgggagatgattaaatgagtgaaatgcttaaagttaccgacctcaacgtgagctacggaatgatacaggcgataaagggcgtcgacttccacgttgacgaaggcgaaatcatcgccctcatcggcgcgaacggcgccggcaaaaccaccatcctccacaccgtaaccggtctcgttcccgccaaatccggctcaatcgtatacgaaggccacgaactcaccaaagtccccgcccacaaaatagtttcaatgggcatgagccacgtccccgaaggcagaagaatcttccaagacctcacagtctacgacaacctcctcctgggcagctacacaagacacgaccgcaaaaacgtaggagacaccataaaacaagtctacgcccacttcccaagactcgaagaacgcaaaaaccagatagccggaaccctctccggcggcgaacagcaaatgctagccatcggcagagccctcatgagcctccccagaatcatcctcatggacgaaccctcaatgggtctctcccccctatacgtcagcgaaatcttcaacatcatcaaagaaatcaacaaagccggaaccacagtccttctcgtagaacaaaacgccaaaaaagccctctcaatagccaaccgagcctatgtcctcgaaacaggcaacatagtcctcgaaggcgacgcaaaagaactcatgcaaaacgacagggtcaagaaagcgtacttaggtgaataagaaagccgggggaggaacttgttcgagaacaagttcctcccccggaccccctcttcaaaaagctttatacaaactaaatttagcgctcagaccatagtcagtacgaaactgattacgggatgggcgttatttctatgtctgacgggaaggtgaaggatggagcgggggcgggcatgataacgaaagacgaaacatcaagcgcgaaccatacacagcccacaacggccacaagcgacaaaaccgcaaacaccacaaacatccgccggatactctccgggtacgggtcgtcaatgtcctccggcagatactcatgcgcataccgccagcggcgataacgcccgccatacgcccatatgtacccgaacaccatatacataaccgtcggaaacgcgaacacaaccgccgtgaacacaaaccacaccgcgcaaataaacggcacccacacataatgcgtattcccgtaaaccacagtcagaacgatattcccgactgccagcacaagcaaaacggcgaccacaacattcatccaaggctttctctcaaaatacagcctcgaatcgatatactccgaagcgttatcgtcaagccgctctccgcaagatacgcaatacctccgctcccccggctgaactgtgccgcagttcgggcagacctgtctcttcatgctcatacctccttgtctgatatggtaacattattatatcacacgttcagctgattgtcaatactttttcgaaaaaaagcggaaacacttgaaatttccggcgggatgtgctataatgttctgagatcataaaacgaaaggatgagatcatgaaaatacttacaatcggcaacagctttgccgtcaattcctgccattatctcccggagatctgcgcggaggggaagattccgctgacgctcgggcgcgcgaatatcggcgggtgcccgctcgcgagtcatctgtcgaacgcggtgcaggatatcagacggtacgggaatatctacgacggggacaagactcttcgcgagatgcttgaatccgaggattgggactatgtgacgatgcagcaggcgagccatgattcgtggcggatcgggacttatcatccgtattttgagcggctgcgcgattttgtgcatgagaatgcgccgggggcggagatcgtgatacatgagacgtgggcttaccgcgcggataatgagcggctgacgaaggagtttatgatctcgcaggggcagatgttcgggctccttaaggagaattatcttgagatcgccgggatggcggagaaccgcggcgggaaggcggcgatgatacttccggtcggagaggcgttccgcataatgcaggagctgaccggcgacgagaccggagagctgacgcggaatccggacggcccgtcgcacgcgaacgcgctcggcgagtacatcggcgctctgatctggtacgcgcttctcggcggcggtgactatcagtcgataaaattcgttcccgaaggcgtcgatactaaatatatccctctcgcaaaggaagctgtgaagtcagcactagctctgtataactgattgtataaagctttttgaagagggggtgcagggggaggaactttttctccgaaaaagttcctccccctgcttcttttattcaggcatttttgcaacgaatttgtcgacaactgtctgaagattcggaagtttggatgcaagattgtttttctcggttttgaacatggatgcaatggcgccgtcgcggatgtcggcgcagagggtggtgtcgcctatgtcgacgactcttgcgtcgaagatgatgtcgagcatttcgcgggattcgtcgtcgcggat

SEQ ID NO: 169 - DNA, 4771 bp, Unknown
  16S sequences of unknown bacteria
gggggactacggcgactggctcaactggacggtaccggacacggactgtaatctgcccatctttgcctctggctggggggacggctactatccggtctacttcggctatgacgcgaaaggtgaaatctgcgccgtgtatgtacgcttcatcgacattgaagctaactataagaagcaggcgtaaggagggaagcagcgatggaatggccaaaacgggcgcggacagtgaactgggagagcggtgtcctgaccttggacggagaaaagcagtttgaagtcccggagctgaccgcagagatcatggagcagctggccggttacaccttggtgggcttccatgtgaaaggctatccggtgaccgatgaactgctggccccctttgccgggcataaaagcatggtcaacttcggcgtggaggacggtgcgctcactgacgcctgtttccccgttttttccgccgcgcccaagctgcgcatcctgctgctgaccgggaacgccgggattaacggtaacggcctgtccgccctgcgggagtgtaaaatagacctgctgaccctgggccgcaccgggctggatgatgccggtctgctccaggcggcttccatccccaagctctcccatatctggattgaccacactgctgttacttatgatggactgctggccatcgctggcaacagccgcatccagccggtggcccatgtgcagttcacccaggagcagatggaacacttctcccagctccagcgggaaaaggccaaaaagcccgtccagctggatgagcaggcggcggaggagtgccgcagggtgctgtccgccttctttgccgagatgacagaatgggagcggtacatggagcgggccgggtttgaggatgccgaggctgtgccccgcctgctggcgatctgggagaggtatgtgagcgaaaagccccgtccgggctaccggcctctgggcctctcatacagtgcacagggcacttacaacggggaagtattccttgacgcggagcagatcaccaagaacaagctctacatctacaccagagagaaaagcacgggctttgaccgtcgtttcctcatgaagcgtgtgggcgagggctggatgatcgacggggttcaggagcggctggacggctggcagcgcacgggattgtgaggcatcacatggcatgggaatatgaaacttttggcccagacggtcaatgtaaattgtttggtgtgaacatctttgactacgactggcaaaccaccggcaagcgagtaaaagtcaaagacccgatctatcaccaagaccataccttcgaggtctggcaggtggagattgacgggcagatccaccgctttgccgctggagagttctccaactgcgtatggggattctatctggaaaagaacggatgagaggagcgtgataccatgaaagccaacgccggagaggtctatacagtctacaaccaatatctgaaacgctacaccgcctgccaggtggcctatattgcgccgccggactcggtgagcaaagaaccctgggcggtgatcctctctctggactgggtgggggacgcccctctgactgcggaggaactgtcccatctccgcccgctctacaaggacttcatgtactggccccgggagctccacctgctgcgggtgccggtggaggttccgccccagtacacgctggtggggaccctgcccccctttaccgatgagccctgccgctcctatggcggctggaatgacggctatgatgtgtacctccagatctggtggcaggccatcccggaggagcggcggcgggccttcaaggaggccatggagagcgacgaggtgacggagatcggcggtatcccagtgaaggtcagcagccatcggatcatggaccagtacgaaccattcgattcggcgctggaactaaaggctctgccctgcctctccgaactcatctgcgagcggtggcacccggatctgctggagtttttgcgggaaaacccctttgtcgatgaagtgactttgctgaaccacggtcagaggacacttgatctgcggggcaccagcatcagaaagctgatgctggacatgaccgggctggaggagctgtggctgtgtgagggaacggagcagctcctgttccagaacaaggggctggacgcttgcaccattcatgcccccgaagatggcggcggtctgactctccaatttatcggggaataccgccctcacacggaactgccgaacctatggggactgcacggcatccggctgaaggactttgatctgaccggactggccactgtccatccccgcctgaaggaactgcggctctggggcgcaccgggaactgtgcgaaacttctccaccgtgcgggagttccgggagctgaagaacctctccacctacgacctgttcggctttggggcggatgacatccccaccccagaccagatgccaaacctcaactggttctggatgaccagtctgccggaggatgcggcaaaagtggcaaaacagctctggaaaagcaagccgggaatggatttgtggatcaccaaaccacgaaaaccggagtggctggcgcagaatctggacaatcctttccgaggttgggacggtgctgaacacattcctgccgctgctgcgaaaaaggcagccaatcaataccgcaagacccgttcccagctgatgaagctggccgctgaaccgggtgaagacgcccaggcccaggcgatggatgcggtgacagcctacacccagaccttcaacaagatgggctttatcgaaaccgaggagcgggatgaaatctatatggccctgcggggtatcctggatgccctgccaggagacacgctccagaaagattccctgattgagaagtttgatgaacttcgtgatttttgaggcggggtgaggatggaccaggcagtaatttacaatggccaaattcttaccctgacgcggttttgggcgacgggagagccttgcctgtggatcaccgacccggagcagatcgggatgcctaaaatggaatttgtgggaggccacccggatgaatactgcattttcctgaaaaatctgactgaaacagagctggcacagatcacatccccagatggcgctccgctggatgtggaagaagaactgcggcagcatctaatgggaaaggacaaaccctatggcactacaagataagaaaataatgcctcccccttggctggcccaccgggagatcgagcgatactccattggctggcgcatgggctatggagaggattacatagaccggtttggcacatggctggacaccctctccccggaggagcggacggaataccgtactctctttcccgagccggtgacctggaagggctggtgggatgacgaggacagggttgaggtgctgacgcacggtgacttcctggtggaggcgtggcagccggaaggccagcccaagtacacccgccagtggctccagcaggagtttgccgccgggcggaagcgggagctgtgcctgttctggggccatcagctatccgaggacggccagctgacaaaaagctgcctcagccagtggtggatggaggacttctatacgacggctgactcctacctctgcatggagcagtatatgatggctgccaaggccgagctgttcggcgacaaagagatccgggaccagattttgaaatgcagcgaccaaaagcagatcaaggccctgggccgcaaggtgcggggctttgaccagaaggtatgggacaagttcaaatacgccattgtgctgcttggcaactggcacaaattcagccagaaccgcgaactgcgggagtttctcctttccaccggggacagcgtgctggtggaggccagcccctatgatgccatctggggaattcggctttccgccaactcccccgaggctcaggaccccatgaagtggcggggacaaaacctgctgggctttgcgctaatggaggtgcgggacgagctgcgccgggtgacacagaatgaaatgttttgcgattggagtatggtatggcaacaatgaaactctatgaactggtcaaccactaccacatcggcacggaactgacctgcgccgaggccatgttcatggcctgcaatgaatattaccatctgaatttgtccgaggagacccggaaaatgttctccgtcatgggacttgggatgcagaccgaacagtcctgctgcggcgccttcaccgtggcggtgggaattatcggactgatgaccgccaaagagggccaaacggatgtgagcaacatggaaggctatcagatgattgctgaattgacggagtttatgctgggcttctatggaacgctccactgtgtcgagctgcaaaggctggagatcgtgggctacgaaaacccctgccacgccattgtggaggctctggccaaaaagctggaggaactgttggcgaaccgcaggatcttttgcccggcaaacggaggacaactgagctgctgatgtgccggaaagcgagggaagacatgaaagacttttcccaatacggaaacagaccggacaaccagtgggagatgctgccctggatacccgatccgcgtccgcctttcaaaatctgggtgaagccggagcaaatcgcgccgttctttctcattcctcaccacccctatgcgatctcccttcttctgaaaatcagcgacggattccggacggaggaattccgcaggctgggactgagcggcagcagcgaagactgggaacggcttgttcggggcgtgatccgg

SEQ ID NO: 170 - DNA, 32759 bp, Unknown
  16S sequences of unknown bacteria
gattcgaacccacggccttcagagccacaatctgacgcgctaaccaactgcgctacatccaccatataaaaacacctgacgcaaaaatcctttgacatcgggtggaatcaccaaagtcccgcagttgacaggtacttcggctgacgtgccttgggggattcgaacccacgacctactgcttagaaggcagttgctctatccaactgagctaaaggcacataaaaaatctccgattaacggagaaagcgggtgatgggaatcgaacccacacggccagcttggaaggctggaattctgccattgaactacacccgcgtgttgcttgctgaatgctttattataataccacatcatcctccctttgtcaagagcttttttaaagtttttttagattttttatctgataataccgacgtctgtcacgcgcgcattttaatataaaaattcttgacacatctgcctgcgtggtgtataataatgtatattaatttttgcgaaggagggagacgccgtgacacagtttaaacatgcgcgccaacttccgacttcacaaataatactcgttcatccagcaagcgccgctcactatctactcgagggaagggcgcttgtttgtcttgtgagacacggtcagaccgactggaacctcatcaagcggcttcagggcagggaaaacgttcctctcaacgaaaacggtcacgaccaggcgcggcttgtctccactgttataaagaacacaaagaaaatgggagtcacttacgccgccgtgtgtacctctcccctgtcaagggcggtcgctacggctgagtatatcgccacctccatcggactgggtgagcctacggttgttgatagactgatagagcgcgattacggcgaactctccggactgacgcttgacgagagaaaaaagctttttcccggcggagaaagacaggcaagcgacgttgagactgtccctcaggcggcggcgagaatgctttatgccatagacgatatgcttgaggtgtccggcagaaagaccgtcatcggcgtaactcacgggggacttatcaacgcggtgttctcacggctgacttccggcgagataggaacgggaaagacgctcaccatgaattgcagtgtaagctgtatcgcggcgggaatcggcgaaccaatacctcttgcgtacaacctgcaaaacgactatgcggcgggatatatcaaaaaactcctgtggtgcggtgcggaaatttaatgtgagaaaaactatgattggacttgaaaataaaaccttgcattcggagagactgacctaccgcttgctgaacgacggcgacaaggctgcgctcagagaaattctcgcggatgaggacgtgacaaagccggcgggatatctgcctgcaaagaccgacgcggagtttgacgaattctttgcggcgctcattcagtacaacacgggagttgctattctcttgcgggaggagcttatcgggtattttcacgtgaaccactacaaggtaggcggaaaattcgcggactgcgactgcgttgcggtgggatttgtcctcggtaaggcatattggcgtcacggctacggtacggagatgcttaaaacgctgacggactacctgctcgagacgtttgacgtgtgcttcgccgactgcttcctcgacaacgacgcttcacgaaagaccatcgagaaatgcggctacaaattcgacgaggactacacgatgacgtttgacgggctcggagaagagaaaacctgccacagctactactatactcacaaaaacatataaaactacgaatttacggaggatattatcatgcttttcggaaaaaagaaaactataggcctgctcataagcggtatgcactgtgaaaaatgcgttgagaaagtcgttaaggctataaaggctgtcggcggctctgcaattgtagacctcgcaacgggaaaagcgaaagtcacctgctccgaagcaattgatgttaatctcatcatcgaggcaataaagaagctcggctttgactgcaaggctgaataagcgaaaataattgacggcgctctcatttcggtatgcacccgaatttcggcatatcgcgtgagagtgttttttgtttgcccgcttttattgacatggtgggaattatataatataatactctcaaccaataaaattttatgcaaaaggaggaggaagcctctgatgtaaggttatttttgcgacaaaagcccttatattttagccttttatcgcaaaaatccgattaattcagagtatcctagaaaaatgaaacagcatctctattatttcgacatttacccgaaggtgttcccgataggcgcggcgcaggacatcacggttcgacctttgtccgacaaaagagcgttccctgaaggagagtacagaatttccgtcatggcgctgaacgcaggctctccgtcgtatgacatagcgagaggaaaccgcgctgactttgacctgactcccgacgaggacggttatctccgcttcactttcgcagctcccgaggaaggagaatacagggttagaatttacaaaaagaacggggagagctatgacaggctggtgaacgacctgagcttctatgcgctggagaacgaccttgccgcgagagttccgctgagaggggattttcatatgcacacctgccgctccgacggaagagaagaccccggcacggtatgcgcaaactacagacgtcttggatacgacttcatcgtgataacggaccaccaccgcttctatccgtccctcgaggcacaggagatatacggtaaagtcccttctacgctcaccataattcagggagaagaggtgcatatgccgctcactcagatgcatatcgtacacgccggcggaagcttttcgataaacggacttctcgagacttctccgaacaacgaaaaaggcacggacgcaaaataccgctcgactgacggaaacgcacccgacttcatcacggaggaagaataccgccgccagataatggagatagccgaaagcgaagagtgcgccgactgcccgtacaatgtcgacaaaatctggtacgccgttgcagtgtgggtaaaccgcagaataaaagaatccggcggactttgcattttcgctcacccgtactggatagccgatatgtaccacattcccgagccgctcaccagatatatgatgaaaaagcacccgtttgacgcgtttgaagtcctcggcggtgagaattactacgagcagaacggattccagaccgcgctgtactacgaggaatacaaaaacggcagagttcacgcgatagtaggctcgacagacagccacggctcaacggaacacaaccgcaaccgcgacatctgctccactatagttttcgcgaaggataattcaacggacggcattatatctgcggtgaaagagaagtattccgtagcggtagactccatttcaaaggaatacagacttgtaggcgagatgagactgcaaaaatacgcgtgcttcctcatggacaactatttcccgctccacgacagaatcgccgaaatggacggagagcttatgcttgaatactacagaggtgactgcgacggagacgagcttgaattgacaaaggaaaaagccgaggaaatgctcagaaaatactttgttttcgccgagaataactaaaaaatattttcgccgccacttgaaatcctctgcgtgattctgctataatagtgggagtattttatttcagttgaggattttatggcaacactccttcttgtagtcatctatatcgcatacatcgggcttggaataccggactctcttttcggtacggcttggcctgtcatgtatcaggatttcgggctttccgttgacgtcgcgggatatctgacgcccctgttctcggtattcagcgttgcgtccagtctcgcgagcacccgtgtgataaaccgcttcggtacgggaaaggtcgcggctgtcagtacggctcttaccgttatcggactgttcggcaactcggtttcaaataatattatttggattatcttctttgcaattccgctcggattcggtgcgggatgcattgacgccgcaatgaactcatacgtcgcgcttcactacaaggctacgcacatgagctttctgcattgttcatacggagtgggaattgcgctaagcccgctcttcatgtcgaaggctctcgaaaagtacggcagctggcaagtaggctacagaaacgcaggaatagttcagctcgtcatcgcggtgataatgatagcctctcttcctctgtggagccgcgtgaagttcaataatcagtacagctcggaggaagaggtaacgcctcgcactgtgggaatgagggagcttgcgaaggacccggccatacgagtggtgtggctgtgcatcataacctcgtgtacgctcgaatatctctgcaatacatggggcagctcattccttgtcgaatgcaggaatatcactgctgaccgtgcggcgtttatcatcacgttctactatgtcggtcttgctctcggaagattcctctccggcattcttgcaataaagctcaactcatggaagataataatgatagggcttgtaactctcgttccggctgtcgcgctgattctgcttccgcttccctcaatatgcgcctgcgtgggactgttcctcatcgggcttggaaacggacccatgtacccgaacttcatgcaccttactccgtcatgcttcggcgcggatatagctcagtccgtcataagcactcagatggcggtggcttacatcaactataccgtcatgccgttcatattcggaggaatcgtaaagctgttcggaatggcgtcttttccggtatatttcacgctcatctacgcgctccttgtgctttccgtgctgaaattcgcggcgaacaagagaaaaacctcggaagcgatactggaaggggaaaaataaatggatataagacctgcaagacgtgaggatgtccccgcgctccttgatatttacaactacgaggtaataaacggcgcagcgacactggatataaacacgcgcacgcttgaggaatgggaaaagtggtataatgcacacaaccgcgacaatcatccgctcatcgtgggagtagagaacggcgagataaccggatacgcaagcctgtcggaataccgccaaaaggaagcgtacaagacaacggtagagctgtcgatatatgtctccccgaaccaccgcaaaaagggagtgggacgcgcgctcatggctcatattctcgaaatggcgaagaatgacgaggggacgcactgtgtggtatcggtaataaccgccggaaacgaagcaagcacaaagctccacgcagagttcggcttcacctactgcggtacgatacccgaggtcggaatgaagttcggcaggatgcttgatattgagaattatgctttgatagtatgaatttgtcagaacaatgttgacattgggagaataaactgctatacttagaaatgtcgggaataattgtttcaaatctgcttttaatgccgttttatcggtaacgggaggctcttatggaatatacatattcggatttctgcggatacaggcagcttaacttcaagtttgagaaccgcgacgctgttgttgttcttccctcatcagaaccgagtggaaaatggatgatgaagatggagtatttcggcgcgttcccggagcttgaatgtgagcttatctcgcgcggatggcacctctgctacataaagaacagggacagatggggtacggacgacgactcagacctcaaagtgagattcgccgactttctctcgaaggaattcgggcttgaaaaacgcttctgctgcatcggaatgagctgcggcggtatctgctcggtcaattttgccgcaagacacccggactacgtttcgtttttataccttgacgcgcctgtgatgaacctctacagctgtcctatgggattcggcgaaggtgaggctctcggagacggcggctggcaggagcttgttgacgcgtacggattcgatgttcccacattcatggtgtacagacagcacccgatagataaagtcgacattctcgccgacaacggacttcccgccgctcttgtttacggtgacagcgatacctgcgtgccgtacaaggaaaacggagtagtgcttgaaaaatgctaccgtgagcgcggaattcctctcatagttgagggaaagaaaggctgcggtcatcatccccacggtccgagcgatgttccggcgatggctgactttatcgaaaagaacgctctataagttaaatcttaatataaaaacctacataatcggaggaaaaatcatgttaaaagttgcaatgctttccaagtggcacgttcatgccggcggatatgcttctcagctcaagaacagcggaaaggttgaaatcgttgccgtatgggacgacgacaaggaacgcggtgaaaactgggcgaaggaactcggatgcgaattcatcccctgccttgacacactcctcgcaagagaagatatcgaagctgttatctgcgacacacccacaaccgctcaccacgacattctcgtaaaggcagctaaagccggcaagcacatcttcactgaaaaggctctctgccccacagtagctgaatgccttgacgttaagaaggctgtagaagaagcaggcgttacattctgcatcagctatcctcagagaggcagaccgagcgtacagttcgcgaagaagatgctcgacgaaggcgctttcggcaaggtaacattcgtaagagttagagacgctcacaacggcgtatccggaaactggctccccgactactggttcgataaggacgctgctgcgggcggagctatgatggacctcggatgccacccgatgtacctccttgcatacttcctcggaaagccgaagagagttaccggtatgttcaccgctcctttcggaaagcccgttgacgaaaacgctgttgctgtcgctgaatttgaaggcggcgctctcggcgtaggcgaaacaggattcatctccgtcggttctccccagacactcgagatttacggtacggaaggctctcttatcgctcacgatgaagatgttaagttcacaagcaagaagttaagcggtatcttcaacggattcgttaagcccgaccttccgagaccgaaggaatccccccttatgcagttcgttgacgcttgcatcaataagacaggctcaccgaaggatctcggtattgacgacgccatcgcgctcacagagcttcttgaaaactcctacaagagcgacgaaacaggcactatcgttaaggtagactgattgtcggcgtgactgctgtgactcggaaacccgtataatattataacgaaagcaactgaggactcgcggcagaaattttccgtgggttctctttggttatataaggatatcctaaattatcggaggagcttaatgattttagaaaagctgctgatgcccgacgaggtgtattcttcgtttgaagagcttactcccgaacacatgaaggagctgggaaagaagtacattttttcggatatcgacaatactctcgccacctacgacgatatgtacccgccggagaacgtcaaaaaatggtgcgcccgcatggcggaaaacggaatcaaagtggcgtttgtctcgaacaataatctcgaaagagtggaaaaattcaactcgcatttcggatacgccgcttactcaaaggcaggaaaaccgaaaacgggaaagctgaagctcgctatggcagaatacggcgcgtcggtcgatgaatccgtgctcctcggagatcagcttctcaccgatgcagcctgtgcaaaacgcgcgggtatgtactgcatcatagttccgccgataaaagacaaaaaaacgctgttcttccgcttcaaaagactcatcgagaagccgtatatgaagaaattcatgggacagcgcgacaaaaacgctaaaaaatgaaaggaatatataattatgtcagtagtaacaaatcgtattgccaatatgcaggctgagatgaaaaagctcggcgtcgacgcggtatatgtaaactccgcggaaaaccacctctatttctcaggcttcgacaatcccgacggatatgttgtaataactttcgacaagacatacctcttcgccgactcccgctatatcgaagccgcaaaggcagaagcggacaagtccattgtagtttgcctccccggtcagccgacagtcaaggagcttgttcacgacctcggaataaagtccataggctacgaggatgagagaatgacctgcgcgggacttgaaggactgaagcgttcagttggcgacgacaaggttgaatacaagccgatgggcggacttttcgttgaaatccgttcctacaagacagaggatgaagttgaaaacatcgtagccgctcagagaattgctgaaggcgcgttccagcacatcttaaagactataacccgcgacatgacagagatagaggttgcggcagagcttgaatactacatgaagagaaacggaagccagaagccctcgttcgataccatctgcgtgtccggcacagcttcgtcaagaccccacggcgttccgagaaacgtaagacttgaaagcggcttcctcacaatggactacggcgctatggttaacggataccactccgacatgaccagaaccatcgttataggcaaggctgacgaggacatgaagaagctctacaacaccgttctgaaagctcagcttgccgcaatcgacgcgataaccgagggcgcaaagaacgccgacatggacaaggtagcgcgcgacgtcatcgacaatgccggatacaagggatatttcagccactctctcggccacggcgtaggacttgagatacacgaacagcccggtctccacgcaagaatgggcgacgctactcttaaggcaggacaaatcgttaccgcggaacccggtatctacatcgaaggcaagtacggctgccgtatcgaggatatgattctcgtaacaaagggcggcaagcgcgacctcacagactgcccgaaggaactcatcgaagtttgctgaatataaaataagataaaataagctgtgcgtcggttttggattgacttcgccgatacacagcttatttttttatacaacagccgctccgaagggggagagtgccagacgcgccattttaaagcactgctttccgaacgggattcctataataataaggcacaagagcagtccgtttgtgagggcggatattgcaagagggattccgctcactattatccagattatgttggcaataagcgaaaccgcaccgcctccgtagactatttcctttccgaacgggaagaacgcgagcgacgcgaatttgaagcactgcattcctatcggtattccgacgatggttacgcaccacagtattcccgcgagagtccacgaaagtccctgccagaatccgccgcagataaaccatataatattgccgagaagtcccattttgtcctcctgttacttctttgtgtcaagtgattttttctttttcgagtagataaccatgccgacgaccgcaacaactgccgatatgcctatgattatcccggcaaagacatagtttccgcttgaaagcgcgtctccgctgagtgtagaggacagtatcgacggcacgcgggctatcatcgttatcgtaatgaacgaaacaaaatctatcttcgtgagcgcgacgcagtacgtgagaagatccttcggtgtgccggggatgaagaacagtatgaacatcatcctgaacatattccccgtgtcgcggaagaattttatcgactcaacctttgactgcggtatgaagaggtcaagcgcgcgcctgccgaactttctgattatcccgaatacgatagcctgtccgagagcgattccgagcattgcaagcagagttccgccgaaccacccgaacgcatatcccgcagctatttcaaacggctctcccggtattatcgcggcaaaaacctgcagtgcggtcatgagcacgtacacgacatatccccagattccgtgcgactgtacccattccttgaactgtcccggattgtcgagcagtttaacaaacggctttccgatgtatatgaataataaaaccagaaccgcaatataagcgacagtgataatgcaggcaatcgcccgtttttgatttagagttaagtgattcttttccttaatttcgcgtcggctcacaccgctcgtctcctttctcacgggattaagcgtccttttttggtattccgtgtccatattatgccccgacccttctcgtataataacgcggcggcgtcagcgtccttatatcctcaagctcgccggaatacacgggagaaactccggaaacgtaaagcaaatcggaaggatgcatgagtgaggagtgcttcggcagcttcatacgacagctttcggcaagcacctttgacacaaactgcgagcagaagaagtgattcctgaattcgtactttatgccgagcttacataggagcagtcccgctatcgaataacgcagcttgtcccgcttcatcagcatggagtttatgtagtcctttgcctcccagtatgtccgctcgtctacggtgaaggtgagaagctcgcacgggatgtgacccttgttcttgtagaatccgcggtggatgttttcttccttcagtcctgcggggagcggcattttcggattcagtcttgcgaacgagtacattctgtcaagagaatcgtcgaaggcaatggatgcgtgagtgaacagctcttttgtgaagaaacctatgagccgtgagataaaagtatcggagcgtgtcagaataatgtatatgtttttcgtcatttgtgtaatatccttgctttgttttatgtcgatattatactctgacggaatataaaatacaataaaacaggcattaagtctacgcctaatacattaaaaaagaattaaaattgttttaaaggcaataccgcactgttccgagcagatttgctctgccaaaacggtgaggtattgccttcatgccgctattcctgcttgtcgtcctttttggaacggtttcccgcgtctattgcagcttcgccgaaaatgtacgccacaaccgatatcgcggacgtaactatgcctgcaatctgcgcccactcgttttcgtcaagaccgaacgctgcggctattccgactataattccgcatatcgccgtccacagcttgcgagacgagagctttctgaggatgtctttcatttctcacacctcctttcctttgtttatgagagtaaacatacggtacagcatgactgcgcactcctcccgcgtgatattgtctccgagacggaagcttcctctgccgtcgccctgcatgatttcgctgtcctctgcccacctcaccgcgtcctttgcccagtcgtgaggttcttccgttttttcgggcttgcgaaagatatatcccgccgtgttcggtattccgagaattttggtcgggtcgagcgttttgtctactgtccgcacctcaagatggagatggcttcccgtcgagcgtcctgtcgagccttcgattccgagcacgtctcccgcacgaactcggtctcccgccgaaacaagcctctcgctcatgtggcagtagtagtaaattcgctcgcctgactgaaccgagacgtagttgccccattctgaggtcctgtttgtcttgtcggtgacgattcgcgagcggagaactataccgtcctcgacgcactttatcgcccttgagccgagagaaacaagatcaattccgccgtggaacgcactctctccgtttatcgggtcaatccttgcgccgtattcgcttgcaacgcggaagtccccgtcatatggcattttcattttgttgtcctcactttgttatctccggcagctccagagttttttcgtataagcttgtcgcgacgtcattcccgccgagtttgtggtacgcgtcgtatattcttctgagcgcttcctttgcatatacgggacaagcgccgacggtgtaatatctctcgtgatatgagattatctcggctctcagaaggcactgaactccgtcctcgatggctttgaccttcctcagcctgaggttcatgtacgttgtgagagcggagattatgctgcctaagacaaacggcaccgcccagcttatgattttgtcgagcatttttgttttcctcctttcgccttgttttactgtagaaattatatcatccgcgaaaaaatttttcatcccatgacagtatatgcacagtcgcaaaaaagtcccacaccgccatattctgtattacatagccgaaatgtgggatttttttgattttgtattgctaaaacatatgaaaatgtggtataatcaaaagtaagcgaatgctgtcgaattgtgcagttcacagaatattaatattgaggtgatgagacgtgtcaaaatgctataactgcgggtgcgatatagaccccgaggacaaaaccagactttgcgataaatgtaagaagataatactgccttttgtgaaattcatggacgcgtcgacatcatcggctgtcagaagactgatacagaacgagcgtaacctcagaaacgcgggtgtaacggacggcggcatggaatatctccttaagatatgcgagattcacgacaagaaaaagctccgcgaaaaggaagagcgtgaagcgaaaaaagctgccgaagccgagtctgtgacccacgaggaagaaggctacagcgaggtagagcttccgatggatgagccgcttgatttgatacacaagccatacggttcgttcctgcccgccgccgaagccgtgttcatcttagcgggagccgcgcttcttgctttcacggtgtacagctgcattgcggagaagaatttcagcattccgagcctgtgcggtgccataacgtcgtttgccggtgcgtatctgtctgactgcgcgagaaagatgatacacgaccttgacgaaataaaaaagagattcagataaaaataaagctccgacgccatgattatttcacggtgacggagttttctctacttatttgccgaggaaggagaacagaccttttttctcatacggctcagagcttgacgaaacaagagtgtagccggtgttctttatcacgtccgctatttttgcgctgtcaagctcgacctcgctgattatcacgcattcgccctttgagtgtgaggagcttaccttttttatcgggaatgctgctcgtatcgcgtcgtttatatgagcctcgcacattccgcacatcattccgtcaattttgagagttgtttttttcatattaaaagcctcatggaagaatattcaagttaggcattgctaaccatctgtattttatcaccggacgcgtgaaatgtcaagaatccaagtgaaaatcaggtgaatattattcgcggaaaagctgaaatttttcaataatgattgaaatgaagcgaggaatgtgctataataacaaaatgaatcagtcggtttttggacgcatgagattatcacgccaatgacccgaatttttttcgtacatttaagaagaatcgaaaggagttacctgaaaatgggtaatcaaaacaagactttgacagcagaacagaagtcagaaaagaaaaagtcgataataacgacgatatgcgttatccttgcggcagttatcgttatcggacttgttgcttacgcacgtcttgctgacagcggcgtaattcttcgctccaaaacagcagccaagagcgaaaactatgaaatctccggcactatgatggcatattacttcaaccagaactaccagacatattacagctacctcagctatctcggcgtcgacacatcaaagaagctcaaggatcaggcttgctcgttcactaacgaagctaacggcacatggttcgactacttctccgcaatgacacaggactacgctacacagcttctcgcgctctgcgaaggtgcaaaggctgccggtgtttctcttgacgacagcgactattctacaatcgactcaacaatcgagcagatgaagacagcggccgaaagctacggctacactttaggtcagtacctcaccgctatgacgggtgcaggcgttaacgaaaaggacgcaagaaagtgcatggagcttgcagctctcgcttcaaagtactccacacagtatcagaatggtctgacctacaccgacgaccagcttgaaagctactattcagctaacacagacgcgtttgaaggcgttgactactacgtttacactgtcaattccaccgacttcatggaaaaggacactgacggcaatcctgtaggcgacaccacaacagctacggcagccgcatatgaagccgctcagaatattctcgccgcaaagagcgaagacgaatacctctccctcatccgcgactacatgaagaacacactcggcatggaagacagcgacatcgacaccgcagttgaaggcgcatacacaagacacgctctcgcttccgcaatctcctccgtagcagactgggcgttctccgcaaagcccggcgacgtttacacagcagctgaagagggcgattcctcctacgctatctactgccttacaaagtcctcctacagagacgaaactcctacaagaaacgtaagacatatcctcttctccaaggacgactacaccgacgactccaaggctcaggacgtttacgcagagcttcaggcgcagaacttctccgaggacgcattcaagactctcgccgcagaatacagctctgacacaggctcaaaggacaacggcggtctctacgaaaacgttactctcggctcgacagcaaacgagttcaacgcatggctcttcgacgacgcaagagttccgggagacagcggcattgttgagtcctcctcatacggctggcacatcatgtattacgtaggcgagggcagctcctgctcatggaaggaaaccgcaaagactgccatgaaggaagctgactacaacgcaatggttgaagaaaactccgcaggcgttacaaccacaatgagcgttatcgccgacatcgacagataaactgaaataagcataacaaaaggaactgcaatccgagataaatcggtacagttccttttttgtgcttgttaaattacttttcttcgactgtcgggggaacccagccgtacttgtaggagttggactttgtggagcaaacgtacttcgccgcgtttatgagaaccttctgaacatccttgttgtagtaggtcggaacggattcgtgacccggacggaagtagaatatcttgccgcgtcctctcttgtaaacgcatccgctgcggaatacttcgccgcctgtgaaccagctgatgaagagaagctcgtccggtgcgggtactctgaagtgttcgccgtaggtttcttcgtgctcgagaactatcttttcgtcgatgccttcagtgatgggatgaccctgctctataacccaaaggatttccttgtcgccggattcacgccacttgaggtcgcaggacggtgttccgcaaagtctctggaatacctttgacgcgtgaccggagtggagaacaacaagtcccattccttcgtatacgtggcggcatactctctcaacaacagcgtcgggaacatcgccgtgtctcatgtgaccccaccagaagagaacgtctgtgtcgttcagaacctcttcggtaagtccgcattcgggatcgtcaagggtagcggttcttacttcgtagcctgcttcctcgaggaaatgcttgatgcacatatggataccgtcgggatatatggctttgacggcttcgtcgattttttcgtgagcaaattcattccaaaccgtgattttcattttgtacctccaaaggtttaaattaatttaggttaagcatattttatcacacaagtttgtgaaaatcaataataatttcacgaaaactgcgcgttatgcaaagaatagtagaatcccttctgtgccatgagagaatcgtgactgccgtgctctatcactcttccgtcgtgcagaacgaaaatcacatcggcattgcgcacggtagagaggcggtgagctatgactatcgacgtctttttgctcataagctcgttcatcgcacgctggattctcatctccgtcatgctgtctacgtttgaggtagcctcgtcaaggatgagcacgggagaggacgatatcatggcgcgggcaatggtgatgagctgcttctgtcccttcgagatattcacgccctcgtctgtgagcaaagtgtcgtatccctcgggcaagcctttgatgaacgagtggatgcccgcggcttttgcggctttctctatttcctcgcgcgatacctctctgtctgagccgtaagctatgttttcggctatcgttccgctgaacagccatgtgtcttgcagtaccatagtgtatgcacggcgcacgctctttctcgcggagtgtagtatgtcgtggtcttcaagcgttatcctgccggaatcggggtcgtagaagcgcataagcaggttgattatcgtggtttttcccgctcctgtaggtcctacgattgcagctgtcgttccgggagtgatgttcatcatgaggtcgtggattatctgatgctcggggttgtagccgaagttaacgtgctccgcgtcaacctttccggtgacgaatatgccgggctttgtcttgtcccctgtgaatacggcagcgtcattgtcgtcggggctctcttcctcttcgtcaaggagacggaaaactctctctgccgccgctgccgctgattgaagctcgttcaggatgtttgcagtctcgttgataggtccgctgaacttgcgtgagtagagcacatacgacgatacgttgcctatcgagatttttcccgagaggtacagcagtgagccgaaaaccgagacgagggtgagcgagatgttgttgataaagttgacggtaggacctacgagagtgccgtggtagtccgcgttgtagtaggcgtcggcggcgttcttgttctttcccgcgaatcgctttatcatggttttctcttcactgtacgcgcgtaccgtcttctgaccgctcaggcattcctccgcatatccgttaagctcgccgagtttgccgcttctcgcacggaacagaggacggaacttgtgcgccatcttgcccgtagtgagaattgagaggggaactgtcaccgcgaacacaaggcagaggcggggggaaatagtcagcatcattataagagagccggcgacagtgacaacgcttgacgctatctgcacaaggtcggtggagagggttgagttaatagtgtcgatgtcgtatgatatgcgcgatattatgtctcccgtctggttcttgtcgaaatactcaaccttcatccgcatgagctttgcgaaaatgtcctctctcatgttgcgcacgattccgcgggaaaggtttatcataaccacctgcaagagatacgcgagtatgcttgacgcggcgtagaatattaccatgagtatgcatttctgcgccacaaccgtaaagtccgcttctcccgcgtgtattccgatagcgtcaattgcttcacccgagagcttcggtccgataagcgagagcaggtttgagacgatagatattaaaatcgccgcgagatatccccacttgaagcggtacatatacttgccgagcctcagcagtaccttgagacgctttttcggcatatttccgacgactacatcttccggacgtgtaacttttacacctctattcaagcagagcacctcccatctgcgattcgctgatttctttgtacagctcgcacgacttcataagctcatcgtgacatccgcttcccgtgatacgaccgtcctcaattacgagaatgaggtcgctgtgctttatcgaggaaatacgctgagcaacaatgacggatgtagtctcgccgctgtagttttctcgtattgcttttctcagcttcgcgtcggtggcatagtcgagagcactggaggagtcgtcgagcacaagtatttcaggcttacccgagagagcgcggctgagaattaccctctgcttctgtcctcccgagaggttcgcgccctttatcgtaagctcaaagtcaagtccgccgggcttttcgttgatgaactgcattgcctgagcgttttccgcaccgtgcagtatctgctcatccgtgagatcccgtccgaacgctatgttagtgcgcagtgtgtccgcgaagagaaaatcgttctggaaagccgcaccgaattttttcgatatctcgtcacggttcatggagcgaacgtcacgaccgtcgagaagcactcttccgctgtcaacatcgtactgacgcatcatgagcgcaatcagtgtggttttgcctgctcccgtcggtccgattatgccgagagtttcgttttcgtacagcttgaacgatacgtcgtcgaggtcgttctttatgccgttgtaggagaaggagacatgctcgaactctatcttaggcacacgctcgcccgctggatattccttcggcttgtacgacgggtcggcttccatgtcgtacggcgtgtcgaggacttctccgatacgattagcggaggcgataccgcgcgaggagtttataaaaattcttgtgacgctcatgagcgcgttcagtattatcgtgaaatatgatgtgaaggcgataatcttgccggtttcggatattcccgcgttgacacggtatgctccgacagcgatgaccgccacaagtccgaggtttaaaaaaaggttcatcatcgggcttgttagtcccatggtgagcgcggctttcttttcggctctgttcagtccgatgttcgcctcgtcaaagcgtgccttttcggtgctttccttgccgagagctttgataattctcacaccctgagcgttttcacggactacgcgcgtcatgttgtcggtttcagtctgctgttcggtgtagagcggtacgcctttttttgtgatgaagtaaaccgctgtggtgatgaacggcatgactgcgataagcacgagagtcagcacaggctcaagcgagaacgctatcacaatacctccgatgagcaggcatggagcgcgtactccgaggcgttgtatcatgccgaccatctggtgaatgttgtatgtgtcggaggtcagtcttgactcgagagacggcacggtgaacttgtcaatctgccttgcggaaaggtaagaaatcctctcgaataggtcgttcctgattttttcagtggtgttacgggctacaagagctgccatgcggttagctgttacgttgcccgttatcgcaagtacagcgcacacgaacataacaagtcagcacagcacgatatgcgtctttgagccggtcggaactatgtcgtcgattatgtaggacagaagcatcggaatgaataaatccattatcgtgcctacaaatttaacgagaaagccgaacatcatgcgcccgaaaaacggcttaacgtatttgtagatatacttcaaattttgtctcaccttcctgttgcagagtaattattaaaaaatacacatgataattaaattatagcataaaacgccgtcaagttcaattgtccgacaaaattttactatagaaaattcggagtattcccaaaaccggcaaacgaaatacttgacctgcgcagaaaaacagtttaaaataaccttggacaatcactgaattatgtcaccgaaggagcggaaaatgaactacataagaatcacaaaggacaacatagcggaggagcatatctgctgtgcaatgtcgggaaagcagagcctcgaaaagaaggcttggatgacggaaaggtttgacgaggggcttgtcttctatcgcagtgaggagcgcggcaaatgctttatcgagtacattccggctgagatggcgtgggttccgattgaagccgaggaatatatgtacattgactgcctgtggattgcgggcgcgatgaagggtcacggctactcaaacgacctgctggcggaatgtatgcgtgacgcggagaaacagggcaaaaacggggtctgcattctctcgtccgagggcaggaaaaaggagtttctctccgacccgaagtatctcgcacacaaggggtttacggttgcagataagtccgactgcgggataacgctcatgtatattcccttgaaacaggatgcagttccgccgagattcagggaatgcgcaaaacaccccgggacagacggagacggatttgtgctgtactacaccgaccagtgtccgttcacgtattactgggttcccgtcgtgaaagcagccgccgatgagcatgggataaagctgactctcatacacatcacaagccgagagacggcgcagaatatttcctctcccgtgacgacatacgcactgttccgcgacggaaaatttctgacacacgccattcagtcggacaaaaaatttctcgccctcgccggagtgaactgactcctgaaacgaaaaacacctcaaacgcggactttatgccgtgcggatgaggtgttttgtgctgtttatggaggaacgttatttcgcagcgatatttatttcgcagcttttgcggctaccgctttgtcagccttttcaagcataccggagtcctgacgctgtgccatgacaagtctccagtagaagcccttgagttcgagaagctcctgatgagtaccgaactcaacgagatgacccttgtcaagaactataagacggtcggcattgcggagtgtggaaagacggtgagcaatcgcaaacgatgttctgtccttggtaagcttgtttatagcgtcctgaatgagcttttcggtttcggtgtcaagagcggctgtagcttcgtcaaggatgagtatcttcgggttgtggataagagcacgcgctattgcaacacgctgtctttcaccgccggagagggaataacccttttcgccgaccatagtgttgtagccctcggggaggttcactatgaagtcgtgagcgtttgcgagctttgctgcggctataacttcctcgtcggatgcgtgaggcttagcgtacttgatgttgtctctgatagagccggagaagaggtgcgtctcctgaagaactacgcctatctgtgagcggagcgcgttctgtgagatgtccttgatgtttactccgtctatttcgatagcgccgtcagttacgtcatacaaacgcatgagcaggtttataagcgtcgtcttaccggagccggagtgaccgacgatacctatcatttcgcccttcttgatgtcaaggttgatgttctcgagaaccgggttgtatgtatcgtagccgaatgttacattcttgaactgaacgtcgccttcgatggaaatatcaataggaagacctatatccgatacttccggctgttcctcgaggatctcaagaatcttaccgagagaggtgaggaaggacgagatgttacgcgggatgaacgttatccaaagcagaggaccgtagataatgttggaatacgaattgaactggtggagatcaccgtagttcataactcccttgaagaggagatagttaccgtagaacagaataaggtatgaaccgaagcgcaccgcaaatccgagaagcgggaagactgtatcaaagagaagcgcgttgcactccgactgttttgcagagcggtttgtgcgtttgtggaacgtctcgatttctctgtcctcgttaccgaaagccttaactactcggataccgtttaaaacgtcctgtaagaagaggtttacatggtgtccgagaatccagtttttgcggttgaggttctgcatggtgttccagaagttcgccacgagatatattacaagcggaatcggaacaaatacgaacaagctcataagcggattgagaatgagcaggaacacaagagcgaggatgaacgacgcgccctgtgtaaagaggctggggagctggttcgtcatgaagtcctgtacaacgttgacgtcgccggtgattcttcccatgaggtcgcccgttgacttacgctgaatggacgagacggaaagggtggatatcttctcgtaaaggagggtacgcatcatcagagtgaacttgttgccggagatggcggacattctgctctgtatcacgccgagaatacgctgtacaaggtcaattgagatgattgctatgaatattgcgataaaagcgtggaggtgagggtcgctgaaggagtttaccggacgtatggattcgtttgtcaggtaatcgttgacggcgaccttctgaattgcggggagaacgaactgaattatcagcgagaatacggagacgaacagcgggaagaacagcataaggcgcagaccctttgtaagtccccagagctttttgtaaacttccttggtgttgcggcagaacggacagagcttcgttccatgaatgaaggggcgtccgcacttggggcagaatctctcggggtcgtcgtttgtgacaggctcaccgggagctttttgttcgcggcgtttctttgcaaggtcttcgcacgcgtgaacgaggactgaatatctcggcagatttcgtccgctgaggaatcggcatacgagagttgtgataccgtcaacctcggcgtagaacgcacagttaccgtagagcacttccgtggagaagataccgcaatgcgagaggtcaatctcgtttattatctttccgcggagtgtgcaaaggattcttctgtccgttactatagtccagccgtcaacaaatttgtcctcaagtacgttgaacggaacaacatacattagtttttcgcccgcctcggcataagagtcataggctgctttgtcaagctcgggcaaatcgtacatcagcttcataatttgactgcctttctgggtgtctgatttttggtacggctcagatatagatttctatgtacttgtagctcagcttgtcgagctttgacgggtcggggatgacgaagcagttgccgtccatgtcggagatgaatattctcatgtcctcaaggacgcggatgtttgagaaggggttgttcagaacgatggaagcgtttcccgcggtggtttcggcttcccagtaggtgtaaccgaacttttccttcgcggaggttatcttctttatctcgggtgtgaaatagcggacttcaagctcgtcgtttatgagctttacagtgtccttgtcgaaaatgttgacgttgcgaatcattccgatttcggctccgcgtccctttatgcgtgagtcgggctctcttacggagagaaattcgtcgggagcggtaacagggaatgagcggcggataaccactctttcaaagaattcttcgtttccctcggcgttgattatcttaagcgagataagaccgccggcggaaagtgagaaccatgagttttcgggagtcatcgtgatggattctctgtgcttgaagaggtcgtcggcgtttacttcctcggtgtcctccgcgctctcagtctttttttcttcggcttttttgtcttcagccttgttctggagctttttttcttcggctttattattatccgcagtttttacggtatctttttccttggttgccataatactaacctatcctttcatactgtattcggagttacattcccgcgaggactttcttcatagcttctgcctggagcttgtacagtctgtagtaaactccgccctttgcaagcagatctgccggaggtccttcttccgcgatttcaccgttttcgattacaaacaggtagttgcagtccttgagtgtggaaagtctgtgcgctatcgttatgcaggtgcgtccttcaacaagcttggagagagcgtcgccgataagtctttcggtttcggtgtccatagccgcagtagcctcgtcgagaatgaggatggacggggacatgagaagcgctcttgctatggaaacacgctgtctttcaccgccggagagggaacggcttcccgaacctacttccgtctcatagccttcggggagacgcactatgaagtcgtgagcgttggctgcctttgccgctgctattacctcttccattgtagcgtccggacgggcataacggatgttgtcggcaatagttccgcggaagaggaatatctcctgcgatacgattgcgatattatgtctgatggacgagattttaatcttctttaaatccatgccgtctatcaggatctgaccagagatggggtcgtacatacgcgtgataaggtttactatggtgctcttgccgcttcccgtatgacctacaagaccgatgttgtctccgggatgaatcttgatgttgacatccttcagaatgggtctgttcgggttgtagtggaaggaaacgtccttgaactcgatgtctcccttgaactccggcttttcgacagcgtcgggtgcgttcattacgtcgggaaccatgtcgagtatctcaaacattctctgcgcggcgttgatggtgtcggtgatgaggtttgtgaatgtcgagaagaactggagaggaccgaatatcattccgatatatccgaggtatgtggtgaattcaccgtatgtcatctgctcacccatgacggaaagaccgccgaagccccagatcatctgtgaggacataccgataagaaggctgactacggggaatattgtaagcgaggtgatgttaaccttgaggtttgcgttaaagagtctgtcggagtatttgtagaagcggtgagtttcctcagcttccttggcgaacgcttttactactctgataccgttgagcgagtcgccgagcattgagttcatcgaggaggaagctctccactgcttggagtacattctccacagcttcgggagcattacgcggaatatgataactataatcggcacgggcacgaataccatgagcgtgagcttccagttcagcgagaagaggaagaacgtcagaccgataaagttcagcgcgtttatgacgaagttcggcacaccgtctatgtagaagctgcggattctgtcggcgtcatagtttacgcggttgataagtctgcctgtggactggttgttgaagtaggagagcgacagacccatgagagcgtcgaacacattctgcttcattttgttggtcattctcgtcgacagctttgcgttcgcgcggttctggatgatgttgatacccagagaaacgagcgcgagagctacgattaccgagaggacgatgaacagcttttcaaccgtatgccacttacctgaggagctgataacgttatcgtacagtatacgaccgtttatgataggtgagataagcgaaatgccggagcttgcgagcatacagaggatgacagccgccgcctgagccttatagggaatgaggaacgcgagaagtctctctataaccgcgcccttcttctggcagtgcgtgcagactctgcggtactggttttcgtatacctgaccgcacttcggacacttggcgttgaactgctcgaatatctggtcgtcgtcggtgatgtcctgaccgcgcaggaatctgtcgattatttcacagaacgcgaacagcttttgacgttttgcgttggtgcagtatgccttgattcttgttaccgcgtcacggttccattcttcggagatgcggtcgcgctcttctttttcgagatcctccgatatttccgggcggagagttttgtgctcgaatacaagaagtctgttcgaggacatacacgtgtcgaccgtcaaatcggagttgtaatccattgagaacgagtcgacgtacttgacatattcggcgtctggtattttgccgaaatcgtcatagtcacgggaatgcttgtgcttttgctgcgggatggagtcggggtcagcaacgagacggtggataatgcgcttgtccttttcgtagacgagccatgcctcaccgaagtttccgtcgagatcaaggtccattcgtactgcaaccgtcatgtcgtcgagcgataagccgccgtcctttatggcagtggaagccgcaggtgtgagtttatcaagcggaagcataatagtcacatacctttcttgcgaattttaccgattggggtaatttattcctttgcttcgttcggagagcaaagagacaggtccgtgtattgtattattatgtaaaaattcatgatttttcttcacacggagtttcttttgtgctataattagactgtatggtaagtattccgtttcacgaacacgcgaaaagtatcaataagtaaactcatattaatacagttcacatagtctattaataatatccttaatttttgagttttgcaatactttttttaaaatttcgtgaatttcggcgtataacacaaattgttaacatttatttggtgaaaagatgctaaaaaaaacaaagaaatggacaaagtgcaaaaacatagacagcaaaagatataaacgcgatttagcgaactatcttgacggcagaagcataaagtgcgtcaccgagagaagggacggaatcgaagaggtagtcggcaaaagcggcgctataatcaagaaggacgacgagcttctcatatactccagccaggacgttctcatgagaatgaagatagacgaccttcacgcgtgggagcttatgtctctcgagggagttgtaattacagcgcacgacatcgagcacggaggagaagagcgcacggttatcgcgttctacagctactggagacagcttgaggattaatggatatcataataaataacaactatgagggaaaactaatacgcgaggtgctgaaaaaagaccttggatattcgatgaacctcataaaaaagctcaagttctccccggacggaattaaggtcaacggcgagtgggtcacggtgcgctatgtgctgaaaaaaggcgacgtgctctcccttgcaatcgaggacaagcccgacgacgtaagcccgtacattatccccacggagcttccgatagaggtgctgtacgaggacgaatacctcaccgccgtgaacaagccttacaatatgcctgctcatccctccctcggacacaagctcgacaccgtggcgaacgctcttgcgtacagatacaagggctcgacatatgttttcagacccgtgaacaggctcgaccgtgacacgagcggatgtatgctcaccgccaacacaaaggacgcgtcgtataagctgtattcctcgatggtgaacggagacatacacaagacgtacatagcgatgctcgacaagactccgtctcagcgggaaggcgtgattgaaacatatatgcaccgccgcgacaacagcataatcgagcgcgaggtttgttcccccgacgcacatgacgcaaagcctgccgtgacaaaataccgcgtgatatgcgaaaaaaacggaaaatgcatagccgcggcgtaccctgtcacgggaaggacacaccagataagggtgcatttcgcgtcggtcggctgtcccataatcggagattcgctctacggcagggaaagcaacgatatctcccgccacgcactgcattcatggagaacatcgttcccgcatcccattgacggacgagagatgaaagtgaccgcccctcttcccgaagatatggtgaatctcgcgcggagcatcggttttgacgacataaacaatattctcaataaggctgatatatgattaagaaaattaaaaattacactccggcgtttgcgtgggtcttcgcactcctcggaataatcgcggcggcagtgcagattacggctatatgctcgactgattttgctaatttctggagcgacaatgtttcctccgtactgcgcgcttttacggctcacctcacgtcgttcttccagttttcgcttgccgagactatagtgatatcaagccccataatcctcgtctgcgttatcgtgtacgctgtgagagcggcgcagaggggcaaccgttatctcgttcgctgcgttacgggaatgctgtcgatactgctccttgtgtattctgtgttcgtcttcaatttcggcgtaagctaccgcacggacactcttgacaaaaggctcggcatagaccgcgaagacgtgacgggagaagagctgtacgagacgatatccatagtgatagacaagctcaactcccttgtggacgacgttattatcgtgcaggacaaaggctctctccgaccgtattctcacgacgagacagtgaagctttgcaccgaagcatacgaaaagctctcggacgaatacggattcatacagaagctgaacgcgccggtgaaggagataatgctgtcgagtataatgacatacacgcatatctcgggagtgtacacatttttcacaggagaagcgaacctcaacacgaactatccctattttgtgaacgtctatactacagcgcatgaaatggctcatcagagaggtgtggcgcgcgaaaacgaggctaacttcatcgcgtaccttgtctgcattaactccgacgacccgtatatgcagtattcgggatacatcaatatgtacgagtatctcatatcccccttgtataaggcgtctcccacactgtacgcaaaggctgtgagagcgctggacctcagagtaagatacgacctcaactgctacagcgtgttcttcgacaagtatcgtgaaagcaaggcggctgacgtgagcgacgcggtgaacaacggatatctcaaaagtcagggaactgtcgaaggctcgcgcagctacggaatggtagtcgacctcgcggtagcatattatcgcccgacatttacggatacggagaatgctgaatgaaaaagatactctcatgcgctcttgcggcagttacggttgtgctcacactgcttgtcacatcggcatacgctgcgggagaaaaagagctgcccacaattatagtcaacgacgagaaatggtacaaggacactgtgtcgccgcttatcgtgagagacggaaaaaactacgttcccgccgaggtgtttaccatgcttgactatatctcgctcacatatccgaacgacggcaacctctttttgatgaacaccgtcacgcggaactatatctccgtgctgttcatggaaagagcggcggcgatgaacggtgagattatcgagaacattgacgttttccgtgacgcaggggtgttttaccttgacgctgaggaaacggcgcaggctctcggcatttcctacgaatactacgacaaaggcgagggaaaagtcggcatacgcttctatgacgaaaacatgattttctctctcaccgagctgcttcattcgtacaccgagagtgagcagagcacgacaaacgatagtcccgaacagaacacagccgacaataccgccaccgtgaagaagatataccttttctgctcgacgcccgacgacagcgaagcatatttccccgcacgcggcaatcttgattactacggacttgactacacatatttcgtgagtgaggctgcaagtgacgagcgtatcatagagcttgctgctgacggcgggtactgtctcgcgcttcccgaattcaacgcggaggagagcaaaaccgatacggctgatataatcgcggcatatctcgattcgctgaacgcaaggctgaaaaagctcacgggaaaggtgacgagatacacgctcacaaccggcaacgacgagcttgacgcttggcttctcgagaggggatattatgctataaaacccgactacacggtgaacggcgcgtcatatcccgacggaattgtggaagagatgcgcacgctgcttgaagaacgtgactatgtgacgatattcctcgaggactgctggaactcggagagaatggcggtgcttctgtcggagatgcagggcggggagataaagacggcgaacatatttgattaagcggaaaggagcctaaaagtatggaaaacaacgacaaaaagaagaaaatacttgtagtcgaggacgagcgcaacattgctcaggtactcgcttataatataagaaaagacggctacgactgtgatatagcctccgacggcgaagaaggacttaaaatgggactgcaaggcggatatgacctgatactgcttgacataatgctgccgaagatgaacggatttgacgtgtgcgagagaatacgccgcaagagtcaggtcccgataatctttgtgacggcgcgcgaggaggaaaaggaccgcattctcggacttgaaaccggcggggacgactatgtgacaaagcctttctcattcccggagcttaaagcaaggataaaagcgaacatacgccgctcatcgggagaagttgtgacgggagagaaaaccgaccccgatataatcaccgtgggagaactgaccatagacaaagctcactattccgtcgagaaaagcggagaaccaatcgagatgtcgaaaaaagactacaacctcattctgttccttgcggagaacctcggacaggctttttcgcgcgaggatctgcttgagaagatatggggctacgacgactacttcggagatatacgcacggttgacgttacggtgaacagaatacgcaagaaaatagaatccgatcccgcgcatcccgaatacctcatgacaaaacgcggcgtaggctactacctctgcaaaagataagccgcccctatgttcaaaagtctgtatttcaagatagttttaatacttcttgtgtttatcatagccgttatgtgctccgtcggcgcgatacttctcagcggagttacgtcttactatgtcgaaaacttcgcggagcagatgacggaatgctttgacgagggcggaatcctcatgccggagctgaaacaagccgcgcagagcgaacgtcccgcatcagaaatgaaaaacgtcctcgcttcatacggcagtatactcggaatcgacaaaaaccgcaattatttcgttttgaaccttgacggggaaatgctctccggctcggatatcactctcggctcaacgctgaagataacgccgaaccttctcactgcgattagcggaagcggggaaaacagcagctcgggaagcatggacagctccgactgggcggtgagaatatccgttgacggtgacagcgcggacgacgttatagtttatatcatagactccctcggtgagatgagacagctcaacagcgtgctctaccgcattgtattccaggcgatgcttatcggaatattcatagcggtgctgctgtcgttcttcctcgcgaagtccatctcgtcccctctgcaaagcctgacctacggtactcagcttgtggcgtcgggggaattctcgcatgagatagaggtgcgctcggaggacgaaatcggcgtgcttgcagaaaacttcaactacatgagggaaagactgcgcactacgcttgaggaagtcgatggagagcgagaaaaactcgaaaccgtactctcctgcctgcgtgaccccgtcattgccttcaccgagggcggagcggtaatgcagtcaaacaacagcgcgggagcattgttcggctcgtccgtcggaaagctgacaatagaaaaatgctttgagcttcttgacgttccgctgactgacaagggcggagtgtttgagctgacctctcccgacgctgaggttgagagtacgaaggacggctttgtgttccgcgacaggatatgcggcgaccgtgtgtatgacgtaagctgcgcaccgctcaagtatgccgaggcaaaaaagaccgctgtcggatgcattgtcatagtccacgacgtcaccggcagattcgagcttgacgaaagcagacgcgagtttgtggctaacgtttcgcacgagcttaaaactccgctgaccgccataaagagcgcggctgaaacgatacggatggacgaagaaatggacgaggagacgcgcagctacttcctcgacatggttctctccgagagcgacagaatgaagaggatagtgtccgaccttctcgtactgtcaagactggacaacaaaaagacgcagtggaacatagagaaattcgacctcagacagtcggtgagaagactttgcgacgttatgagaggggatctcgaagcgcacggacacaggataaccttcggctgcgacagagatcttcccgagataaccgccgacagacagagaatagagcaggttgtcataaatataatctcaaatgcgataaaatacactcccgacggcggtcaaatagacataaagctgatgaagacgcagcatgacagcgttatcataaacataagtgacaacggaatcggaataccgcaggaggacatagcccacctgttcgagagattctaccgagtggaaaaatcgcgaaatcaggacgcgggcggtacgggactcgggctcgccattgcaaaggagcttgttgaagcgcacggaggaagcataaaggttgacagcgtattcggacaaggcacgtccgttaccatagagcttcccgttgcgtgcagaataaagaccgagaaaaaggaaccaaaatgacgaaaaaaagcgataatagcaatgcaaacaccgtaaaaaccgtgatatgcgctgttctgacagtctcgcttgtcgtaatggtgctcggcatcgtttatatgctgaacctaagccagtcgctcgttccatttgatttaagcaccataaccgccgaaaaaaccgaatacagcattgatataacgcgcttcatactgccggagtttatcggaataacctacgacggtgagcggctcggagtttccggctcggcgaatattcttgcggagatttaccgtgagctgtcgggagttatatccgaggtagtgaaaagcgactgccttatcgagagaagcagtaccgactggagactgcttgccgagagcgatatttcggtttacttgagataccacagcgagctgcccgactgcgttgtcggagtgtttgcg

SEQ ID NO: 171 - DNA, 13222 bp, Unknown
  16S sequences of unknown bacteria
cggtccagcaggagcttccgctaaatcagccaacttctgtatctgcagatacggctccgaaagaaactgctactagaacaccggatttcattttactgcaggaatcaaaggaagaaaatgttccgaaagctttgcttgatttaatgagagaaaatcgagtaacagaatgggatattcaaaatgcagtagaggaaaagggttatttcccgaatatgcccattgaaaaatatccggaagattttgtgcagggctgtttggttggagcctggtcaaaggtttatgcaatgattcaggagaacagaaagacattggacaaagagattccatttaattaaatgacaggaggataagaagatggcagacatggaaagagaatttaactgggatgatacgatcgagaaagattctacagattttgtgttgcttcaggaaggtgactatgattttgaggttgagagctatgaacgcgcccgtcatggtggaagtgagaagcttccaccgtgcaacaaggcggttctgaagttaagaattgagagtgaagcgggtacagcatacctcacgcacaatttgttcctgcattccaagacagaagggatcctgtcttccttcttctccagtatcggattaaagaaaaagggtgaacctcttcgtatgaactggaatctggtacctggaagtaaaggcagatgtaaggtaaaggtcagaaactggaaaggcaatgatggagaagaacggcagtcgaatgagattgttagattctatccgaaagaagattccgctaatacaggtagtggatacagagcaggtgatttctaatggagttaagaccatatcagcaggaagcaaaagatgccatttttgatcaatgggagaaagtagataagactcttctggtacttccaactggatgcggaaagacgatagtattcgcaaaggtaacagaggaatgtgtccgccgtggctgccgggttctgatcctggcacaccgcggggaacttttacagcaggcaacagataagatcgcgaaggcaacaaaactgggatgtgcgactgagaaggcagatgaaacatgtctgggaagctggttccgtattacagtcggatctgttcagacgatgatgagagaaaagcgtctggcccgttttccggaagactattttgataccatcatcattgatgaagcacatcactgcatttcagacagttatcagagagtgctgcagcattttccagaagcgaagattcttggtgtgacagcaacaccagatcgtggagatatgaagaacctcggtcaggtatttgacagtctggcttatgagtatacccttcccaaagctattaaagaagggtatctgtcaccaatcaaagcattgacaattcctctgaagttagatctgtcgggagtagggatccagtcgggtgacttcaaaagtggggacattgcaactgcattggatccgtatctgcagcagattgcagaagaaatgaagaattattgtatggatcgaaaaacggttgttttcctgccattggtaaagaccagccagaagttccgggatattttgaatgagcagggtttcaaggccgcagaagtaaatggtgagagtaaggaccgtgcagaaatcctggatgcatttgatcggggagaatataacgttctctgtaattccatgcttctgaccgaaggctgggattgtccgtcagtagattgtattgtagtgctccgaccgacaaaggtacgaagcctttacagtcagatggtaggacgtggtaccagattatatccagataaagatcatttgctgttattggattttctgtggcacactgagcgccatgagctgtgccatccggcgagtctgatctgtcaggatgaggaagtggcaagagttatgaccgccaatattgaaagtgctggttgtccggtagacattgaagaagcagagaaacaggcatcagaagatgtggtagcacagagagaggagtctctggcgaaacagttgcaggagatgcgtcagcgcaagaaacgtctggtggatccgcttcagtttgagatgagtattcaggcagaagatttggctggatatgtaccggcatttggatgggagatggcaccaccgtctgaaaagcagatcaagacgcttgaaaaactgggaatccttccggatgcggtggacaatgcaggaaaagcaacgaagctgttggagagactggataagcgtaagcaggaaggccttacaacaccaaagcagatacggttcttagaaggacgcggttttctacatgtaggtacctggcagtttgatacagccaagcgtctgattgaccggatcgcggccaatggatggaggattccatcggacatcaatcctgcagaatatagaggagcataatcatgagacagacagaccttcttgaaatattaaaccatatagaccctggcgccctgaattaccaggactgggtcaatgtaggtatggcattaaagcaggaagggtattccgtaagtgcatgggatgattggagccacagagaccttaaacgatatcacagaggcgagtgtcagcgaaaatggaattcttttaatggtaccgggacgccggtaacaggaggaaccatttttcagctggcaaaagaccagggatgggtaccggagagtgacccgggatatgaacttgattggaatgatcagataaccagggaagagggtgtgatcattgataagaattgggtggaaggaagagaaatcagagagccggagaattgggatcccaaggcagagctgattacttatctggaaaccttgtttgactctacagacaacgtaggatatgttacccattcttttgaaaaagatggaaaatacatgccgtcaaagggtgtgtgggatcgaacggccgggaaattgatccagcagttacataaggcgaaagatatgctggatgtgatcggagattacaatccggatgtaggcgcgtggatccgctttaatccgttggatggaaatggatgtaaaaacgataatgttacagatttcagatatgcattagtcgaatcagacgcaatggagattgaaaaacagaatgctgtcatcagggaactggagttgccagtagcatgcttagtccatagtggaggcaagagcttacacgccgttgtgcgtgtagatgcagcagactattcggagtaccggaagagagtcgactatctgtataacatctgcaataaaaatggttttacagtagatacccagaataagaatccatccaggttgaccaggatgccaggcattatgcgtggaggaaagaagcagtttctggtcgataccaatatcggaaagaaagactggaatgaatggcatgagtggatcgaaagcgtaaatgatgatcttccagaaccagagagcattgcggatgtctgggataatctgccggagctgtcaccgccattgatcgaaggtgtcttgcggcaggggcataagatgctgattgccggtccgtccaaagcaggtaaatcatttgggctgatagaactgtgttgtgcaattgcagaagggcggaaatggctgcagtggtattgcacacaaggaaaagtactttatgtgaatctggagctggatcgggcaagctgcctgcatcgttttaaggatgtatatcaggcattgggatgggcgccgaaccatctggacaacattcatgtgtggaatctcagaggtaagtcagtgccaatggataaactggcaccgaaactgatccgaagagctgccaagaaaaattacatagcagttattattgaccctatttacaaagttattaccggtgatgagaacagtgctgatcagatggccaatttctgtaaccagttcgataaagtctgtacagagcttggaacagcagttatctattgtcaccatcactcaaaaggaagtcagggcggaaagcgttccatggatcgtgcttcaggatccggagtgtttgcccgggatccggatgcacttctggatctgatcgagctggagctgaacgataatatcctgaagcaggaagaaaacaaggcgatatgtgatacctgcatcagatatctgaatgaaaaatatgaaacctgggaggatgatatttcccaggatgatatgtgcagctctgtccagatgctggcatattgcaaaaagaagttatcccgcagtgcaatgcttgatctggatgcaatgatagaatctaccaagcggaaagtgcaggcaatgagtgcctggcgagtagaggggacgctcagggagtttccgaagttccctccggtgaatctgtggtttgactatcctacgcatcgtgtagacttctcaggcgcgttgggagacattcagcctgaaacagataagcctatgtggcaaaaggctacagaacggcgaaaagagcaggcacagaagacaaaagaaaagaagctcagtgcctttgaaatcgaattttctaatattgagatagaaggtcgggaagtacccgcgcaggagcttgccgacaagttagagaccccttcaagaacactcctggcatggcttggtgacagcaataagcaaaagtctgatctgaaaaaacggtacgaaaaataccagggtgaagatggaaaaatgtatgtcagaagacgtgaagaggggggtgcgccggaccagaaaatttaggttcggcgcaggggtgcacaggggtgcgccagacctaggtcgcgcgcagtgcggcgcagtgcgccaaaagggtgcgctgaattatatatatataaatatatatataattttggcgcacccccctctatgcgggggtaggtaagtcgtgcgacagcttacgcacgacgactcacccacccgcagacacagaggggcaccaacctagatcaccccggaaaggaaaacgtgatgatggaattttttatggctatgattcctccgacaattacacatcaggaaaagcaggtgcatgtggtaaagggtaagccaatattttacgaaccggcggaacttacaacggcccgacagaaactgcaggctcatcttggaaagcatactccggctgaaccatatgtctgtggagttcgtttgatggtaaagtggtgtttccccagaggacggcatgctaatggagaataccggatcacaaaacctgatactgataatctgcagaagctcctgaaagattgcatgacagtttgtggatactggaaagatgatgcactggtagcttctgagattgtggaaaaattctgggcagatgtcccaggtatttatatccgcatagaggagctgacatgaaaaatgaacaggtgctgtatcaattgatgaacgacctactcagatatcttctgaagtatggcaatataaagcatttcacagaagaacaggcagaagaagccttaaaggaatctgagctgatctgtaataaatataaaagagcacctaatggtatcggctggcttgcatggaaattgtgtacggcagtcaatagttatttcatgataagggaggagaagaaccatgggagaaatgagcagtgagatcacaaaaaagacacctgagcagtgggtagagcactatcagggagcatacctgcacaatctgacggcggagtcggtgagtcggatcattaagagtgatatgacaaatgtggcgcgtcagtgtgtgtcgatcggattccatttgaaagcggtaagggacagagaactgtacaaagatgccggttatagtacgctgtgggaatatgcagcggatcagttcgggttgtcgatgtcctcggcatcacgatacataaccatcaatgaccggttttctgttggcggcaacacaccaatgctgatggaggagtaccggaacttcagtaagtcacagctgcaggagatgatcagtctctcgccagagcaggcgaagaaggtaacagagaagactacggtaaagcagattcgggagatgaagcccaagaaagaaaagccgaaggaagtgccggcggtggtgattgaccaggaagatacttctgatcagtgcccaggtcagatgcaggtaggtgattatccaggtgtggttccagaagaatccgttgcgacgtcgcaaaaacgggaatgtatgtaccggtcggaatttttctgtgtattaaaacctgatgagcagaagactgcaggtgacggtacggactgtggccatacatgttgctggaagtgctgcaatcatggaacctgtactcttgagtgcagcagttccaagaatagaccggaatcagaagaagtaaaaccgcaaaaagaggcggaaacatctactgttgtggagtatgaccgcaaaactctggaaaacctgatcaaggatgctgaacatacgctgaatttgatgcaggattactggattcaaaatcagccatatacatatgccaagcactttatgcagttgcaggcttataagatgctcttggattatcatgaaaaactggataaagaagaggttgaagaggtggtacagcctgaactgcctctgctgaagaacaatgaccagcggaaagaatggttgcagaactatcggtcatgggactttggtatgaggatgagaatattggctgcaagtactacaggtacagatttgacaatggtgcggagttgattgtggaggaatcgcgaggtactccatatttccatctggttggtggaccggaggcagcgtatggaagccttggacccaagtggtcacaccacacagaatattgcagatatcccaatagcgagacggaacttgtggaatttctgaaggaggtacagaagagtgacaaagaaaaaaatacataagaccagggcggagctgctgcatgagttgaattacactgcaaagtgccggcgcaacagttattcagcatcattctccggattatcagtatatctgacacatattctggtcttccaggagcattggagaccggggcagatcgcaaagctacaccaggcaattgctgaaggactggaagatgaatcatttgatgtcgatgcagccaatgcccggctaaaagagaagacaggggttgcgtttgaggttgttatgcatgaagacagtgacatccatgtgagcagaaaaaagaaataccggtatatgatggagcagaagcttaatgaggcagagaatgagatcataacgtattgcatgcgctggtgcctgattgcttacagttatctgatggataatggatttggcagcaagcgtattaacagaatcaatgatgcacttaaagactgtctggaaaaatcggtgtgcggagtcgtagatgtaaaagttgcagtgatggcacgggagctggaggatgcaggttatgtcattgagatgccgaaggaatttatactgcagatgtagtggaggataagatgatggcagatggaattaagataatagctgatgaaaatggtctgtttaacatatatgatgatacgtatgatgtgatcatccattgtgaaagtgaagaagagcagaatagtgtgacggagaccctgaaaaaggtggcgaatccatggatcccaattgcagaacgacttccggaaacggacgactatattctgatctcgtttgagaactttaatgttccgcaggtcggaagatatgaagcagatgaagacggcggtggggaattttatccaggcgatgaagattttacatacaaatcaattgacttgtatgtgaatgcctggatgcctttgccgcaaccatacagacagtaacaataatgacagggaggcggtagcaatggacaaggatatactcaaacaatacatagatgcctgcgaagcggtgaaggagacagaggagcagatccgacagcttcagaagaaccggaagacggtggtggtcggtgctgtgaaggggtccatgcacgacttcccttttgcggaaaagaccttccggacggaaggcttgtcttattcagttgttgcggatccgggacagcttgaccgggaggagctgatcctggaagagcggaaagcagctgcagcacagatcaagagccaggtggaagcctggcttaacacgattccggtacggatgcagcggatcatcagataccggatttttgaaaaaatgtcatggaggcaggttgcagtaaagatgggacgacatgcgactgaaaatggacttaagaaggaatttgagagattttttaaagataattgaaagtttgtcacgaatgtcacacatgtcacgaattcctatggtaaagtgtaagctgaaatcactgcagatgcgttgcatgatttattcttttcccatatcatccgccgctgaggtgtcagagcttcggcggtgactcggcttagacagtacgccggcatgcaaatgcgaagactgttactttacctacatcacatttttgaaacatcctgtagaaatgcaggatgttttgttgtaaaataaagaaaatgtgttggaggaaaaaagtggaaatagataaaaaagtggaaatagataaaaaagtgatttggatttgtttgttgcctgtattgttgcctgtttttgtggcgattctggtttcttggaatttaattcccgggatggtgattgacaatgactggattggattttttggaagttatataggtggtattgtaggtggcataataggaatagcaagtgcggtatacgtgctccatgagacgcagaaggaaaataaaaaaacgcaagagaaaaatgagattattgaattttgtgattatcttgtaaaattaggcagcagttacgcacagaaaagtgaaacattcttttacagtcttgtttattatatgaatgtaaatgttaatagcagaaatggaggatatgaaaaaaaacaagcgtataaaaatgcgatagaaaatcatcatatggcaaaagtagttttgtatgaaatattacaaagtttaaacattcgagaaaatgtcccattatatttagtaagtagctataatgagacggtcacaataatgatggatacatataatcaatttcgtgaaatggaaagaaaagtagatgagatagaaaaagaaggtgtggaaagtatggtgattaaagacaattttggaagaatggatacggcattggaagcacttggtaaatatgaaaaagatcttttggaaagtgtaatgatttaaaaatttacatttacttatacacaggagtcacccactcgggtggctctttttctgtctgcaaaatgaaagtgaggtgagcctggatgactgaaaagcagaagatatttgcagatgagtacctgatcgatctgaatgccacccgggcttacaaggtcgcatatccccgggtgaagaatgatgagactgcagcagctgcagcggcacggctgttaaggaatgttaaggttgcggcatatgtcgagaagcggatgcaggatcggcagaagcggacggagattacccaggacatggttctgcaggagctggccgccattgcatttgccaatgctacggacttcgctcagattgtgaatggtagagtgcatctgaccaacacagcagatctgtctgacgcacagataaaagcaattgccgggatcaaagagggcaagtttggtatcgagttgaagctgagtgataaagagaaagccctggagctgctgggacgtcacttgggaatgttcaaggatcgaatagaggtctccggtctggatgatgagaaggctaagttggatgatatccttcagcagatgcgaggtggtggctagtgagcacggagcgtctggtactgtcagacaagtacaagtccttccttcgatgcgatgctccggcagagttcctggaaggcacgacggcggccggaaagacaacagtagggctgttcaagtttatgctcaaggtggcagagtcaccgaagaagctacatattctggcagcagatgatactggagcagctgaaaagaatatcatcaacaaggatctgggaatcctggatgattttggtattctggtggagtacaaaggaaacggatctggagaatacaagatgccacatatcctgttccatacatccggcggcgacaagatcattttcgtagttggctatggcaataagcggaaatggaaagacgctctgggcggtcagtatggatgcctgtacattgatgagatcaacactgcagatattgattttgtacgtgaagcatccatgaggtgcgattacttgatggcgactctgaatccggatgatccaagcttggatgtgtacaaagaatatattaactgcagcagaccgcttccagagtgggagtcggagactccgcaagaaattaaagatgagttgaaagaggaaccaaagcccagctgggtgcattggttcttttcttttgacgataatttgggtttgactgaggaaaagaagcaaaagattatacagaacacgccgaagggcacgaagatctggaagaataagatcctggggttgcgcggtaaagccactggtttagtgtttccgaatttcgaccggaagaagcatgtggttacagccgcatgggtgcaggcagaagtgagagctggtcggatccgttggaagaagtttacttgcggagtagatacggcctattccagcaagtcaccagatacgatctcgatgctctttcagggaatcacaacagaccggcgcctgatcacattggcggaaaaggtatataacaatgcagatctggagataccgatcgccccaagtgatacagcagtgaagctggtagcatttctggagcagtgcaggaagacatggggctttgccaaggatgtctacgtggacaatgcggatcaggctacgatcacagagttgaaaaagtataagcggctgaaaggctgcatgtataacttctgggatgcttataaaaagctggagatcatcgaccgtatcaagctgcagcttggctggatccagcaaggctgttatctggtggtagatgagtgtccagagcatctggctgagtttgataagtatagctggaaagaggacaaggatgagcctgaggatcggaacgaccatacgatcaatgcgaaccagtatggatggattccgtaccgtaacctgatcggatttgaggaggaagagaaatgaggtggttagaaaagatgggtgaaaatatacgaagaggagtaagaagctggctgcagattcagccggcaagtccgtataatatacagatcactgaaatgatggactttgagactcatgcgatcagagatcggatctggtatcggggtgacagcaatgagctggagcagctgtacggaaatctgatcgaatatgcggacaaatataagttctggagctgcaggtctacaccgggaatggagatgcggaagattcatactggtctgccaggactgatggtgcggaccctgacagcaattactctggtcgatatgaatgattttgattttgataatgaaaagcagggtcagatctggtcagaaatcgaaaagaaaaataaattccggaagaagatagaaaaggcgctgaaggaagtgctgtatatcggtgatggtgcttttaaagtgacgattgataccgaagtgagcgagtatccgatcctggaatggtatccgggagagcgcgtggagattatccggcagcatgatcgtgctcaggaagtcatttttaagacgccatacgatatcaggggacagcggtatgtgctgaacgaacgctatggctacggttatatcgtgaatgaactgtacagaggagaacagcaggtagatctgagtagcttggaagtaacaagaaatttgaaggattatacatttgacaagaatgcgatcctggctgtgccgatcatggtgtatgaatccgcaaagtatgagggacgcggcggttctatctttgatggaaaactggacagttttgatgcgtttgatgaggttttttcacagtggatggatgctctccgagccggaagagcaaaaacatacatcccggagtgcttggtgccgaaagatccgcagacagggcagatccttaagtctaacccatttgactgccgatactttgccggggacaatgatatgtccgaaaaagcagagaataaagtccagacagaccagccagatattccccatgagagttatttggcatcttacattacagctttggatctgtgcctgcaggggatcatcagtcccagtactcttggtatcgacacgaagaagctggacaatgctgacgcccagagggaaaaagagaagaccacactttataccagaaatgcaatcgtggaggctcttcaggagacacttccggaagtggtcagtgcggcactgaatgcttataacatcctgatgaagaagccggtggaagaggtcaaggtggatatcccgtttggagaatatgcgaacccatcctttgaaagccaggtggagacactggcaaaggcacggccgggtgtggctctgatgagcgtggaagcacaggtggaagaactgtacggagattccagggatgatgagtggaaacaggaagaaatagcccgcctgaaagcggagcaggggatagcggaagtagaagaaccaggagtcaatatggctgctggtatttttgacgtcaatctgggaggtgaaggaaatgctggtggcagtgggcaaaaacgtttacagaatgagccgacaggagtaccaggggctgctgaaggtggccagtgagcaggtaccgttcggaatctacgcgattgagaaggaggattatgcggagctgcgatgtgataaatgtgagagcatgtcacagctgaagaagctgaccagaggattcaaggcacagggattcagggtgcttgcaaacagggggtaagattatggaaattcctggatttgaattattactacatgatttttgcgcattttgtccggatttctccccagaactggaaaagatggaatgcgcttctttaggtggaagtgtatcgtgtaaaacatttatacgatgcaagaacagaaggcattgtgagtcaattgcaatcaatattcgcagtcaggtaaaaggtcgatgacaaaaaagaatgaatatgatcttgctgaagctttccagcgcatcgaaaatgaattgatggcatccatgatcagaaatatggacaggcatcggacagaagagaccgaggaaggctacaactggtccatgtggcagacggagcagctgaaggctctggaaaaatataaacgcaataatcagaggaagtatcgaaagcaatttaagaatatcaacaatcagatcgag

SEQ ID NO: 172 - DNA, 12064 bp, Unknown
  16S sequences of unknown bacteria
atttgtatattattgccaatatatttaatatatttttgtataatttgctgttcccgttccttgatgtactgttccataaaggcataatcaggattgccggattcatcaacaggtagcaacaaagattgcttctgcattcgtttctcattaaacttatagccataagcatatttgcatttctgctgtaatataacagttttcataaataaatagatatatttatttccttgaacttgctttgtttgaaaacgcttgacatcatcggaaaaaatgcaagtatatgggtgataaaaattctcgacaacgctcccattataatttacgcctaaaacattgcagtcctcagaaatattcgtattagacacaaactcagtaataccgttgttattatctgttgcaccgatgaaaggtttattcccgcttgccatatcacttttagtcaggcgcttgcccgctttgataataaaaatatcacatattctaaactctttccattctctatcatgcaaatcaagcattgccgtcaccgcctttctgcccgaacagatatccttttccgtgcgtaaccatattaaactcaaatgtcagataatcggcaatactgttcataaagtcctcttctgttggaatttcgtcgttatagtaataaaatgaatgcaaccattcgtctgtatcttcaacagttgtttctaccatgaaacttgatgggaaatctacaaccttaccacgccagcagtcaagaagatactgccgtttatcctttgcacgttcggtttccacaagccccaaatgctttttgacttcaaacccatcatcttcaaaattgataaactttgcaattttatctgctggatgcggttcgcctgctgtgaagacagcaatacagggaacagtaccgactcgataaaatgtatctttgttcagactaataacaccctctaaggtatgttttttcaaaatatcctgtttgaccgctttatcctcttttgtctttccaatcatagcggacacaggcacaatcacggcggcccgtccgcctgttgtgattgaattaagtaaatgacggataaaacacagttctgaaaggtttgcagtatccttgccttttgcctgtgaatacggtggattcataaagcccaccgtaatgccgccaccctttaactgtaattcgccagggtcttgtgccagaaagtcttcacaaatcaagttactttggccatcaccacgcagaatcatattcgttgtagcgattgaaaacatatcatcacgaatttcaattccgtgaatttgttgctgcttaatgtgtttgcgttctgtatcgttctttgtagcacgcaacattttgtgcattccagaaatcaaaaatccacctgtgccgcagcatgggtcgaatataacatcagtaggtttcaaatccactaattcacaaaataattccgtaatatgccgaggtgtaagcacaacgcccaaagcctgaccgtcaccgcctgaataagaaacaaattctccataaaaacgtcctagataatcttcacgcccatttgatataatcgcctgaaaaatattgttgttgatatactctgcaaaatatttcagaggtgttttatcgcccaaatcttgacgctttgtgtttaattgcggtctgtcctttatcagtgtaaattgattcagcacacgctgtttttttacttccggggcaacttttgcgcgttgcagattcttttcaagatactggtacagaatagcgccgtcagtattgctttccaatgtgtcacccgttaactgattcagattaaatccgtattctttttcgcgtagtgcaagaagtatagcagatacgacaagtggtttttcatcttccccgagtccaccataattccgtagatattcgtgtagttcctttgccttttttaaaatatcagcaagttcaatatcttccggcggtgtctcttcaagtacaagccgcttgtaatattctataatatgtgcttctgaaaagttttcaaatgtctggacttctggtagccatttgtagccgttcttatctacaaaaagcggctgtaaaatgtggtgcttactatcccccgcattaccgaacgcaaaaacttttttataagtggttttctgcaagatgtgctgtgcatagtgcaaagcaccattgacggcataatcagtcgttgcctgtacggtcatagaaatagtgccatctttttcttttaagcagaggttcgcacggtctgctttatcttccataacgagaacaaaatcatctacaaccgccgtatattctggaaaacctgccttgcctgtctgatgctttgacgctgttttcagtgcttcattaataggaacaatattactgccttgtgtgtctgcctgaatgccagcttcaactaacaaatcatgtatatataaatcaaaattcgcttctttttttgccatagttttgtgccctgactttctatgtgtttttataaaaaactatgtataagaatatcataattcaacagaaatctcaatttaagcgttatgaaaaatcaatatacaatatatcgcaaatcttcatttttcctgttcacatctcatgattagataagatagatattattcatataagtcttaataatatctcagtttcattacattgtcctttagacactccaaggcaaccaaaaaagacatcccttgacccgtaataattacggttcaggaatgtccttttttcgctacttagcagtaagatagactcacgatgcaacttatccacaattatataattccgaaatgcttaaacgcctgcatgattgcttcttccttctcaggtgtgcattgtggttgtctcgcattttctgacttaggcaaattaaaattctctcccacatccagtccgcatttcttcttaatctgtgcaatatacaatgaagaaaccttaagtccggtatgttccaacacataggcctttacttgctcataagttgcctttcccttgaactctgataaatccatatcttccaaagagaactcaacccgaatctttttcgagtcgacctcaccattggaaagcaatactaccgtctccacatgcaccgtacccgggaacatatcacatgccttcactttcttgacttcgtatccccgttcacccagccattttacatctcttgccagggttgcagaatcacagcttacatacacaatacgttcaggtttcatctttaccatggtctccagtgcagcagtgtcacagcctttacggggtggatcaacgacgatcacatctgcgtagataccttctttttcgtatttttccggaaggacttcttctgcttttccaacaaagaattctgcattttcaatgccattcagttttgcattctggcgggcatcattgatagcctgcggtacgatctccacaccatagaccttgcctgccttctgcgccaggaaaagggaaatagttccgattccacagtagagatcccacacggtctcattacctttcagatctgcatattccagcgccgtctcataaagcttctttgtctgcaccggatttacctgataaaaagaaagcggcgagatctgatatttaatgtttccaatgtaatctgtaatataatcctgtccccacacagagatcatctctgttcccatgatcacattggtattttttgtatttacgttaatcgtaatgctggtcatgcccggcacttcccgcagggaattcaccagttcggtaagcttcggcatggtccttccattcaggatcagacagaccatcacctcacctgtggtaaatccttttcggatcagcacatggcgcagcagaccttttccactgacctcatcataggtagagatatgatatgttttcaaatgatccaagattttctccagaatcactttattctcttccacacccagccagcattccgtacaggggatgatgttgtgagaacgggcagcataaaatccagtcaccggattgccctctttatccgttccaaagggaaactgtgctttgttgcggtatctccacggatcatccattcctatgatctccggctttgcaagatcggtgagacttccgatccggatcagatgattccatacctttttcgctttaaaatcaagctgtgcttcataggtcatggcctgcagctgacatcctccgcactggcgggcaaatgcacatcttggttccatccgctctggtgacggatccagtacctgcatcagtctggcataaccataactcttcttcatcttcatgaccttcgcctgtacccggtctcccggcaccgcatccttcacaaagatcgccatgccatcaaccttgccgatgccctctccatcaacgccaagatcctctattgtcaactcaatcaaatcgtcctttttcatcctctaacatcctcataaaattcaaaatttaatcgcacatttacgaatataaccatgcgcctattataatataattttcccctcccgccaatacgaaccgcaaaattccaagttataaaaccttctaaaatatataaccaactctatacttaactcacccctgacatccatcgcaaagtcaaaggggctatccaccatctaacacaattacacaaacaaaaaaatcttccacaggttaatacacccaaaaaactaaaaagaatctccgccagctaacacatataacctacgctgtatgacttggagcggacaacggaagatggtataccgactggaacgaacatctatgatgtccgttcaaaggcggtatggcaacttactttgtccgatacacgtcatacgagttgttattgtgtcagatgacggagattctatgttatgtttgatcgtgttaacctgtggaagatcctgcactctatttacttgttttacgaatatttgactcaaacagtcggttatatcccagccatccctgattctctccagctccggcaagaatctcgatcatggtctccatatgcgcatccgtattatctgcaaaattcagtgccactgcttccagcagtgccggtttcttcggcgatccgtattccagttccccatgatgagccagaatacaatgcttcagctcattttccagtttcacaggaaagttcggaatctttcctgcctggtcaccgacgatctgtgcaccgatcataatatgtcccaacagctgtccggcatccgtataatcattttccggaaatggtgacagctcatatacttttccgatatcatggaagattgccgctgtgatcagcagatctgcattgatcatcggataattatgaatataataatcgcacagttttgttacactcaaagtatgctccagcagtccgcccacaaatccatgatgaacggtctttgccgcactgctgaacttgaatgcttttgcaaattcctgatcatcaacaaatacatttttcagaagctttgacaaatacggattgctgacccggttgataaatcccagcagttccttatacatcccttcaatgtctttgctgctgacaggaaggtaatctttgggatcatactctccttctctggcctttctcgcccgcttcacattcagctgtggctgtccctggaacatggttacatcggctacaatatccacatagtccagactgtcgaaatcatcgatcccgccagaattcggatcccagatcttaccgtctacagttcctgttttatcttgaaagatcagattctcatacggctttcctgcttttgtcaaggcactctgcctggtcttgcacagatagatgcctgagatccgatcaccttcacgtaagttttcaatatatttcatcattacactccctcattctactactgtaacacctttaatgttacggatgcctgcagatcttgatagccgctggcatctgcacgtttataacgcacatccacagtctgtccactggaacacttcagcaatgtggccacgatatccttcagatttacaattgcctgaccattgatctccgtgatgatatcacctggctgaatacctgctgtgatcgccggagaatccagtgacacttctgatacatagactccaatcggaatattttcctgctctgaaatagatgtcgtaacatctgcgcccacaattcccatatagacaatatcctgattattggacagatgctcgatcagatccttcacgtcagagatcccgtaagcctgaatcgtattgtcctgtccttcaacctctgtcttttcctgcaacagtccaatgatcttaccattccagtccgccactacgccgcttccattactggatctcagaatatccgtagtcaggatattataggagctgtcatagagttctgcggtctgcattacagatgtcaggtttccaaacagcaaagagccattgcttccagtgggattgcccacaacgatcaccggctgtccgctgcgcagggatttggatgagcccagttctgcataagagatcacctctctggtgctgctgtctacatcactcaaattcacactgaccactgccagtcctgtattactgtcatattttttcagagtaccggctgcttccgtatgatcataaaaacggaccttcagatctccgtcctttactttctcatgctctgtcaggatcagaagctccattccattgtcaccaatgatcaatcccgccgcagatttatgactggtcagcgcctcatcaaaccaatcagtatccgttttgaccgcagaaatatcaaccaggctttttgacacctgatttccaatctgcatcagctgctgatacatcttttcataatccttcagttccatgctgacagtctctgtaatatagaccggggattcatcttcatccttatcgtctgtctctgaatcaaccgtctcctctggaatctgaatttcctgaatctcgtttttctccatccggttattgatccgcggcaatgccagcgcccagatcagaagcgctgttcctccaaacaaagccccgccaagaatacaccggagagctttttttaccaacggattggcatagacaggtttttctttgatcttctcctgcataaatgaaaatccgctgtttttctccttatcttcttccataggtccctccgtctgcttgttccccattatactatttttccttttccctgtccataagttccgcttttcattccgctgtaaatggggtaaaatgaataagacagtaaaaggagatacaacagatttatgaaccaaaaagcattaaaaacactggaatttgataaaattattcatatattgactgctcacgcagcttccgaaggtgccaaggagatgtgccggaaactggttccctatgataacatcaatgatgtggaacgggcacagcgtgagacggcagatgcgcttcgccgtgtgtaccgcaaaggaagcgtttcctttggagggatacgcgacattcgtggctctctgaaacgtctggagatcggaggcattcttggaatgggagaattactccagatcatgtcactgttggaaactgccggaaagatccgacaatatggacagcgggaggctgatgataccagccgtgattctctggatgaatcctttgaatttctggatccggttccgaccctggcttctgagatccgccgctgcattctggctgacgatgagatggctgatgatgccagctctgcacttttacagattcgcagatccatgcgccagatgaatgacaaggtgcataataccctgaactccatggtaaacggatctgcccgctcttatctgcaggatccggtggtcaccatgcgagatggcagatattgtctgccggtaaaggcggaacacagaagccaggttcccggtatgatccatgaccagagttctaccggttctactttatttatcgagcctatggcggttattaagttaaataatgatttcaaagaacttctgatgaaggaacagcaggagattgaaaaaatcctgtctgtgctcagtgaaaaagcagccgctgttaccgagatcctggcagaagattatcggatcctgacagcactggattttatttttgcccgcgccatgatggcaaaggatatgaaagccacccggccgatcttcaatacggagcgccagatccacattaaagatggccgtcatccactgctggacccgaaaaaggcagttcccattaccgtgcgtctgggagatgattttgatctgctgatcatcaccggtcccaatacaggtggtaagacagtctcattaaagacggtcggacttttcacactgatgggacaggctggtctccatattccggcatttgaaggctccagacttgcggtgttcgaccaggtatatgcagatatcggtgatgagcagagtattgagcagagcttaagtactttctcctcccatatgactaccatcgtctctatattaaaggaagtaactttgaactccctggttctctttgacgagcttggtgccggtactgatccgaccgagggtgcagctcttgccaccgccattctggatcacctgcacaggcagggaatccgcgctatggctaccactcactacagcgagctgaaggtctatgctctctccaccgaaggtgtagagaatgcctgctgtgaatttgatgtagaatctttacgtcctacttaccggcttctgatcggaattcccggaaagagtaatgcatttgctatttcctcccgtctgggactggaagattttctcatcgaggatgcgaaaaagaggatcaatgctcaggatgtaagctttgaggatatgatggcagagttgcaggacagccgggtgaaattgttaaatgagcaggaagagatcacccgctataaatctgagatccgaactcttcgggatgctctgcagaagaagcaggatcggatcgatgagcgcaaggaaaagattctgagcgatgctgctgcacaggcgaatgctattttacaggaagcaaaagattatgctgacgagactatgaagaatttccacaagtttggaaaagcttcgatctctgtcaaggatatggaggcagagcgtgcccgtctgagagagaagatcaaggaaaacgactcgcgcaccgccaaggctgccccaaaaccgaagaaaaaactgaaagctgcttccttacatcttggtgaccgggtccgtgtcctgagcctgaacctggaaggtacggtcagcacacttccgaatccaaagggagacctgttcgtacagatgggaattctccgttcacaggtcaacatcaacgatctggaatatatcggagaagcagaaaatctgcagaaaggcatgacaaccggaagcggaaagcttcggatgtccaagtcagcagcggtcagcaccgagatcaatctgatcggcatgaccgtagatgaggcaatcgcccatctggataaatatctggatgatgcgtatctggcccatgttccaaacgtgcggatcgtccacggaaaaggtaccggtgcacttcgtactgccgttcatcagtacctgaagcgatgtaaacacgtaaaaacctttcgtctgggaaccttcggtgaaggagatgccggcgtaaccattgcagaattcaaataaaaggagatgctatcatgccagcaaaacaaaaaattctcatcgtagatgatgatactaatattgcagaactgatctccctgtatctgactaaagaattttatcaggtacagatcgtaggggacggtgagcaggcacttcgggtctttgacgcctttcagccaaatctggtcctgctggatctgatgcttccaggcatagatggttatcaggtgtgccgggaactgagaaaacgttccaacacaccgatcattatgctttctgccaaaggcgaagtatttgacaaagtacttggtctggaactgggcgcagatgattatatgatcaagcccttcgactccaaagagctggttgccagagtcaaagcggttctccgccggttccagcccccccggaccgatgaggttccagctgccaagaccgtacagtatccggatctgatcatcaatcagaccaactattccgttatttatcagggaaattctattgatatgccgcccaaggaactggagctcctctatttcctcgcctcttcacctaatcaggtatttaccagagaacaacttctggatcatatctggggttatgaatacatcggtgataccagaaccgtcgatgtgcatatcaaacgtttaagagaaaaaatcaaagaccacccggcatggcgtcttgccacagtctggggcatcggttataaatttgaggtgaaataatgcacctgtcgttaaatgtaaaattcatattggcctatattgcatttgccattttaagctttgtgggaatctctacactgacttccaggctgatgctggacaatgccacccggacacgtgcttcttccttctatcaggaaggtgtctacctgtccaaccaatatgtggagacctattttgacgaggagactaccaagggaaccatatcccgtattcagacacagctctcttccctgagcgtttatctgaatgcacatatctggctggtgagtcgcgagggcgagatcatgatcgactccacccccagttcttcctatgctcatcaggtgatcccggaattcacatccgtgcttcccagcggcacttactatactacggataatttcttcggtatgtttaaagaaaataccttaagcgtgctcattcctgtcacccacaattatcatgtgcgtggctacatcgtgatctatacacccatgtcttctgtgatccatcagaaagagggatatctgatggctgtatatatcaccatgatctatctcatggtactgggtctgttatttgccattgccaactggcttatcgtctaccggcctcttcggaagctaaaaaaagccagtgccgaatatgccgcaggtaattttgactatcccatcgtcacagatcggacagatgaactgggatcccttgcacgaaccatgaattttatggccagttcattaaaagattccgatgaagaccagcgaaagatgatctcaaatatttcccatgatttccgctcgccgcttacttccatcaaaggctatattgaagccatgctggatggaacgattccaccggagatgcaggagaaatatctgaacattgttcttcgggaaaccgaacgactgaccggactgaccagcggacttctgactctgaactccatggatggcaagcagaaccggctgacaagatcaaattttgatatcaatgctgtgatcaaaaatacagctgcttcctttgaaggcacctgcacagccaaacatattaccattgatcttctgttttccgactggcactcctatgtaaatgccgatatgggaaagatccagcaggtactctataacctgatcgacaatgcgatcaagttcagtcatccggattccaagatcaccattgagaccacgtccaaatatgagaaagtgtttgtctctgtccgtgataccggtatcggaatccccaaagacagtctgaaaaaaatatgggaacgtttctacaagacagatctgtccagaggaaaagataaaaaaggaaccggacttggcctgtccatcgtgaaagagatcattcaacttcacggagaaaatatcaatgtagtcagcaccgaaggggttggcaccgaattcatcttctccctcagtaaagtggaagaacagtaaaggtcaaaccactcgcctttcactaaatctatttttagtgcatacttgagaaaaacaatagattttttcaagggaggactaaagactatggatcagtgcactcatgaagtccgtgcagagtactggaaaaaaatcattcatttcttcgtggtgatcacccggaaacgatgttcaagggaagcattgcaactccttcgcttgaagctgcgatcatcaatgccaagtatgtaaacagcaatccgcttgaccgtattgccaaagatttccaggaaaatggcctgaatctgtccaaacagacgatgtcgaactggacggtgtggacagctgaac

SEQ ID NO: 173 - DNA, 32759 bp, Unknown
  16S sequences of unknown bacteria
ggacaaaaatcgggttatgatacctgttttacttgcaatttttgtattgagcgtagcttatttggtggactccacctataatccgtttatatatttccgtttctaagggggtgttgatttgaaaaatacattaaaaaacataaagaaatatcctgttataatattctttggctttgtcctgtatgctataagcatcggggatttgttcagcccggtgtatgagcgctccgatcttgaaaacagagaactggctaaatttccgaaattcagcatttcctctcttatgaaaaacaagtacaatgccgatatagaaacttttacaaccgatcactttatcggcagaaacacatggatttcaataaaaagcgtggcggaatccgccatcggaaagcaggaaaacaacggcgttgtctacggcaaaggcggctacatgtttacaaaggttttgacgccagattacaaacagcttgacaaaaacctaaaagccgttgaaaaatttatggaaagacacagcgacagaacagtaacctttatggctgtgcctaccgcaccgggggttttaaccgacttggtttacaaggacagccctgttgttgacagcgactatattttggaacaaggggaaaacacagttaaatcctgcaaatttttaaatataaaacaagttttgcaggaacacagaaacgattatatctactaccgcacagaccaccactggacaacctacggcgcctactacggctaccgggagtatttaaaatccgtgggcaaaacccctaagagtattgatgagtttaaatttaacgaagcggaggatttcttcggcactcaatactcaaaggcaaagagctacaatcggaaagccgatgtattaagctatatagattgcgatgcacagataaccataaatgacgaaaccgatagcatttatgattattcctgccttgacacaagggacaaatacaagatgttcctccgtggcaactacggcttttcatctgtaaagggcagcggaaagggcaagcttttggtagttaaagacagctacgccaactgccttatcccatatcttaccgatgattacgaacagattgatatttatgatttgagatatatcaccgagggattggacaagcgcatcgaagaagaagattacgatgaaattttgttcctgtataactgtgaatctctgctgacagacagcaacctgccaaaaataaatctgtttaactgataatactttaatcacaagtgaaacccagtttcaaaaccgaatatacaacaaaaccaccggcaaatttttccggtggttttaatttatagagcttatttaattttagatttttaaactttaaatcaacctaaatttgcaaggctgtcaaggattttaacttttttgtcctgtgcgtttgcaagttttgtcttttcctgttcaacaacattccggggtgccttagccataaagccccggttgttaagtttaccgccgataatttgaatatccttttcaactgcggcaagctctttgtttaaacgggctttttctttgtctttgtcgataaggtccccagtaggaataaaggctcttgcgccctcaacaacaatctgtgaataccgtttaacatcaccctcaaatttgtcggtgataacagtgtcctttgcaaaggcgaatttttccacaaaagtcaagccgtccttaaaatcctcaccgtaaggggtttcgataataaggtgggttttatttgtggggtgtgctccaagctgtgcacgcaaagctctgatttccttagaaagagcgaaaattctgttaagagaaatttcctctttcgcaaagttcaactcctctgtgtacttaggccattcgcttaccataatgctgccgtcgttgttcggcaacgcctggtaaatttcctctgtgataaagggcataaacggatgcaaaagtttcaatgcgccgttcataacataaacaagaactcttcttacgttatccttggtttctttatcgtcgctgttaagtcttgtcttggcgatttcgatatatctgtcgcaaagctcgtcccaaataaagtcatatgctttctgtgcggcaaggttcaaatcaaagttatcaaggttttcggttgccgccttggcagtcgagttaaatgttgacaaaatccacttgtcttcctgttcaagtttttcaggcaagcccggttcgatttccccgtcaatattcataagaataaatcttgcggcgttccagagtttgtttgcaaagttgcgggatgccttaactttttcatctgaatatcttgtgtcattacctgcggaagaacctgttgcaagggtaaatctcaaagcgtcggcgccgtattggtcgataacttccaacggatcaatgccgttgcccaaagattttgacattttaacgccgtttgcgtcacgaacaatgccgtgaataagaacggtgtcaaaaggggttttgcccatatgctcaacgcctgagaatatcattctggcaacccagaagaatatgatgtcgtaacctgttacaagggtgcttgttgggtagaaatagttcaaatcttcactgtttttatccggccaaccaagtgttgaaaacggccagagagcagatgaaaaccatgtgtccaatgtgtcctcatcctggtgcagcttctttgaatggcacttaggacattcgcaaggtgtttcctttgaaacgataatctcgccgcaatcgtcgcagtaccatgcaggtattctgtggccccaccaaatctgacgggaaatacaccagtccttgatgttttccatccagtgatagtaaattttatcaaatctttcagggataaactttgtctcgccgtttcttacaacatcaatggcaggctttgccaaaggttccatcttaacaaaccactggctggaaatcataggctcgatcgtgttgtggcagcggtagcaagtgcctacattgtgcttgtaagcctctatctttgtaagataaccctgttctttcaaatcctttacgatggcctttcttgcctcgtatctgtccatgcctgcatatttgcctgcattgtccgccatatgggcgtcatctgtcataaccttgataacatcaaggttgtgtctctgacctacttcgtagtcgttagggtcgtgggcaggggtcatcttaactgcacctgtaccaaattccttttcaacatagctgtcggcaaaaataggaatttctctgccaaccaaaggcaaaatagcggtcttgcccaaaaggtgagcgtatctctcgtcatccggagcaacgcatatacctgtatcacccaacattgtttcaggtcttgttgtggcaatttcgataaattcatcgctgtctttaatcgggtatctaatgtaccaaaggctgccgtcttgttcttcaaactcaacttccgcatcggaaagagcagtgagacagcttgggcaccagctgattattctctgtcctctgtaaataagacccttgttatagagatttacaaaaacctccttaaccgcattgctgcagccctcgtccattgtaaaacgctctctgtcccagtcgcaggaaacacccatcttcataagctgccggtcaattctgccggcgaatttgtctttccattcccaggctctctttaagaatgcctcacggccgatgtcctcttttgtaaggccctcttcttttctcatagattctatgattttaacttccgtggcaatggcggcatggtctgtgcccggtacccacagtgcggaataaccactcattctcttatatcttatgagaatatcctgtaatgtgttgtccaaagcgtgacccatatgcaactggcctgtgatgtttggcggcggcattacgattgtgtaaggtttctttgatttgtcaacttcggcgtgaaaatacttcttttcaagccacatttggtaaattttgtcctcaacctctttcgggttgtagattttttccaattctttcattatttttctcctttttatacttcggaacggttcaaaaatataaaaaaataaccgtccccaaaatatgggacgatttataaccgtggtaccacccaaattgctttaagacggttaaaagaatatgaaaaccgcccaaataagccacttgactgcttttaacgcaaagcctacggaaaaagctacttcattttcaccttttctgctcaaaagctacacggcaaaggggcaaataccggcttacagccacccggctctctgaaaaatgccactgttttaccgactctttatcacagcatttacaaatatttttttatattgtattatacaaaagccgaattgtcaacaatttatgcttgcatttcacgtaaatataaagtacaatatgttacatactatttatgaggtgattgttatggcagattttacatacgaaattacagaaaaacttggcactatcagccagggcaaaaacggttggtcaaaagaacttaaccttgtttcttggggcggcagagctccgaagtatgacataagagactggaacgaagaccacagccggatgagaaaaggcgtttcccttacagcggaagaggttgccgttttaaaggaaattcttgaagagattgacatctgatggaaaagacaagcgaagaatacagagccgaatttttgcggatatttgaaaagtatgttcaccgcaaaggcacagaggaaatgcttgcatggctggacaccacggattttttcacctgcccggcctccacaaagtttcacggtgcttgcaaaagcggccttgttatgcacagtttaaatgtgtaccactgccttaaaaagttgaatgaggacagggaatttaccccggaaccttacagtgaggaaaccatagccattgtttctctttgccatgatttttgcaaaatcggctactacaaagaaagtacccgcaatgttaaaaacgaggccaccggccaatgggaaaaggtgccttactttacaaccgaggatacactcccctacggtcacggagaaaaaagcgtttacatgctaagcggtttttactacggcgagggcaggcttacaagagaagaagccatggctataagatggcatatgggcggctttgatgacagcgtaaaaggcggtgcctactatttaagcaatgcctttgacaaatatcccttggcggttatgacccatttggcagacctgcaagccacctaccttatggaaaaaggcacttcacaggtaaataacaggtaaatattcaagcaaataataaacggacagtaattttttaattttaaattactgtccgttttgtttataaacatcaataaccgcagcaagcctgctctctttaatatgaaaacctccacgccggcaaagataacgataggctagttcaagaaattaaatatcaaaaatttgtttaaaaaccgttgcggtttaacctctcaatgaaatattttccgcaaaccgaaaaacaaaccgaccttgttttgcttaacaaagtcggttttatttttcttattgtattatttggttataatataacttacagtttattaagttgtttgttttacaacaacttacaacatcaaatcgcaaaccatattgctgagttctgccgggttttcaacagtcaatccctcaataagtcttgcctgagcatacaaaatctttgtgtattttgcaagggtttccttgtcgttttcataaaggtctttgagctttgcggctatcgggtggtccttgttgatttccataacaagttgtgcctttacattttcgccgccggtaggcattgtgttaagagttttctccatttctaccgacaacataccctcgtttgtaaggcaaaccgggtgagatttaagcctgtttgtaaacttaacatcccgtactttgccggccaaatcttccttcatacaccgcaaaacatctttgttttcttcgttgtatgttttaagccgttccttttcttcatcggtgtcaatatcaagtttctcgttgctgatatttgcaaaagccttgccgtcgtagttctgcatcatctgcaaaacaaactcgtcaatgttgtctgtaaggtacaaaatttcatatcctttgtcctttacggcctctgcctggggcaacaaatctatctgatctactgtctcgccgcaagcgtagtagattgtgttttgaccctctttcattctgtcgcagtattctttaaatgtcgtcatcttcttttcaaaggaagaagtaaacataagcaaatcctgcaactcgtccttgtgtgcgccaaagtcgtcgtaaacccctaatttaagctgtctgccgaatgagttaaatactttttcgtatttttctctctcgtctttttgcatctttaaaagttcgtttttaatctttttctcgatgtttttagctataattttaagctgtctgtcgtgctgtaacatctcccttgaaatgttaagggacaaatcctcgctgtctacaagaccctttacaaagctgaagtaatccggcagcaagtcggcacatttgtccataatcaaaacgccggaagaataaaggctcaaacccttttcaaactcttttgtatagtagtcgtaaggcgcacgggcaggtataaacaacaggcttgtaaacgtggcccggccttcaacctttgagtgtataacctttgcagggttctcaaaatccatgtactgctctttatagaaagagttatactcctcctctgtcacttcgtccttgctctttttccaaataggaaccatactgttaagggttctttcctcgaatacatctttatattcattttcgctgccctctaccttttggcttgttttccacatcatcttaatggggtagtggataaagtcggaatactttttaacaaggttgctgattgtgtactggtcaagatattcggaatacttgttgtcctcggtgtcctcttttatgtgcaaaattacctttgtgccatattcgtccataatgcaaggctctattgtgtagccgtcaaccccttcggaagtccagctgtaagcctcatcactgccgtaaggacggctctttacaaccaccttgtcgcttaccataaatgcggaatagaaacctacaccgaattgacctatgatattaacatcttcggccttattttcgttcttgaaatcaaatgaaccgctttttgcgattgtaccaaggttgttttcaagttcctgccgattcataccgcaaccattatcttcgattgtaagggtgcggttgtctttatcagcggaaattttaattctataatcgtcttttgtaagcttaatgctgtcgtctgtcaaagaacggaagtacaacttatccatagcatcactggcgttggaaataagctctcttaaaaatatttctttatgtgtatagatggaatttatcatcatatccatcaattttttgctttctgctttaaattgttttttagccattttaaatcactcctatttttagcagtcgctattcttaattgctaatttattatagtacacaccgcttgaaaattcaatagattttacagaattttaacattttgccttatttgtgacagtcaatttgtattaaaaatgtggtataatcaagaaaaacaacttgtaggaaaggattttattatgtttatttttaaagaaaaaggttatcaaaacacacataagactgccgagcttgtggctgattatgtaaaagaacacggcataaaatatgtggttttggcctctaaaaccggctacacaacggatattttccttgatacctttgaaaaggcaggcgcaaaggcaaaatttataagcgtaacccactgttacggcgacttaggccccggacagtgtgagatgaccccggaaaagcgcaaagagctcaccgataaaggcgtaacggttataaccgcaacccacgctttgtccggtgcggaaagaggcattgccaataaatacggcggtgcatttacccctgcgattttaatggcggacacccttaaaatgttaggtcaaggtatgaaagtaggggttgaaatttcccttatggccatggacaacggcgctgtgccatacggcgaagaaatcatagccgttggcggttgcagccacggggcagactatgccataacacttattccgggtcattcaaacaatttgtttgaaacaaaggttatagatataatctgcaaaccgagaatttcctaaaaatacataaaacaaaccgcccttggcgcacactccgtagggaaggttcccaaaaccaaactaaataattgatttccttaagcagtgtatccattggctatgccactttttgttacacaccttttcaaagtgtgtaacccactatgacactttcacgaatacttcgtgtaaagacgtcagtggtttctatcggaatagacaaaaacggttgttaaatttttttaggataaataaaacatagttacaaaaacatttgataacaatgcgcgtttatgttataatttattaaaaggcggtgttaatatgagttttaatcattttattgatacaattattgagctttccgtgacaagaaagtttgccgaagcttctgaagaaatcaagatatatgttaataagttagacaggcaaacagttattgatatagtaaaagaaattggaactataccagaatgtattgaggcaagttcttcttccgagaaattattttcaaaagcatcagactgtattttagctcgttgtttttcagaattaggtatgccatctattgcggtaaacgagcgcggtaacagtgcagatattattgcacgaagtatccacgggtatactttggttgcagatgccaaaacatttagattgagccgaacggcaaaaaaccaaaaggattttaaaattgatgcattaagtaactggcgtgggtcagaacacgattttgcattacttgttgctccatattttcaatatcctaacactgtaagtcaaatatacgcatctgcattagataagcaagtgtgtctgctttcgtgggaacatattttgttcttattagaaaacaatgtaatggaatctgacaccttaagtttagaagctatttggaatgctcctgttaggctggcaagagatacacgaatagcgtatgctgatagaatgaactgtcaatttccttatataaatcaaatgctttgcgaccgaatttcagttccaatccagaaatttaatgagcagttagatgtttgcaaagatattattcgtaatagaggtaattatgaattaggatatcttaatactgaaaaagaagcaataacaacgttaactaaagaagaagcaatagctgaactgttaaaaagcaaaaaagttttagaaagaatttcaacgattaaaaaatttgtttcatccttataggagaataatatgagtgctgtaatttgcggagattcgattaaagaaataaaaaaaattagtgataactcaatacatttaatactttcagatattccttatggaatttcatttgataaatgggatgtcttgcataataatacaaattcagctttgcttggaaaaagtccggcacaaaataacagctcggtttttaaaacacgaggaaaacccttaaacggttggtcagaagctgataagcagatccctttagaatattatcaatggtgtagcaaatgggcttccgaatggttgagagtgcttaaacccggtgctagttgtttcatatttgcgggtagacgatatgcgcataggtgcatttgtgccttagaagatgctggttttatatttaaggatatgctttcttggcaaaaagatgctgcggctcatagagctcaaaatgtttctgttgtttttaacaaaaggaacgatattataaatgcagaaaaatggaatggctggaaactaggtaatttaagaccgttatttgaaccaattttatggtttatgaaaccctatgcaattggagataccttaacagataatattattcaaaatgaagttggcggatacaacgaaagtgctatcaaaaacaatccccttttaaatcaagggcttgaaatatgttctaatatcattaagtgtaaaacggaaaaatcggacaggggattacaccctgctcaaaaaccgattgcacttatgaaatatttaatagaactaaccactataaaagggcaaaccgtattagaccctttctgcggttgtgggtcaacgctacaagctgctaaggaattggatagagagtacattggcattgaaataaatccagattattacaacacagtgtgcaaaaggttagatgattaaaacagaagtcagggaaaaattaaccctgacttctgttttttgcaataggaaaatgacttatttacgaaatgtcccccttggcgcagcctttaaagttagacttttggcatggccaccgggtggtttattttattaaattgtttttagattattgtccgctgttttgaataacgtcggttaaaacctttgcgtttgtgtaaatgatatagtccgttgcacttgaaccctcaagttccttgttgtctttatccaataacgaaaccgtaagggtaactttatagtttgcataggtaagaccccgtttttcaaactcactgccggtaagtatgctgtaatcaataggtatttgtattacctgtccggggttataacttgcgctgttccatttaaatgtgctttcaaatttatctttccgattttcagcaccgttggcagagaatgttggctttgtaatagttgaatttttaagataattacctatcgttttcccgttgtccaaaccgctataactgccgttatcatcctttttgctaaggcttaatgtaacttttatcttacttgccttgcttattaaatcagagcttaaatccgatatgtcataagcaccaagggtgctaagtttccactgtccgccgtcggtaatgccgtttaccccaagccggttaatgttgctgcctgccggggcattttcttccgtcttcacatagtagcttaacttggcatttaccgtttttgcggtgtaatacctgatgctattttcatcagccttgtaagatgtcgccagttccgaacttgcaagactgcctacacccgaataagatacagcagattttgcctcaaccataacgccaaattggtcgtcacctgtgacccttaccggcaattccgcaaggccgtttgtggtaaagctgatttccgcaaccgcttcaaccactatgccctcactgtgggcaaccataatttcacgaatgctatcgggatatgcaattacaggtgatgttgatatatctaagttggatacagttaatttgccactgtcttttaattccttatattttgcatcggttatctcatcaccctttgtgccatcagtttttttactataaattttaaatgtaacatttgcggtagttcccgccgggaatgtgaccgttgaacttgtttctgttccatgtgtaccttttacaagtttattcagttcggcaacaaacccaacatatagatttgaactgcctgcatattgcttaaacacatcgtgtccatttactgatttgttgttactatccgtgcccacattttgaatgaaagatattgtatccgtaaatgtggcggtaaatttatttttagagtctgaaagttctacaccggtattttgtgaactgcttccatcggtagttgccactttaacagcttgatcaaacaacttgccgattaacgcattaacagtattattgcccgttgacgttctattggtagccattgcgccattttcaactttgccgtcaatagcaacatttacaaagccctctgttgtttccggggttttaattgtaaggtagtactgctcctttaacttgtcgccctcgcccccttgttttggcgttgcacttgtaacggtgtactttgtcacacccgcaatagtgccgtcatagtaggcaaagtccgctgttgcaccgttaagcgtagctttaaatttgctgttttggagagatgtttttatagcttcgtcagttatcttgctcaacacatctttatccaattttataatatttccgtcggttgccttttctaccgttatatcaagcatatcggatatattattcagtttaaattcgtttccaaaatagtcactgagtttaatttgagcatcaccctttaccaaggcatcatcagccgccagctttttatagtaggacttattggccgccttatccaccaaaacaagctccgttcccaccgggaatttattgattgacgaaaatttaaattccaaactcttgtcatatccgtttgtcaagttttccccattattaagcatacgcacccagtcggcgctgtttggccggtatgtaaaggtaagtaaggcggtgttcttttcaccgtggccgcttaacaaatttgtatttttgtaattttccgtccggtagttagtgccgttttctatattagaagtaaatgtgtaatcaagtgtctttttaagaataatcggcaaccatacactgtatgtatctcctgtgcctgttccgcttatgtactgcacctgaataagtgtaaattggtcattgccgttatcatatttgccgctgtttgccgtaaatctgccatttttaaaggttatactcggttcgcctatcacaaattttgcacttgtcttattatactgatatgtgttgcaaatagggacaattctatctttactgttgtcaaaatatactgccctttggtcgctgttagtaagcagagacaacgccgttttaatttgttcgtcaacagacttgatgttagcaagtgaaacaacgataacagggaagttaccgctatattcactgttggtttgaacagttttatatgtactgctgaacacactgccgccattatcgctgttccaatttatacctttcgcagtatcaaaatttttggctatggcaagcatattgctatacttgggtcttccgctgttctttaaatccgtaagaatttgagaaagtacaggcacatacacattatccgccgttgttgtgccggatgtgccgtcgccaaagggatcagctgcactcactgttcccccatcttggctaataatacctttcatttgtccttccggttttttcgccaaaccggcggcgccgtccgttacattgtaatctgcatagatgattacatcattgcttcctaagctcgtattcgctttgttaccgtacattctcaaaggaagataacagtccttagtttgcacggcgattagtttaatgggcttagatgtattttcataaccgaaccatgtgcctatataaccgccgttgccgtaatccgttttattgttttggtaacttaccgcactgtatttttcatatttgctgccattccatagaccgatagtgttttcaatattattgtctttgtctgtcggtagtttaagcgcatttacatcatctattgtaatatttgttgtaggtgatccgttattattaagccaataacccacagcggtatttttaataagtatttcatacccataaacaggtacaccggaacttgtacctacaataccgccggcacgcatcttatcgcctacggaagcaataatgctgttatcaatagttatattttttattttaaactcatgcacggaattgccaagtttacctgcaagtccgccggcattccttttggaaattatcttagaatttttaacggtagaatttttaactgtaagtcgccccaaaacaaatccgacaaaaccgcctgttgcagatttatcactgccgccgttatctaatgtgtaaagcccatcaaccgtaacattatctattgtagtggttccgccattgtttgttctagcggttagaacgtttattgtgcctaacaggccgccggatctaagggcgccctttatacctacattgacaatatcacagttattgacagaaacctgtttatccggagaatgaaaattatcgacatagcccacaaaaccgccggcatctaaccccaaatttgtactgccggaagcgtctataaacactttgttcattcgcacattgctgatgctgattgtacttgctgtgtatcccaccaaaccgcctatgccgtaaatatcatcatattggggataaacactttcgccggcattatttcttgcaatttttgtaccgccacttattttcgtgataatttctgaattattaaaatcataactatcaccgttcaacttggcgtttctttggatttttatgtccgaagatctctgacatatacggccgaccaaaccgcctacaatacccgggccggttacacttatattgttatatgagcaatcgttaaataccatattgatattgctatcttcatttttgatattgatatttttattccataaaccgccaataaagccaccggttgcggtacgatttttaacgttattgtaattatcagtacaatctgctaatttaccgatatgttttacggtaaataaattatttgtatctccgccaagattaacattgttaaatgtcaaagttttattggctgtacccactattgtgccggcaaaaccgcctacaagcatggcagttgtggcctgttcggcatttaagctaacagtgcctttcagtgtcaggtcattaaccgtaatctcatttacattcggtatattaaccgcagaaaacaatcccatttggtgtggattccaactttcgtcactataagacttaatatccccggccaatgtaattgtgcggttgtttccgtttaggctctttaaggtaataagtcttgccgaactgtttttttcgtcaagccatgtataatttgtgcccaagctgcggaatgttccgccataatttgacatatcaatatcagcaccgagagtaattgtcacagcattgttgtatatagttcttgcgctttcacttgcatagtgccgaacaagatatgaatattttgtagattgattattatccgtcacaccgccccaatgagcatcatcttcccggttggggtttttgctgtcagttgttgtaagcgtgcctacagacgaataatctgctgtccttgttctgccacggtaataagcaccgtcgccggtattgtaagttgtaccgttataagtagccgcaccgctgtttacaatagcccctaaaagccaaagctgttgagcagaattgagggtgatactcttgttgtttgcatcataactcaacgtattattggtgtttactgcctttaaattaggtatcttatagtttttatttgtattatcaagtgtatagttttcacttgtttcacttgcggcatagccgtctaaaactctgcccacataagggttgcagtagtaatatccgctgtcattcgatgttgcaagtatatttttgtatttattttcgtttatagttccctcgttaaatgatacgcttgtcagtggttgtgtttgggatatatttttcaaaacaacaccgccgccggtatttcccacggtgcctccgacaagccctacatatccgcctatgggcaaatgtttaccccaactattcactttcagtgtgttatcggttatgcctgtaacggtaacattatcaattattgtgtcgccggctgtgcaatagcccacaacaccgccaaacacaccttggtcttgaaccaaactatttggcgaatccttatcaaagttatgacttgacggtgtaatcgtaatatttgcgtcgctgtaatccacaatcaaatctttaacaacagcgccggcgcttgtgcggacaataccgccaaattgatttattgtagatgtatctacatctgtgccatttttagttgttatttttatagtagggtaaattgtgttcgctccgtcctttttagccgcacctataaccccaccgctgaatacagtaatgttattacctgtatatgtcaaaccgccaagacccgtaaaatcatagggcatagttatgctgtaatcgttatttataggctgaataagatagtacgcattacgcaaataagctaaaattttgccgtcatcacccgtgttttcggatttctttttatattctttttttgtgctgtcatattcagcctcataccagtttttgttctcgtagatgtacataacatgcttatcgctgacgttatcttctatttttgtatgtgcggtagtgttatcatcataggaaatatcaaggacatgactatcaaaggtaagacccaaaccattttgagccgtaccgtttaagtactttgctattgcccggaattggttgccgtccgtaattatatacgggtcggaatatgtaccgcagccctctaaaattgaaaccgacatttggtttatatcaagttcataccggctatttgtcgcattttccgccatatatacataacgaatatagtttttataatttttactacttttaccgtcataaattatggtactgccatctttaataagtccccggtcggcgccgttttggccgtaataccacatttgattattaggatttctgccacccacaccggtgtcgccgttacctatttcataaccataagtgcactttgtatccgtaaagttatatcttccgtaacagcttgtggcatcagaatatttaaaggaattaagcaatgtagcacgggtgaaaattgtttttgttgtattgccgtatctgctgtcggctgaacctgtatcttttctcgcatcaagctgaatattagaaaaactaagtcttatatttgtaccgctggtagagcctacatcgccgataagtgaagaaccggcgtatttattatctataccatagctttcataacctttttgtgtcacccctgttacatcaagtgttacataatcactgattttgtttataagcaacggggcgtaatcatttaaagcagaatgttcgtgccgattataaacggttatgccgtcaagggttataccgttcaaaataacagttgaagtcgcactttggctgccgcttattgtgccataaacaagcgcaccggaattaccaccggaattaccgtcacttgttctgcccacagtgcctttaagggtcagttgattaacatttaagccgccggcaacattataataaacaccgcagtgcataaggtagtgttgattgatatttgtatctgttgggcatttattgcttgcattgtcctcggctgtgcaaatgcctttattatcaaaagtgatagttgcattgctgataggcacactcatagaaaccgggtagtagctgtaaccggttaggttgattgttcctgtaattgttgaaaatgtgttaccgctaaaattacctcgtatattttctgcccggtaatttacaagagcagtgcacatcaatttatcggcattaccggtgccggcttttatagcgtcaagattatagtaatatcttgtatttttatttacaacagaattttccaagattttatttttatatgtattgcaagcgccgcttaaatcaatgccggtgtggttttcgtccgttgctatggaaataacggcgttgttattacttgcattatttcttatactcttaccgcagatttcgtcaacattggctgttgcactgctcaatccgccggaaagagtaatctcaccattatttataacataaccgccgggcaaaatttcaagatacaatgctctttccgtagtaggcacgccgttgcttactataaagccggtaggggcggtatcgtttgtaccgcctgtgaatgatacaccgctgttataaactataccctctttatacactttccaatatccggcgccggtatttaccataccgccgaaagtagcgttatttgtataatttaagctcgaatttataacgataacgcccggatttgtactgccacctaatgtaacagttgcgttatcccagctgtaacccaagaaaccgccggcagtaccggtagtatctgattgtatctcaacaccgtttaccgccatatttgttatattcagtgttgttgggttttgggcatttgcaacaaatccgcctatttgtgcaggtttacccgtattgcctgttatagacaatgttgatttttggtttccatcaccgctgcccaatgtacagccttttgctgtaatttgcgcaccgtccgcacagcccacaaaaccgccgacaacagcatcaccgctgttttgcttaaccttaatatttatattcgactttaccgttacattgttaagggttaaacctgatgtttttgcgctaattccgccgatagttacggtttgtttggtggcttcggcgttaaaattgccgtttattgttaaatcgttaatagttgccccttgcgttaatgtcaaaagaccgataaaagtgtgatcataaatttggccggaaccgtcaccctctgctgttgtatttttatctgtacggtagccgtagggctcgccgctgttaagggttatagttttgccattgccgtttatcgtgcctttaaatcctttagttgttgttgttatggtatcacaggtaagcgaataaataccggtgccggacatatttatatcattgtttatatttatttttatttctgaagaatataaatcctgactgccattaccatttataagagcgccgccaaaagtacagctcatagctatggccagggcggcaaagtcctcttttgtgcttatattagcaactttattatccacaaccttattagttgtaactgtatggttgctctcattataggtaaatgggtatttattattttcaaacccatcaaggcgcacaacctcaccccagtcgccaagatcgcttattttctgtggtgttgtttggcgtataaatgtccatcctttttcggcaaaaaccaatgagccatgcgttccaacaagctggcctttttctgttatgccttctttgattgtaacatcacttaaatcggttttccccgaaaggcgcacagcgccgccgcccatgtacgcaacaagaccggcatttctggtaacagtggtatttttattaaagttaccgataacttttatatcgcaaatatctatcattgagttttcatttgaacacccaacaacgccgccgatgttttttgcattggtatttgttgccccattatccatatccgcaataacattattgacattaaaataaagggatttaccaccgctcttagctgtttcacctgccacgccgccgtaattaaagctaattgtctttccatttgacgaagttaaggtttttatatcttttacaataaacgatgaggccattttatcgcctattctgtctacacctatcactctgccgacgatgccgccgtaatgttccacattgctgccgagctttgatgtaacagttgtcggttcggctgttgtaccgtcactatttttaccgaggtctgtacctacgacagtaaccgttcggttttctttaatatctaaaatgccaaatacgccgcctacaacggttattttttccttgccgctaaggcttacatctatatttaacttggacagatcaaggctaaagtcattatcttttgccgtatagtagcctgcaaatccgccggcaaatacttcggcactgcctgttgcacaaattgtgcttgtaatgttgatatttttatcaggggcaacaataaaatttatatccgtagcactgccaacaataccgccggcattgccacctgttacggttacagtttggttgagcgttatgttgtcatttatattgatttttgcatctttttccgttgcaccgactacaccgccggcattgccatttgttgcggttacagctttgttaatttcccctgttccgttgattgtaaggcttgctccgcttgccatatggcccactataccgccggcatcggaattatttgattttacttcataaaggctgttttcggtataattgaaagtgagagaagagctcgtctgtatttcattgcaaatcgcccctctgtaaccgtcaccggaggaaataggttgaatgccgtcaccaacagttaattcgccaatagtaattgccacattggcatctgcacccaacacacctattacacctgcggaagctgtactgcctgtattatcatttgctttcttggtttgaattttaatattccaatcaccggcaatagaagcatcaccattatatacaacattccgtgcaagcaaaggaacagaatccgctgtcggtgctttatcagcaactaaaattatgttacttacacttgctttatcggaaagatagttaaacaaactgccgggcaaggtcattgttgaagcatccccggtaccgccggcgtttgatatacttccgctaaacggattatccttgtcaccaagaccgagaaatttataagtataattattatgtgtccgtgttgtttcggttgtaataataaatccggctgtaattgatatttttttacccgcatacaatgccggctttacattagaaagcaaaatcatttgctctgctgaacctattgaaatagtatccgggtttacaccaaatccggcctgtgccaaagttaatgtcggtgtctcaacggcctgtggactaactgtatcatttgtatttatcgccgtatcgtcagccgcagggtcttcgtccattgtattgttttcgtccttatttgcttcatcggtgttgccgttgctgttctccgtattattattttctttatcgtcggtaattttttcatcacttgacgaagaattatcgtcggcattttcttttgaactcgccggttctgaattttcggtattttcctcatcacttgcccgtgaagaactgtccccggccgaagagcccagctgccgaggcaaatctgccgccgagtttgcatccaaggcataaacaggtatgcaatttataaatatagcaaaagctaacaaaaatgatatttttctttttcgttttattaaaaattcaatcattgattttttcctctgctttaaaatttaaagttagtttgcggcagttgaaccgcctgtgccgccggaacttgatgtgctctcggtaaaagagaatgtaacataatttttatttttttgagtttcgttatctaaaacatataccgttttatcagaagggtcccacatttcccctgtgggctttgatgtcctgtaaaattgaagaatgaattctttatccgttgcaaagacatcaaaagttatcgaattgttagttttatcataggtaacatttctgttattttcagtccccggtttctttttatttgatatttcctcaacaaaaattgggcttatatccacataatctttattccatgtaagggtcactttgccgtccttactaccggcaagcctgtaattaaaaccgtcaaggtcgcctattttattattttcagcggtggcggaagtaacttttgcatccgagaatgtacctgtccaccgaacatcagtattggcggaaatttcaccgaattcaaatattttgcaaagcttataattcttggttgcgtcgtaatcatttggtagggcctctacctttaattttatatctttataattttcattaagagttattgtataactgtttgttgaccgccgagagcttgaaagagttttaccgctaatagtcacggggttatttgtatcaagtttatatgttgttgtaccgtccgaaaccgacattccgcttaacttagccgtatcggtaattggcgtgccatttttatctaaaaccgtaacagtaagtgtataatttatatttttatcattccataagctgttattggataaatcaaagttatttacggttacaacaaaagagcgtttaaccccggctgtttcgccatccgaccgggtaaagtttatcaattttgacgcaccgtaattgttttcattttgattaaactttgacaaataatttgaagaaaacagaacatcttctaccttttttgaaagctgaacaaccctttttacattttgaaccgagctgtatgcggcaaaacccacacgaacccccgcaaaggttgaaacggcaaaaagcactgccaaaagcaatgctcttagagatttattaagttgatttttggcatttttcatttaccaatatctccctataaaaattatcagtttcccccgccttttgcggaaacggaaatatacacaatatctgtttctttatcctcaatatcgtctatatatttgtatttgtcatttgctttgtcttcccgttgacctgctggtctttttgcccagctgacggttaagatatagtaatcaacaaggtcggttccgctgcccaaagtagtgtcattgcttttccaatacaaaggctcggcgttttcttggatttttgaatagctttcgtatgtttgactgtgatatttatcatttgcaaggattttatcatcggattttttattcaaatatttgccccggacagggtcagggtcactttttttgtacttatgtgttatattatctgccccaacatatataacagtaccgctgttatcttccgttgccttatacagcgtataagtaaacggtatatttgtcgtatgccctatttgcaatatatagtttgtcggcttatcctttttgacagcaataacataatctttatgcgtcacgccgtcaccggtggtgtccacggtgcctatttgaaaacggcttgcatcttcaccgttgccggcggccaaatcaagccggatactggccttaatttttgccaccgttgaaagggaatagctctgcctaaaccaagcataagtaagccctgccgccaccccaagcaggcacagcagtaagactatatatataatttttgattttcttttttcttccatatcggtttcctgtgcttaattatccattgcggcgcttagctgaacaagaatatactcgccattttcgcctatgtatttgtcggcgttgttgtaaacggtgtaaattacattgtatgtcgtttcgtcaatattgccttttaccatcttggcaatttcgccctttaatgtgccatcaatcgggttttcaaagtatttaccgtaatcgtttgccaattctccggctattgcacttctcaaatcgtcggtaaaaagcgtttttttctcgtcgttacttaatttactgttaccgtccggcaaaatcatatcaccaacataataaggccaaacccaatagattataactttcttttggttttcacctacatcggttgaccgtttcaaaccggttattgttataccctcggcagtggctgtggcagtcaacggagcagttaacggatttgaatacttttcaccatcataagacgaaaagaactgaatatgcccggacagcaatttataaaatttttcggtgtcaaagccatttcctttgcttgacataggtaaatagccactattgtctttataataccctttaacggtcagcgtaaaagaaaattcatgtgccgatgtatctttcggcaaaacataaaattccaatttgccgctgctgcccggctctattgtaccattttccgtattattttttaaattttgctcgctactcataacccaaacaatatcgcctttgccgtttgaagtttttgtgcctgttttgttctcgctatctttccaactgtcaccgtcctgcacaatatcacccaatattgattttaatatgtcatcatatttgccggttgtacctacggcggcaagttcaaattttctgtcggcagctgccgaaaccgttgcgccgccggcctgcactcggctgttgtttacaaaccatgcggcagtcaaaagtataaaggcaaacacagcccctgcaagcaaaatattattttttaaaaacaggaacaagtgttttttaaaactcttttcgttttcccggttttcgccgtaatttttgttgtccaacagagctgtgcctcctttcacctatatttaaaaagccataaaaatcatatttatacatatataattatatatcaaatgttgaaaatttcaacattttttcatttaaaaatacatatttcccttggaaatcggcatatttttcacgagtttttcgcacaaaaatgcccccggaaaaatccttttccacaggggcataaaatatcaaattaaatttgcacagccggcttaattattcgttaggcgtgccggttataaccttgcccatgttccaaagttcggctgttttcttggctgcgtcaagtttttcgtcttcgctgttaaaatctaccgacacagaatgacaaccgcattcaaggcacattatgtaaaggccgccggcttcttcttcaagtattccgtttccgccgcaaatcgggcaaatttccaaatccaaaaattcttgcatatttaatatctcctgtaattttttaatctctcgttattatagcacattttgtccttttgcgccatagaaataggcttaaccgaatgagaaacaacaaacttatttcacaggcaattcaaaccaaaaacaagcgcctttgtcctgactgttaaaaacaccgtattttccaccgtgagccttgataacactgcggacaatggaaaggcctatgcctgtgccgaccacactgcgaatatggtttttatcgtttttgtagtatctttcccaaatgtagggcaagtctttttccgcaacgccctcgccggtatcggtaacctgcaatgttgcggcaccgtccttttgggtaaggcttacatatacttttttatccttgccggtgtaatttaccgcatttataagcagattgtaaatacattggtttattcttgtttcgtcggcgtttacggttaccttctgccgaaggtcaagctcaaatgtgtagccctcccgttttaaaagctcactgagcctgtcggcaacggaccgcaccgaccgtgataaatcatagggctttttctccatgggaattgccccggactgtatttttgacatatccaaaacatcatttacaaggcttgaaagccttttggtctcgtcaatgataacctgtgcgttttcgctgttattttcaccgggtatatcacgcataacctccgcatagccccctatcaatgtcaggggtgtgcgcaaatcgtgtgaaacattggctataaactctcgcctaaggctttctaccttgccaagctcccgggaagtaacagtcaaagtttcggcaagttgatttatctccttgtagccgtgggcggtaaagtttacatcgtaatcccctgtggcaagttgttttgcaccccggttaatccgacttataggtgttgaaattcgccttgaaataatcaccgccaaaataacggcaaacaaaatcataacaacagtaataatcacaagtgtgtactttattgtaaaaaccgtagagtaaaccggggtcagctttatatttaaaagcagatagccggtttgcgtgtctgacaaattgacctttttgcaataaatcattgactgttcgtcgcccgggtcgaatttgtactccacggtactgcccatttcatctgttttaaaagggactttttttgaatatattccgtataatctgccgccgttttcgtctgtgctgaatataatatcaagtattgatatataagatattttgtgtatcatacaattctgcaaagcctcggcggaatagaggatctgtccgtttgaagataccaacatcacgcacacatcgttttcgtcggctatggtttctattttttcatcccgatcttcttcgctcaaaacggactcgatttcccgtgaaaaggtgtttatctgcctaagccttatggcttcataaattccgggcaaaaacaccacctgcataagccacataagaccgaccataatcccgcaaaagccggtgagatataaaaatatcttccggcgcaatggcatttcatctatttttgactttaaacttttcatatcagtcttcaaatctgtaacctgtacctctcaatgtaaccacataagaggcgtaatctcccaggtgttttctcaaaagttttatgtgggtgtcaagggtgcggtcatcaccgtaaaaatcataaccccaaacattggtgatcagtttttcccttgaaagggctatgcctttgttttttacaagataaaacaacaagtcgtattcctttggagaaagctccgcatcaacgccgtctattgtaacgcgccttgcggtaaaatctataacaagaccttctttttcgtaaacgttatgtccgtttgcactttgccttgtccgcctgcgcatgataacatcaatacgcatcataagctctttcggagaaaagggttttacaagataatcatctgcgcctacttcaaaaccgtgtattctgtcatactcctcgcctctggcagaaagcattataaccggggtatccttgtctttgcgtatttctcgcacagcggaaaagccgtcaagttccggcatcataatatccataacgattatatcaatatccttattgcggcatatttcaatcgcctgcataccgttttcggcctcaattacattgtggccttcaaattttgcatactttgctataagggttctgatgccctcttcgtcgtcgcaaaccaaaatattatacatagccttttctccttttatgatttattgtctatatattaccttttcaatttgtgaaattgttggaaatcccctgaattttatgtgaagaattatatttgatatactttttaaccctattggcaatcaagccgagatttatatgtccttttcccaaatttcctcttttacgccgttgcccacttcctcgtcgtcataggaatcggtaacggtaaagcccagttctctgtacatggttctggcaatttttaaaacgctgtatgtggaaaaatacaggtgattgtaacccatttcttttgcttttttcatggcggtggtaaatataagtttgcctacgcccctgccccttgtaaaaggttccacaaaaaagtatctcaatctggcacgacccttttcctcccccagcaaggttattgtgccggcaaacttgccgtctgcatgggcaacaagcataaagtccctgccctctttgtaaattgatgggaaatctcctatgagttttgccaccatatcgttaaaaaagggtttaaaaccgtattctccgtcaaaaatttcggcgtgtctttttatagaataatctatatcttcctgtgtaaaatccgtggtgagggttacgccctcgatttctgtttttgtttccatttttattttctcctcttatacttttcgccccgggtagggtgctttttcttttttacgctgtaaccgaatgagcccaattttttaccaagtgaaaaatattccccgtgagcatatgccaaaagatgagcctttgacatatcaagtctgccgtttttgtcaagcaggctttcgtccacattcaccccaacaatatctgcaatgaacatatgatgtgtgccaaggggaataacatccgtaactttacattcaagatttataggacattgagctatggccggggcggatagatttactgccggttcaaccgtaaggccgcattttgccagtttgtcctcttttgccccggtgcggcaaccgcagtaatcaacggcttttaccaaattatccggggcaaggtttattacaaattctccgctgtcttttattaaattgtaggaaaacctctccggtcttacgcttatatatgttttaggcggaattgtgtttataatgcccgaccaacctatcgttaaggcattgggtttttctgccgttccgcagcttacaagaacaggcggaacaggcgccaaaagggcaccgccacgccaatgttgttttgccatagttacttatcctccctgttttgcttttattatacaacaaaatatcggaaaataaaatatttatcttattgaatttacctgttttgggtgttatactttaccctatggaaaagattaaaatttactatgccgacaatgacattgcagtgtgcgaaaagccccgaggtgtaataagccaagaaagccccaaacccaatatgccacggctgctgaaagaacaacttgccgttgagacaatttacacggttcaccgcctggacgaaaataccacaggggttatggtatatgccttaaaccaaaaagcggcggcggttttatcggcgcaaatacaaaccggcggctttaaaaaacaataccgggcagttttacagggcaacttgccgggaaaagccggcagacttcaagatttgctgttttacgacaggcaaaaaagtaaatcgtatattgtaaaaagacagcgcaagggggtaaaaaacgcgagtttaaactatgaggttacagccgtaagcaacggcttaacatgtgtaaacatagatcttgaaacaggacgaacccaccaaatacgcgcccaatttgccaacctgaaagccccggttttaggggacggaagatacggcagcagcgaaaaaacatatattcacctacattgcagaaagatagaatttacaaaaccagacggtgaaaaggcggtatttgaaagccctgtgccttgggaaaaagaattttaacaggtgcaataggtaataacaataaaaaggcgagatttgcgttttgcaagcctcgccttttactgtgtctttaaatcctaaccggattattcttcgcacacttggaaaatataaaatttcaaataatagctttcgtccgccgcccagagtatcggatgatccggtgcctgtgtgcggaattccacctgtcttaaacgcttgtgagcgccgtgggcagcctcttttattgtctttgcaaaaagctccgggtccataaagtgagaacaggaacaagttacaaggtagcctctgtcctttacaagttttaaaccacgcaagtttatttcacgatagccttttaccgcattttttacggagcttctgctctttgtaaaggccggtgggtcaagaattacaacatcatactttttgccctcttcttccagttttggcaaaaggtcaaaaacatcggcagtcataaacttaactctgtcctgtaaattgttcagctgtgcgttttcccttgcctgttcaacggccaagtcggaagcgtcaactccaagcacttcttttgccccggcgtagccggcgtttaaggcgaaagagcctgtgtgtgtaaaacaatccaaaacggttttatcttttacaatgcgctgtaccgatttacggttgtttttttggtcaaggaaaaagcctgttttttgtccgtcccgcacatctacataataatgcacgccgttttccacaatttcaaccttcgtgtcaaattcccggccgataaagcccttgtatctttccattccctcattttggcggactttggcgtcgcttctctcgtaaacgcctcttacggttatgtggtcctcggccaaaacttttttaaggcaatccaaaatcacaggctttaatttatctatgccaagggcaagagattctacaacaagcacatcgctgaacttgtcaacaactatacccggcaagaaatccgcctctccgaagattatgcggcaacttgaagtatctatggtgtcttttcggtaattccaggcgtcacgaacccttttttcaatgaatttttcatctaccacatcgtcttttttgcgggttaaaagccttacggtgattttgctttttgtgtttataaagccgtagcccataaaataaccgtcaaaatccaaaacggccacaatgtcgccgttttcaaattctccatcgattttcgctatttcgttgtcaaaaacccaaagcccgccggctttaagagtgcgtccctggccttttttaagtataactgtcgttttgtacatatatttctccgattatctgttttcttcaatggctgtgattttgtcaattcttctctgatgtctgccgccctcaaattccgttgagaggaagatgtcggttatctgtgccgcaagacctgctcccacaactttaccccccattgcaagagcgtttgcgttgttgtgcattcttgtgtattttgcgctgtatgtgtccgagcaaacacaacagcgaatacctttcatcttgtttgcggcaatggaaatgcctatgcctgtggaacaataaagcagggcaaaatcacactcaccggactgtactttttcgcaagctgccttggcaaaatccggatagtccacactgtccgtcgagtaagtgccacagtcaacgtactctatgcccttttcttccaagtgtttttttatttcctctttcaaagcgtaaccgccgtggtcgcatcccagtgaaactttcatttctttaaaccctccgttttttctttcatttctctctctgcctgagaaagtcttagataacttggggaaagatcaaaatgggtctttccgccgtttttgtcaaattcttcttttgcaagcaaacaagcccccatggctatacatggcatatcggttttattggactttaccgccggtatatcgccgtaagttttgtagcaaagcaccttgccgtcccccacaaaataaacattcttttccgcattttctatatacggtttcaaagcgcttacatcggcgcaaaaatcctcccggataacattttcgccatccattaccgcccgataaacctgattgcgccttgcgtcaaaagccggcacaataattccgtcaaaatcaacggattttgccaaggctttaagggacgaaaccccgatacaccgggtgttatttgcccgtgccataccttttaccgccgcaagacctatcctaaggccggtaaaagagccggggcctatacacggtgcgaacaagtccacctgcttaaccgtaagaccgcacacatcaagggcgttttttaccattggcataagattttgcgaatgggttgtatttgtggcctgtacgcaggtgtacaaaattttatctccgtcgcatatacaaacgcttgactgctttgaagaacagtccaaacctaaaataatcaaattttaatcaactcccgaaattgtaatttttctgtcggtgtcacctaacttctcaaaggccaccgtaatgtgttcatcgtcaaaaaagccggctatgttttcgctccattcgatagccaaaaccccgtcataatcaagatagtcatagaaacctatattgtacagttgatcctcgttttcaatcctgtacatatcaaagtgaaaaaccgaaagaggcctgccctcgtactggtttactatggcaaatgtagggcttgtaacccgggcttgtatgccaagtccgtcgcaaatgccttgggtaaaggcggttttgcccatgcccagtcccccggtgtaaaaaataatgtcgtgatttttaagttttgcccccagccgcctgccaagagccaccgtttcttcttttgagtgagttatgtattccaatttttctcctcccggtttttaatacatatatgataacacaaaaaatgtttttgttaaagcgtaatatttaataatttaatcatatttttatggaaaaatattaaaaagtgtgttttaatatagagggtaacaaataatttaattgacttttacggagaaataaattgaacggtaatcacaataatttttttaaagacacggatttggtctttttgtcgatatgcgcagggtgcagttttatgtctgtgctgtcactttacgccatatacactcacatgaatttaataacatctgtcagaactgttgtggtgcaggccatagcaagcattatcggcgtagctttggctgttttaatttcccacttcgactacaaggaatggtgcgagcagtggaaatggcactttatcccttcttgcggccttatgattttgacgatgtttatcggttttgaacctcccggcacaacaaataaggcttggatacagctgcctttcggcttgacattacagtccagcgagattttaaaaataagcacgatacttatgctttcctattttcttgaaaaatacaagaacaacataaacgaaataaaaactttgcttaaactgatagccatcgcctgcgttcctttggcttttgttgctatacagcgagattccggcacgctgctggtctactgtgcaatggttgcctgtatgttttttgccgccggcgtaagcggcaaatttatagccatttgccggggcggattgttggccttaagcccttttatttggtcaaaaatggacccgtacaaaaagaacagaattttaggtctttttgacccggacaaatattccacaatcatgtggcagcaaaatatgggtaaaatttccataggctccggcaggattttgggcaagggattttttacggataaccacaacgccacaccactggcttacaatgactttatattctcctttatggcggaatgtgtcggctttgtgggcatagttatagttttgggtcttattatgttcctttggatcagaacattaaaaattgccggcagaagccgggatttaaggggtactttcatctgtgtgggtgtgttcggtatgcttatggctcaaacgattataaacataggtatgaacctttctgtcttacctgttatcggggttacattgcccctgtttaccgccggcggcacaagcgtaatagtcacatattgtgccatgggttttgtgctaagcgttgcacgccacaacccgaaaaccctattcaattaaaaatcgagccgcaaggctcctttttttgtactgtttttcctgtatttgcataaaatgtaataaattaccaacaatggttttaacaggatattcaaagctaaaaagtta

SEQ ID NO: 174 - DNA, 17516 bp, Unknown
  16S sequences of unknown bacteria
ggtggcggcgttcgagtcgattttcatcaagagaaaatcgaccaagccgcccgggagttcagggggctttgccccctgacgcttctttccacctcccctatttgaatcacctggggcaaatgcgtgggcatttgcgggggccggggcagacttcgcacgtttgtatccacgctcaaaccggccctttgaaagggggtgccaaagcacagcctgtgctttatggtatgagcgcataaaaaagagagcctatccgatgccgtcttcggataggctcttattcagcatgatttacgaaatgttattaataatcaaaaatagactttaagtattcgctctcacggcgcggagagaggccccgccgccaatccggcacggcctcgttcaaaacggtccaggtggtgggatggaacgccgacgcggggttttgcagaatcccctgtatcaccgcgtcggtccggtagctcatataccatgcggaacgggcggtttcgttccattcttccaccactttccgtagcttttgcaccgaaagtcccccaattcatgcaaattcatgtgtataatctgatatgtattatacgattggtaataacttttaactttacagtccgaattcgccctcgtagctcaccaggctggcatccaggacaccgtccacctggaggaactggtcgatggtggccatctcgttgtccttcagggagatctcgagggtgagctcggcgccgtcccgggtcatggtgcgggatttcacccgatggcggggcagggttttgagggccttagcgatattggcggttttgtcgggctcataccgcagcaccagcagataggggctttgcaacttcttgtggaacagggagatgacaaaatagagcagccccaccccgaagcaggcgaaagcgccgaccagatactgcccggcccccgtcatgatgccgcaggtgatggcccagaacatgaacaccgtgtcgaccgggtccttgatcgcggtgcggaaccggacgatggacagcgcgccgaccataccgagggagagagcgagattggagctgatggtgcggatgaccagggcggtgaccatggcgagcaggaccagggagatcgcgaagcccttggagtagagcaccccgcggaaggtctggcggtagaccagcaggatgaagatgcccatcagaaaggcgacgccgaccgacagcgccatctggccgaccgtcacgctttggaattgttcgagtacgctctttttgatcatgtccataaaacccatgggggatcctcctcttctatttcggccgggtcactgcaggccgcggcacagttcatatttggaaatggcgcatcgggcagcggacaggggccgcagcagctgccggacggcatagggcagagcatcgtcgtacttgacctccagcaccagccggtcccccggcagcacaggcagggtatagggctcggggctgaacaagtcggtgcggtactgtcccgagtgcaggtcgctgtccaatgtgatgcggacatcccggaacacgtacgcctcccgcatataatcgacgatgacggtggggcggagcagacgggtgcgggccttgagatagaaattccgcagcagggggtcgtcgctgtcccacagcggccaggtgtcgcccgccaggatggcgtcagcctgttcccgggtcagcggcgcgctgcgcttccgggtcagggagccgagcttctgcttgagctcgaggcggatgtagcggtcgtccatatcgtaaaagcggatgcggtatttctcccgtttttccacgccttcgatcttatcgaagaggccgctctgctgataatcgtcgaaatagaggctgcggatgaaatagcgtccatcctcccccgcgtggccatcccgtcccaaagccgcgcgcaggcgcccctggagcatccgggcggaggcggtactgataaagaatttttcttcgtgacggaagccgtccatcggtacccctcctttatccgaacaccgcggcgatttcctcgtcggtcaaggcgaggatggagcggagctggctgctcgtgcgcacttccttctcaagcgtcgcctgccgtccccggacaaaggtgcgcagcccctccacccgggaggaccaactgccggacgagccgccccatttatccagatcccgaccgatctcgggtttcagaatctgctcgaagcggtcgatatgcgcgatcaggttatctgtggtgaacacgttttgcatcagataggccatccgttcgatgaaggtggcccggaattccggatttttgagcaggcggttgaccaggacggtgctcagcgaatttccggcgccggtcccgtccgggttgaggatgtgataaaacccataaggcaccgcggcgttctggaaaccgaggtccacgtcgtacacgatccagtggaagcggccgccgtcataatcgggggagcggaaaaaacggatattgccgctgtcctgattgccgcaataggcctcgctgatcaggtagtcgcagtagctctgtacattcatccgttcggtgacataccgataattgccgggatcggccatgtcgtgggttttgacgaagttgagcagctccagatacgccgcgtcgctgcccgcattgacggtccggttcccctggaggagatccacggtgtcggccgacacaccgcagtgggaggcgacataatcggcattgagccgttcccggatatagcggacgccgtaataatccccgttcaaatacatcacgaccggccggtatgcctggacgaagccgacccccgcgtcgtcgagcacgctcgtaaacatcgcgtccttcatcacggtgaggaggcggtcttgacccgaggtgcgcaggatcaggttatcatactcgccgaagtcccggctgtcgaagaccggatagtcgagggaggatgttccatagcaatcccggaaattgagcgctagggatttcttttcatagatccgggacatgccgccgaagactttgaggccacaatcggctgaaaaaccgggatcctccccgccagggccatttttgggaagcagctcgacgtgagcgtagcgctcccaatcctgaaaaaagttggctccgttgtggggataggccggtgaacccccgcccaggacgaggatcccgcggtcgtgactgaacaggccgtcaggatcggaggtgacgctgacgacgtccatggtatggttctctcctataatataggaaaaggtggagcaggcactcggcaccgcgcctggctcgagcgaaaccgcccgcagggatgcggatttatccagggtgatggggccggtatagggagtgctcgacgacgtgggcaccgtgccgtccagcgtataatacagatgctcgccgagaagagaaacctccagcgggcccgccgcgtacacccccgcgggggtcgcggcctccggggcggaggagaggcggcgcagcccacctgtattggctccgccgggggtgggggaggaaaagtagaagagcccgggttccgtatccatccggccccggctgacgttcataggcaggccggtgtaggaaatcccgtcgaggagccgcccgtccgcgtcatacagatagacggcgccgtcgccgttgaggcggaaattggtctggcggttccgggcatccggcaggttggcttcgttgcagtaaaataccacccgcccacccggctgcagggtgacgtcgggcaggggaaaaaggccgggcagctccggatcgtcggagagaaagaggccggcgaggctgaccggagcatccgagatattctgcagctccacccaatcgctgcggtcgatggcaccgaccgtcgtgttgcgggacatgacctctgagacccgcaccgcgctttggcggatggtgtccaccctctgcgcgtgtgcgcggatcccttcctcggtattgggataaccgggggagggctcgcctaccgaccaggcgccgccggcatcccgcaggagtgcggcgtccgcggcgaggccattgacctccacctgatcgatcaggacaccggcgggggtggagaggtagagggtgtcgctcgaccggttgatcttaaaaggtgcgtggagctcttccggatcggcggagtgccccttgtccgaggcgaagaccagcacggtttcccccggggccagggtacgttccggaaactgccatttgaggggttcgtccgggtcgttggtcagcccatagcccttcagcgcggccggttcatccgaacggttgacgacctctatgtaatcgggataggccccgtcggcatccgggagggtcaacgtgttttgggccaggatttcactgaggaacagggcgtcggatgtcccgacccgagtggcgcggtaggcggcgtagccctcgtcggtgttggggtatcccggcgtgctgtgcgccgactcggaaaagcccgcggtggtccggacggccgagacgttcgtctgaagcggaatagtgacggtggtatcctccacatcgcccgaggcgtccttgagggagagggtttcgccgccggccgctttcagacggaagttggcgtgcaggggatccttgccgtccccatcgcagaaaatcaccaggtattcatccgcttccagggtacgggcgggcagcagccaggtcgtattgccgtcggacagcgcccagccggcgagggatatgcgcgagccggtggtgttatgcagctccacccagtcgctgaaaagcccgttaccgtccggataggctgagccgttgctggtcatgtattcggatatttccacccgtgcggccgggacggttccccccgcttcgatcacagggccggaggaaaagaccgtgcccaagacgaacagcagcagcagaccggccagggaagcggcgatcagggccatccggccccggacggcagaatgagcgaaaagggtcggaaaacaggcggtttcgacaaattttgcggaaaagggcgcaaaacagccccgcaaatgcggagtacaccccacgtttatgtttagtataccacagaaagaaccgatccgccacaagggaagatcagtcaattttcataaattatcggaagaaattcatgaagaaggacgatgccgggtatattaaaaaagagttgtgacatctggcgttttatgctaaaataggtaaagtttcacataaatttaagggcacgtgaaaaagtgcctgtgggtaaaggccggtgaaaagatggcactgtcgatgatcgaacagatccgcgaagcggagttgcaggcggagcaggtggaacaggacgcgaaggaacgggcggaccggatcctccgcgaggccgccgaaaaggcgggcgccctgcagaaagaagccgccgcgcaggcggcaaaatcacggcgggagatgctggaacaggcacaggccgaggccgaagccatccgggcggaggcgcagcaaagggcggagacagaagccggggctctgtcgcagcaggcggccgtccgccgggaacaggcgcagagggaggcggccgcctgcctgaccggggtggaagatctgcggctgtgacgctaaagatagcgcgtcgtttcccgccggttttgccagcgggctgacgggccgtcccccatccctttacggaaattcacaggacggcggaggtgtgttgtattggcaaagatgcagatgatgcgagtcggcatggtggccctccggtccgaccggaagccgctgctggaggccctgcagtggatgggggtcctggacatcgagtccgcggcggcttccgaggaaacgcttccagaggggttcacccgtccggatacccgcagccagaccgcctctttcgaacgggcggcggcggtcgcggcacaggcgctcgggatcctcaacgaagccgcgccggagtccaagggcctgctcgccggcctatcggggcggcgggagattacggcggaagattttgaacagacggtggcggacagccgggagatcatggatctctgccatcaggtgctcgattggcagaagcggagaacggagtgcgccgccgacatccagcgcatcagcacaagcctggagcagatggccccctggcagtcgttggacgtacccttccgtttcggcgggacgcggaccacggcggctttcattggggtgctgcccgcccgtttcagcgaaacggagctgcgggacacgcttgccgggaaagagccgggcgcggcatttgaggtggaagtcctgcacacctccccagagcagacctgcctgttcctcctctgccggagggaggacgcggccgcccttggccagacactccggtccatggggttttccaggccgccggttacggcgggcacctccaaacaaggaatgctgccgacggacgaaatcgaccggctgcaggacagacggcgggccctcgaagaggaaaaggcggatttgacgcgtcagatcgaggaagcagcggcgaaccggcgccggattgaaaataccatcgattattacacggtaagggccgagaaataccggatcatcggggagctggggcacacgagacatacctttctcgtcaccggatacatcccggaagtggacctgcccttgctgaaggaccggctggaaacccggttttccctgctgctggaggcggaaccggctgaagacggcaaagcgccggtcaagctgcgcaacaacgcctttgtccggccggccgaaaccattaccgagatgtatgccctgcccctggccagcgatatcgatcccacaccggtaatgagcattttctattacctctttttcggtatgatgctatccgacgcgggttacggcctgctgttggtcttgggcagctggtttctcatcaaaaaatgccgtcccgagccggggatgcgccggaatcttcagctatttttctgctgtggggtggcgaccatcttctggggcttggccttcggcagttttttcggggatgcgatccccctcatctccgggacttttttcgggcatgaggtcaatctgccccggctgctggatcccatgacccaggcggtggagcttctggtcctcagcctggtgctgggcttcctccagatcatggtggggatgggctgcaaattctatgtgcagtggagaagcggcgaccggtggggcgcggtgttcgacaccggcttttggatgaccgggctagccggcatcggcctgtggctggccggcgggatgctgacgccggtgctggcgacggtgggaatgtggaccgcgatcctgtcggcgctggggctggtgctgacggctggccgggcgaaaaagggaccgatgcggttcgtctccgggctcgccagcctgtacgactccaccagttatgtcagcgacctgatgtcgtattcccgcctgatggccctgggattgaccaccggcgccatggcctcggttttcaataagctcggcaccatcatgggcggcggtgtcggaggggtgatcctgatgctgatcatcttcccggtcgggcacgccatttccttcggcctcaacgctctgggggcgtatgtccataccatccggctccaatacgtggagctcttttccaagttctatgagggcggcggccggccgttccggccttttgccctgcgcagccactatatcagaatcaaggaggaaacaaaacaatgagtctgggaaccattttggcgctgatcagcgccgcgatcgcgacggtgttcgccgggatcggttcgatccgaggggtcgggatgtcggcggaggccggcatgggagtgctcgcggaggatccctccaagttcggcaagctgctggtgctggagctgctgcccggcacccagggcctgtacggcttcatcgtgtcctttttgatcctgatgaacatcggcattttcggcgggatcaacgcgaatatcgccagtgaagtgggctggctgtatatcgtcgcatccctgcccattgccatcggcgggctgatctccggtatcgcgcagggccgggccgctgtggcgggcatttccctgctggccaaacggcagagcgagttttccaaggcgatggtctccaccaccctggtagaaatctatgcgctgctgtctttcctggtctccctgctgtcggtgctggccatcagccgcctgggctaatccaacgcgaacggaggaatgaccatgtcgggcacgcaggatatgatcgcgcgcatcctcgcggacgccgaggcggagggagcacgtatcgaagaacaggctcggaacaaggccggagcccttctgcaggaggcaggggaacaggcggaggaatcgaaacggcgagcggctgaggaagcggctaagcaggcggaagacatcgtgcgttccgccaggtcggccgccgagctcatccgccgcaatatcctgctggaaaaacggcgggggctgatcgcggacgtcctggacggcacggtccgggcgcttgcggctttgccggatgaaacgtatctgccgctgcttctgcggctgtcggaagcggccgcgaggacgggcgagggcgtgctgcgcctgaacgcgcgggatctgtcccggccggggacggcggcgctgtcccgggatctgggcggcggccggagcatccggctgtccgaggaaccggccgccatcgacggcgggttcctgctcgagtatggggagctggagatgaacagttcgttttccgccctcttggaggagaaacgggagcggctggaagacctgctcaaccgggagttgttcggctaaccgattctattcacgaagggaggcggcggcatgggggcatcgtatgcatatgcggtcggcaatgtccgcgccagagaaccagccctgctcacccgtccggacatggagcagctgctgggcgtatccgatgtggccgagcttttggccgccctgcgggacaggggattcggcggttccatgccggagggcgggaacgccggtatggaagacctcttccgggaggaaacccgggatctgtggcggtatctgaaagaggtctccccggatttttccctctacgacgcgtttctctaccggcaggacatccacaactgcaaggcagtgatcaaaggcgtgctgtcggggcgggcgtatcagccgctgctgctcgaaccgtcgtcggtcccgccagaggatctggaaaaagccgtgcgggaaggggcgttcgagctgctgcccccattcctgcgggaagcggccggccgggcctatgagatcctggcccatgcggccgatgcgcagctcgccgatgcggtcctggaccgggcggggatggccgcgatgctggcagccgcggaccgatcgcgggtgccgatgctgcgggagcttatggcgacgcaggtattctatgccgactgcaaaaccgccctgcgggcggcccgggctggaaaaccgcccgcttatctcgaacaggccctctgcccctgtcccgggctggacatcgggattctggccgcagcggccgccgcaggagaaaaggcggtgctcgcctgcatggaggagctcgatgcgtacggcagcaggcaggcggcggagcggtaccgggaatctccctcgtcttttgaaaaatttgtcgacgaccggacgatggaggtggcccggaaagggcggagcgttaccctgggccccgaaccgctgcttgggtatctcgtggcgaaggaaatgcagcaaaaggatctgcacatcctgttttccgggctgcgggccggtcaggcggaagcggatatccgcttccgcctgcgggagctgtatccgtaaggcctggccgggcggggataaagggccgccggagatagggcggccataaaatcacagaatcagcaccggatggggagtcggataccggtgcggggttcattctatgcggaaatgagggagactgccatgcgccggtgtgcggtgatgggcgatacggaaagcgtgcaggggttcgcggccgtgggcctcgatatcttcccctgcgacgacccggctgaggccggcgcgctgctccggaggctggcggcggccggagagccgggccgggaggaatacggcgtcatttatctgaccgaaaggttggcggccctgctggaacgggaactggatgccctggacgggcagatgctcccggcggtgatcccgatcccgggcgtgcacggcaataccggcgccggtctggaacgggtgagggcctgtgtggagaaggccgtcggttccgatatcctattcggatcctgagccgtctccggacagtgtgccgacagatacgatcgggcgtgaaagacaaaaaacgcccctgtgaaaggaacgatcagccatatgacgacaggtacgataaccaaggtcgcgggtccgttggtcatcgccgaggggatgcgggacgccaacatgttcgacgtggtgcgggtgagcagccagcgtctgatcggcgaaatcatcgaaatgcatggagacaaggcctccatccaggtatacgaggagacctcggggctcgggcccggcgaaacggtggaatccaccggcgcgccgctgagcgtggagctgggccccggcctgatcggctcgatttttgatgggatccagcgtcctctggccgagatcatgaaggtatccggcaccaatttgcagcgggggatcgaggtcccctccctgaaccggggggcgcgctggcatttcgtcccgtcggtaaagccgggggacgaggtgcggggcggcgataccctgggcattgtgcaggaaacccccgtggtgcggcatcacatcctggtgccgcccgggctgatggggacggtggagagcatcgcggagggggactacaccgtcgaggagacggcggccaccctgcgttcgccgaatggttcccttttgccggtacggctgatgcagagctggccggtccgggtggggcggccgtataaacgcaagctgtctcccgacgtgccgctgacgacggggcagcgggtcatcgacaccctcttccccctggccaagggcggcgtggccgcggtcccggggccgttcggctcaggcaaaaccgtggtgcagcatcagctcgcgaaatgggccgcagccgacatcatcgtctatatcggctgcggcgagcgcggcaatgagatgaccgatgtgctcaacgagttcccggagctgaaggatccccgcaccggcaattccctgatggaacggaccgtcctgatcgcaaacacctccgacatgccggtggccgcgcgggaggcgtcgatctacaccggcatcaccatcgcggaatatttccgggacatggggtacaccgtcgccctgatggccgactccacttcccgctgggccgaggcgctgcgggagatgtccggccgtctcgaggagatgccgggcgaggaagggtatcccgcctatctcggcagccgtctggcccagttttatgagcgggcgggccgggtgatcgtcagcggatcggagaataccgagggcgccctgtccgtcatcggggccgtctcccctcccggcggcgatatctcggagccggtctcccaggccaccctgcggatcgtcaaggtgttctgggggctggatgcctccctggcatataagcggcatttccccgccgtcaactggctgaccagctattccctgtatgccgattccctttcgggatggttcaatgaaaatatccgggacgactggagcgttctgcggggccgcctgatgggcctgctccaggaggaggcggagctcgaggagatcgtgcggttagtcggcatggatgccctgtccgcccccgaccgtctcaagctcgaggccgcccgctccatccgggaggattacctgcatcagaacgcgttccacgataccgacacctatacgtccctcgacaagcagtatctgctgatgaccgcgatccttgggttctacgacaaggcgaaggccgcgctggaggcgggggtggacatcgacaccctggtctccctgcccgccagggaacggatcgggcggctgaaatacgcggccgaggacgccgcggcggaggaattcgcccacgccatggccatgctcgacgaagaattggacgacgcccgcaaagcggccggccgggatgaggccgtcgggaagggaggggaagaggatgcctaaggaataccggtccatccgggaagtcgccggcccgctgatgatggtcagcggggtggaggacgtcaagtacaatgagctcggcgagatcgagctgccggatggggaacgccggcgctgcaaggtgctggagatcgacgggggaaacgcgctcgtccagctctttgaaagcgccgcggggatcaacctcgcgaattccaaggtgcggttcctcggccggagcatggagttgccggtgtcccctgacatgctctcccgggtgttcgacggcctcgggcggcccattgacggcggacccgaactgatcccggagaaacggctggatgtcaacgggacccctatgaatcccgccgcccggaattatccgcaggagttcatccagaccggcgtctccgccatcgacggcctgaacaccctggtaagaggtcagaagctgccgatcttttcagcatccggcctgccccacgcccagctcgcggcccagatcgcgaggcaggcgacggtactgggggacgacagcgggttcgccgtggtcttcgcggcgatgggcatcacctttgaggaatccaattatttcatcgaatccttccgggagaccggcgccatcgaccggacggtgatgttcgtcaacctggcgaacgatccggccgtggaacggatcgccaccccccgtatggccctgactgccgcggaatacctggcattcgaccgggggatgcaggtgctggtcatcctgaccgacatcaccaactacgccgacgcgctgcgggaggtctcggccgcccgcaaggaagtgccgggccgccgcggctatcccgggtatatgtacaccgacctcgccaccctgtacgaacgggcgggacggcagaagggccgggatgggtcgatcaccctcatccccatcctcaccatgccggaggatgacaagacccatcccatccccgacctgaccgggtatatcaccgaggggcagatcatcctctcccgggagctgtaccgcaaggggatcacgccccccatcgacgtgctgccctccctctcccgcctcaaggacaagggaatcggcaagggccgcaccagagaggaccacgccagcaccatgaaccagctcttcgccgcctatgcccgcggcaaggacgcgaaggaactgatggtgatcctgggcgaggccgccctgaccgcgatcgataaacagtacgccgcgttcgccgaccggtttgagcaggagtacgtctcccagggctatgagaccaaccggcccattgaggagacgctggagctcggatggaagctgctgcgcatcctgccccgcagtgagctcaagcggatcagcgacgagatgctcgaccggtattatgacccgtcctaaacaccaggggcgcctgcatggatgcccggaaaggagggaacgcccatggcggtgatgaatgtcaaccctacccgtatggagctgacccggctgaaaaagcagctcagcacggccaccagagggcacaagctgctcaaggataagcgggacgagctgatgcggcagttcctcgagatgatccgggaaaacaaggccctgagggaacaggtggaggcgggaatcacagacgcgaaccggcattttgtgctggccagtgcggtgatgcagagggaacagatggatgccgccctcctctcccccaagcaggaggtgggggtcgagatatccacccgcaacgtcatgagcgtggatatccccgtgttttcccccgtcacccgaacgcccgatccatccgatatctatccctatgggttcgcgttcacttcgtttgagctggacgacgcggtgcagcgcctgtccgggctgctgccgatgatgctgcggctggcggagtgtgagaaatccacgcggctgctggccgctgaaatcgaaaagacccgccggcgggtcaatgcgctcgagcatgtcatgatcccgcggctgcaggaaaccatccggtatattacgatgaagctcgaggaaaacgaccggtccagccgcacccggctgatgaaggtcaaggatatgatgctggaaaaggcccatcattatcatgcggaaacgatgtaaggaagagagtgccgattgcacacatctgaccgccacggcgctgaaaaggctatttcaatcgtccggggcaaatgatcggtttttagatgaacgctaagcgccttgggaaatgcccccgtcagcaaaaaatcccccggaaccttgtcggttccgggggattttccaggtatatcggggaggatgccgattttgcacagttatgaaaatatgttccagatgaatctagctgcgcgtaaacacatgaccaccgcgatagccagggtgatgatccatatcggctttttgttttccgctttcctgaaaagcaggaaggtgagctgatatgtaaagcatatcggcaatagggggaaaaacagattccacatgaaggccacgaaaagtgcatggacaaacccgttaaaaccgtaaattatttcacgtgtcatcataaatgagtattctataccgttgatcgctgaataaaccgcataaataagcacgcacacgtacggcagcaatgagcctatgaagacgatcttataggattttttcatgttttgcccccctcaaacccactgttttcattatagcacagaaaggaaaagaagtcgaccgccatacagcggccggcttcttgcggaaatggggtgccgcccccatctaaagccgagcgtatcatgtcctaactttattaatattattgaattacccctacagaggataacctataaattgggaaatgtaaacgggataatcttatgttatcatttaactgggtggtaaataattgataaaggatgtgaggggagtattatgaaaacatatgaggtgacattatcggaggatttgtcaaccatatacgaagacattgccaagatgaacaaaaggacagtcgaggactgcctgacgatcattctggaacgggtcattcgcacgatgcttaatctgccgggggaaacccacaaaaactagggcacgccatggtatccgcggctttagcctatggtgagaagatggtctcggcgaggcggcaattggtgcgacgcgttccgcacggagcgcaagaattgaaacgggtttgatccctcacaaagaaaaaacacccgtaaccccgcctgacggcgaggtttccgggcgttttcctttatgatccactggcaaaaaagaggccgctgatacgcaggcaatgcagccttttcatagaaaaacctgcggtgcgcgtcatgcacaccgcaggtatggagctggtgagcggacttgaaccgctgacctgctgattacgaatcagaggaacttatagcaatatagccatttatttgatattacgtagtaaccgcgtagtaaccacagaatattactaaatttctaaatgtcccgcgcaagcacctataagagctgtatataatacgataaccatggctggaggatgccggagcggcgttgtccatcctgcatcgtactcccccactcctacaacgacgatatgcataacgaggccgatcactccaacgagtgaccggctttttccatgtctgcctgtataagccttttgacgtattcggccatactcgtgccctgctggttagcaaacgatttaattttatccttgcttccttttggcagccataccctcagttgttccatgttttcgctgagatatttctgagtagctttgttctgcgctttgctgtatggcataaaatcacctcgcgtttagtataccattaagacatattgtgcgctatatatatagtgcacaataaaatgaataaacattcgtgtgttttaccaattgatatatagtgcacaatatgatatactatactcgtagcaaggaagagggcggaaaggagacgcccatgacgtgtaaagagtttacgaaactctctcccgcagaaaaaagagtatactgggaagcacataaaaaagcggccaagcgccctaacgcctaaccgctaacgcaaaggcccaaaccatagcgactaactaaagcccgtctcccttgctacacccagtataaaataaaacgacaaaaaagtaaaggggtaaaaatcatggggttgatggatattattgtggaaatgctaaatgagcaggaaaaggaaaacggcagtgataccagatgggagagactacacactaaaccggtcgagattgttgacactcctaggggccacagataccgtgatcctaaaagcggaaaatttatagacgaatgacacccacccgatgagagccggacggcaaccggccgaaacgcccggaagggcgtcgtgggaagcccacaggacaggggaataaagtccgccccattacgatagattgctccttgacaacagaacaaagtccagggtatactaaagtcgctcctcgcgaggggagcatggatagaaatgtgacacgcggttggcgaaataaaaatcccggtagcccgttaattataagtataggtggtgtaataatgtatgactacccgtgccagatagccatcgaaacaggaaagacaataacaggccggtctgacactaccacaatttattacaagtgcaaaaccacaaaccgcgcgatcaggatagagatatccttcggcgcagagcaagacatgaaaaaaattttagaagacaccgtcaagtctaaactgtgcggcaaatgtatatatctccatgagctcaaaaagccggaccacccgtaaggatggcccggctctctttgtccggcgtcccggagtatttgatcccccgacttcgtccgcgccctgatcgtgggccgactacttggcaggcaatgttaagcaaaatagggccggtgcaggcaccgcgccccgcaaaacctggcggttttgttcctcgatgctattatagcacatatccctccgattttaaagtggtcgaaatcggccagtttgaacccatcgaattcgaggcaattaagctatccttcggtttcgtctttcggcttggcgttctctccggactgctctagcacttccagcagcctttccgccgcctcgtcgttgtcgatcaccacgtcgtggtatatgctgctggtcggcattacccctcgccccccgatgtcccgcagcttgcgtacaagatcgctcacgtagtttgcgccccggctggcaaagatgccggtcaggacgatcccgatccccggcaccgagaaggacagccccagggcggcatataagtctgcccccgctgcaaaacaaagcaggatagacaccgccagggctgataattgggtgatgagggttttcacgttccgctccgtcaccattttgaccacgctcttgacgtattccaccatggcctccaccgtcacggccagggccaggatcaataggattccggtcatatgcatca

SEQ ID NO: 175 - DNA, 10851 bp, Unknown
  16S sequences of unknown bacteria
cgaaccgagcgcgtaccagccgcttttcgcattccgaacagaaatcccgaagatgttttcgatcagaagtctcgaaggggcgggcccctcgtcgaactgacaacgggcccgccccttcgtgatgagagcaagtgattggcggagacgtgtgcgaatcgaacacacccaagacgttctgcgcgcctcgcaacggctttgaaggccgcgggccccaccagggagccatccgtctccgtacgagagaatctacggctgcctgagcgtcctgacatcgccttgacgcacggtcagcccaactttgtcgaaggcctcgagcaacggaatcgcgtatctgcgactcgtgcccatgacctccttgagcgccttcgcgctcccatcgccacccgcctgcaagtgtaggcgcacgcggtccatcgcctctgcgaacacctcgtctgcatagtagatgtcgtcatcgaccttgcggacgcgaccctgctccagcagcatggtgagtgcctgtccggcaagcgaggcatcgacgtcggcgtcgcgcagcacgtactcgaacggctggggagtcatcccctcgccctcgagctctgcgtgcagcgcatcggcagcgttctcgatgatggtaacagcactcgcctgggcgccgggatgcccaatcctgccagcgcgcataacggccacgccactggcaatcgcctcgccaacaagggcattgaactgggcagattccatccggggaaagatgagctgacgcagctcctcggcgggtatgcccgtctctgcggggtgcttcgcgtgaaagtcgatgagggtgtggtcgatggccgtgatggccttctggcgcagcggcctggaggcgtagagccccgtcgtgcccagcaggcacgccctgccggcttgcgcagattcgatcagacaggcggcgacgggctttgcctcgacgccgattgcgcttgcgagctcggcgggggctaccggcgcgcgctgctcgtaaagcagctcgtctacggccccttgcaacttgccagacgaaagcgcgtcgagcgccgctttctcgtgggcatcgaggttcgtgcggcgccggggatgcgcgatgagcacggcaccgccgcccgcgaccttgaccggcgaaaacgtgcgcacgacaaagcgatcccccgagctcacgggaagcggctcctccaggcggatctgcgcgtaggcgctctgacctggctcgagcctctcgaggccgtctgccaaaagcacgcgcccgagcacctcgcgcgtgccgtgcgcgacgtgcatgcgcacgcccgtctccaggggctttccgctcttgtccgcgtcgaggtaggtcaggcgcgcgtcgaagcggtcggtgggcctgatgagccccggctcggagaggaagtccccgggcgctacctgctccttgtcgatgccgctgatgttgagcgccacgcggttgcccgcgagcgcctcgtcgacggccacgccgtgctcctggatggagcggaccttgcagggcaggccgcccggcagcagctcgagcacgtcgtcgacgtggatggcgccgctccacagtgtgccggtgacgaccgtgcccacacccttgaccgtgaagacgcggtcgatgggatagcgtacgaaattgcccccgcggacgcgctcggcacccgccgtcgcgttctcgatagcccgaagcagctcgtcgagccccgtcctctcgcgggcagacacggggatgaccggacagccggcatagggcgtcgtggcgagccaggcctcgacctcgcctttcatcatctcgacccactcgtcgtcgacgaggtcggtcttcgtgagcgcgaccacgcagcgcgcgatgccgagggtctgcagcacggccatgtgctcgatggtctgcggcatgacgccgtcgtctgccgcgatgacgagcagcgcgatgtcgatgccggtcgcacccgagatcatctggcgcacgaagcgctcgtggccggggacgtcgacgacgcccatcttcgtgccacccggcagctcgagctgggcaaagccgagctcgatggtgatgccgcggtccttttcctccttgaggcggtcgggatcgatgcccgtcagcgccttgatcagcgtcgacttgccgtggtcgatgtgcccggccgtgccgagcacgtagtcgaacgacttcttcttggccatgtcactcacccagcccttcgaaataggcgttgaacgcctgcgcgatcagctcgatctcgagctcgtcgagcacggtgcggcaatcgcagtagaccgcgtcgtttttcaggcgcgtgatgatgggcgtcgggaactcctgctcgaggtagcgcgtgcagccgagcgcgtccccgcgcacgaagtcgaccttcacgcagtacgtgtcgatgtcgcacatcggaagcgccccgccgcccgcacgcgcgatctcgggaacgaccgaaaggcgtgcgtcatctgcggagatacacccggcaagcgagcgctccagcttctcggcgcgctccttcgtgcgctcggcaggctcttccagcatgcgcaaggtcggaatcttctcgatggcggccttagggtcgaggtagagccgaagcgtcgcctcgagcgcggcgagcgtcatcttgtccaggcgcagcgcgcgggcgagcgggtttttcttcaggcggtcgataagttccttcgagcccacgatgatgcccgcctgcgggccacccaacagcttgtccccggaaaacgagacgagggcggcgcccgccgcgagcgattcggacacggtcggctcggcatagctgccaaacgaggaaagtcgcgcgaacgcccccgagccctggtcttcgtagacgagcacgcgtgagccttcggggcgcacctcgtttgcccttgcggcaagctcgtgcagcttgtccacgccgacgttttccgtgaagccgatgaggcggtagttagacgggtggaccttcaggtacatggccgtctccggcgtcgtcgcgcgctcgtagtcgacgggatgcgtcttgttggtggtcccgacctcgaccatcgtggcatgcgactgctgcatgatgtccgggatgcggaacgacccgccgatctcgatgagctcgccgcggctcacgatcgcctcgtggcccgctgcgaactccgagagcaccatcatgacggcggcggcgttgttgttgacggcgatggcagcttctgccccggtcagggcgcagagcagcttctcgcagtgggcgtggcggctgccgcgcgccatgttgtcgatgtcgtactcgagcgtcgagtagcccctgatgacctcgttgaccgcctggatggcctcctcggcaagcaccgagcgcccgaggttggtgtgcacgatcacacctgacgcgttaatcacccggcgcaggctcggcacgaggtacgcttcgagctttcgtgccgcaacgtgtgcgacagacgccgcgtccacctgcacgtccctgcccgcgagcacgtctgcccgcgtctggtcgaccgcatggcgcgcggcatcgagcacgagctcgtgcgggagcctttccgcgtagcgtgccagcttggcatcgtgcagcacgtcgtcgactttgggcagcgctctcagcagcgcgttcttctgatctgtctgcaccattcgctgggcctttcttgtccacatctgaatactcggtcaatctactgggcaggatagtatgccctggaggcatcacacgcatggcggcaatcgcctttcgggggtgtttgccacgacggacggccttcgagcgtccccatcgactatgattggcatgcaaacgacgtagggatacatatgcgcattctccatgtttccgcccaaaaaccggatagcaccggcagtggcgtctacctgtccgagaccgtctccgccctcgcgcgcgccggcgccgaacagctcgtgatcgcgggggtcgcacccgaggactccccgagctttcccgcaggagtcggctttcgcccggtcgtgttcgagaccgagcacctgcccttccccgtcgtcggcatgtccgacgagatgccctacacggcgacgcgctaccgggacctcacgatctcgatggtcgcgcagttcgaggccgccttcgacgaggcctttgacgaggcgctcacgcagtttgcgcccgacctcatcgtctcgcatcacctctacttggcgacggcgcaccttgcgcaccgcgcgctcccctgcccgctcgtggccatctgccacagcaccgacctgcgacagttcaagaagatcccgctcgagcgcgcctacatccgcgaggggatccgtgcgcttgacggcatattctcgctccacgatgcccaggcggcagagatcgtcgaggcgtttggcgtgccgcgcgggcgcgtccacgtgataggcacgggctacaacgcggcagtgttctcccgcgacccgggaatcgagcgcgatgggcaccgcatcgcctatgcgggaaagatctgggagaagaagggcgtggcgtgcctgctgcgctcgttcgaacgcatggagcacctgccgaaaggcctcgtgctcgagctggcgggaggacacagcgacaacgcagaatacgagcgcatcgtcgagctggcgcgcagctgccccgtcgaggcgaagttcctgggcaagcttccccagccccagctcgcccgcctctacaaccgatcgggcgtgttcgtgctcccctcgtttttcgaggggctgccgctcgtcgtcgtagaggcgctggcgtgcggctgcaaggtggtggtgacggacctccccggcatacgcccgtggatcgagaagagcatcgcgagcgcgcccgtgtggtacgtcgagccacctgccatgcgcaacgcagacgagcccgtgccggacagcctgcccgcgttcgagaagcgcctggccaccgccctcgagcaggcgctttgtgccccgtcaggcccgtgcgacgtgacggggctgtcatgggacgcgctcgccgagcgcatgctgcatctgtgccgaagcgacgtgtcctgacggacgcgactcgctcgggcatctggtataccgacgtcagaagaaatggaagccctggccgagaacagccggtcaggacagacgagaaaggaacctgcatatggaactggtaatcgatgcgatgggcgacaagtgccccgtccccgtcgtcaaggcgaaaaaggcactcggcaccatggacacggggaccgtcgaggtccacgtcgacaacgagacctcggtgaccaacctcaagagcctggcgaaaagcctcggctgcgaggtgagcgacaagaccgtcgccgaaggtgcggagtaccacgtcttcatcaccaagaccgaagcctccgcaagcgcggaggaagtcgcctcctccaccgagaagaagcgcgtcgtggtcatctcgtcgcaggtcatgggatcgggcgatgacacgctcggcgccagcctcatgaaggcgttcatcttcagcctgacgcagcaagacgccctgcccgacacggtgctgttctacaacggcggcgcccacctgacctgcgagggctccccgtgcctcgaagacctcgaggcactcgagaaggccgatgtcgagatcctcacttgcgggacctgcctgaagcactacgggctcgacgacaagctcgccatcggcggcgtcaccaacatgtacgtcatcgccgaaaagcagctcaaggcagacgtcgtcgtccggccgtaagcgccatctcgcgagcagactataaggcgtgctacgcgcgctcttgcatgttcgagtccgctcgcacctgcaaagaaccacaaacgcgcccagcccactcagcagcattcgggctgggcgcttctgtctttaccgtacgaagatgaagcctgcagggccgtccatcgcgcgtccgacgatggatggagcgcgccccgtctccctctcgaacgcagccgcgaaagcatctgcctcgtccggcgccacggcaacgagcaggccgccgctcgtctgcgggtcgagcagcacgcccatcctgttatcgtaggtggcgtcgtccatcgtgccttgcttgacgaacgccttgccccactccacgaggttgaacgagcgcccgggacggcagccgtcgacggagtactgatacaccccgttaaacagcggcaggccgtcccagaaaagacgcgcggcaaggccgctgcctacgagcatctcgtgcaggtgccccgccagaccgaaccccgtcacgtcggttgccgcatgcacgtggaccgccttcatggccgcggcccccgccttgttgagctccatcatcgagtcgagcacctcgcgcatcgattccgacgtctcgaagcccgcccggtacgcggagttcatgatgccgctgccgatcttcttcgtgtagaacagcacgtcatccgcttgcacgcccgtgttgcgtacgatgcggtcgggatgcacggtgccgaatacggacaggccgtatttgggctcgtcgtcgtcgatggaatggccgcccacgacaaaagcgccggcctcgcgcaccttgtcggcaccgccgcgcatgacctcgccgacgacgtcggtgcccagcgagacgggaaacgccagtatgttgagcgcgaccagcggctttgcgcccatggcgaacacgtcggaaagcgcgtttgccgcggcaatgcagccaaactcgtaggggtcgtcgcacaccggcgtgaaaaagtcgagcgtcagcactgcagccgtgtcgtcatcgatgcggtagacggcagcatcgtcgctcgtgtcgaaccccagcagcagctcagggtcggcggcaggagcgatcttcttcatgatttcctggagatcacccggactccacttggcggctcaaccgcccttctcggtcatgcgcgtaaggtgcacgcggccgttctcgtcgatgggcttgctcgacggcatcgagcaggcatttgccatatgtcccgccctcctttcgtggttcgcagagccatggctctcgcggacgcggcttgtattccgattatacccatcgccagcatgccgtctgcctgcgcgtgtggtgatccctgcaaagcgttacacgccgccgccgctcaatccgacgatgccccttttgcgggtccgttaccgtcgcgtcgagatacgcgcaggtcaaaagtgaaataatccccagcacgacacgacagcgaacatacgagccggcgagcgccggcatgaaaagaacagatgatgcaaagatgagaatcaccgacagcgcgcgtcccatcgacgccgagacatcctacagctacacgctcgtcacgcctgacggcgtctgcagcgatactgcaggccaggtccaaaccgagaactcggtccgcgtgttcgtgaacggcgagccgaccatgacgctcatgtgctccgccgaccacgtcatcgagctggtcgtgggcaggatgttcaccgagggaatgatctcgggcacagaagagatcgaagagatcagcgtctgcgagtacgcgacgcgcgtgctcgtctacctgcacgaccgcgacgccgacctgtccaagtcgcacgtcgaggaggtctcgtcgtgctgcaccttcaacaagacgctcaacagccacttcttccgcgacgaggagctcaagcccgtcacgccgcgctcctggtcgccgcagcgcatcttcgagctcgcgtgcgcattcgaatctgataccccggtgcacaagcgcacgttcggcgcgcacagctgctatctggcaaacgagcacgagattctgtactgctacgaggacctggggcgccacaacgcgttcgacaaggtcattggcagcgcgctcatcgacggagtcgacctttccggctgcatcgtgttcacgagcgggcgcatcccaaccgacatggcggtcaaggcagtgcgcgccggccccatcatcgtgtcgaaggccgtgcccaccgacctcaccatcgagatggcgcgcaaatacgatctgacgctcatctgctcagcgcaccatgactcgatgaaggtcttcaacgacccctacggcgcgctcaacgagcaccgcgaggcacagcaggcaaaggtctacctgacgcagcccgcccgcgtgcacgcgtaggcacgcccccccgcagagcacggccctctcacggggcatggcccgtttctctgcgccctaccgaaaagcgcgcaatcaggaacgcttgtcggcgtacatgctctcgtccgcgaggcggatgaggtctgcggggccctttacgcgctcgtcgggcatcgtcgccatgccgatgctcaccgtcagcggaatatcaagcgcctcgacgctgcctttctcgagcagcatcgcctcgaagcgcgcgatgcgcggcgcgagctgctcgggcgtctcgtgacgaaagaccccgacgaactcgtcgccgccatagcgcgacaggaacacgccacgttcgtcgaagcatcgcctcatgccctcggcaaagcgctggagcgcacggtcgcccgccgcatggccacgggtgtcgttgatggccttgaacttgtcgatgtcgaacaggagcagcacgcagctcttgcccgggtcgtcgaagacatgcgtgacgaggtagcggtcgagcgtgccgcggttgttgagcccggtcaacgcatcgagcgagatggcgtactgcgccctgttgatgtagatgccgagtatggtgaacgccacggccggccagatgagcgcgagcccgtagacgagaaactgaaacaccgcggcaacaagcgcgggaagcgcagagcaacccaaaagcagcagctccatgctccgctcataggcctgctcgcgggaacggcggcggataagccacacggaggccactaacacgtacgcgcccacgaaaaaggcgaccatgccgttgaccggaccgcgtcggtaactgccctcttcgatggtgaacagccagcccgtaaaggggttcgagataaccagcgcgagggtgagcagcaccgggacgacgcacagcaaaaggaagctgcgaagcgataggttcctgccagctgcacggaaatgcacgtagcgtgcccagaacacggtcgtcaggacctgcacgataaagtagaagctcgtcgaaccccacatgatgcccgtgacactgggcgagacgagccctctgaacgcccaggaaaccgagtcggccgcgaggcatgcggcagtcaggatgatgacagagcgcaggtagcgcgatgcctgcgaacggccgagcacgcgcacgcacactgccgcgagaaagatcatggtggcgagcgcgtagaaatccaagccgagggaaatgccacttaccagggtgttgtcggatacgtcaacgagcatatggtctttgaaatcgatccctcaatttatatgcgcaacgatgctgcgtagtggaaataccgagttgctattatagtcacatctccactgctttttcctgcacgttttgaacaacacagaccattcaaattgacacgaagggccgtgggtatcgtgtcattttgggagcttttgcttgccggtaatctcggtcacgtccaatgcatagaccctggtcctggagattgcggccgggttgtagcctgtgtcatcgtcgtgatggtactggcccatgagcacgtcgagcgcgtgcagcgtctcgtcggggtcttcgatcatgcgcaccgtgcccttgcccataaccgacgcatacgccatcgtgcaatagcatttctcggagaagtactgcagcttgtggtcgcagtccatctcgaaccccacgcgcgggttcttggcaagcaggtcgagcttgtgcccctcgagcgcgctgtggaaaacagcgtcaccttgccctcggcggcctcgagtccgaagttgagcggcaccacgtacggtaccccatcgtcgtccacgatcccgagccggcacacgtcgcagcgcctcatcaccgccacgatatcggcaaactctttaatctcccgcttggctttgcgcatcacagcaacctttccctcatgcatctatgcaaccctgcatccgtgcatccggccagtcgtttgcccgaaatcttacgacaccgcgcgcagatgtgcacccgctcgtccgcgcgtgcatctgcgcagcccacgttatgcgacaatgcgagtatcgtcagttcgagatgcagcccacgtcccaaggagcaacccgtgaaaacccaacgtcccttcccccaggcaatcgtcacgaagaaagccgcgcgcgccatacacgaggggcacccctgggtattcgcaggtgaggtgaaaaacgtcgagcccgcgccgttggacggaagcgtcgtggaaaacggtggcgtcgtcgacgtgagggaggaaaacggcacctacctgggcacgggcctcatctccgagaacagcacgatccgtatccgcctcgtcacgcgcaacgccaacgaccgcttcgacgaggcattctggcgtcgcaagctcacctgggcgtgggagcaccgcaaggcgtgcatgggcagccgcgccctgcccggctgcgagcccgacacgaactgctgcagaatcgtcttttccgaggcggacggtctgccgggtctgatcgtcgaccgctacgaggacgtgctcgtcgcgcaagtgggcaccgtcgggatggagcgcatcaagccgatgctctacgagctgttgctcgacatccttcaggccgatggccagcaggtgcagcgcgtctacgagcgaaacgacatgcccgcccgcgacaaagagggcctgccacgtcattcgggctggtggaagggcgagggcagcgcccagctcgaggtgcgcgagaacggcatcgtcttcgggctcgacatcgagcagagccaaaagaccggctttttcctggaccagaagtacaaccgccgcgccgtgcgccagatcgccgcg

SEQ ID NO: 176 - DNA, 2689 bp, Unknown
  16S sequences of unknown bacteria
gacgattctgcggctgcgcaggaccatataatttgaaaacaaataggggcaaggctatgagattttgaattaatatggccttgcccttttgttttgccggatctgcgcattctctttgctgcaattatgagaatattccaattatattattgacatatgttcataaatcattataattttactatatgaaagggggacttctatggcaagaccagaaaaatgcagacggatctgctccaggcccggcatacgcagttttgtacccgtcgaaagaagggcagagggaactgttgtcctatgttatgatgaatatgaaaccatccgactgatcgaccgggaaaatatgaaccagcttgcctgcgccgaaaaaatgggagtcagccgttccacggcagcgcggatctatggcaatgcccgcaaaaagcttgcagatgcgttggtgggcgggaaagccttgaaaatcgatggcggggatgtgattgtatgcgccaaaatgcgtccggaatgcaaggatgttctaaattgctgccataaaaagcagctcaaagatgcgtaaaaggggggaataatatgaaagtattaattcttggcggtgttgccgccggaacaaaagccgcagcaaagctaaaacgagaagaccgcagtgcggatgtcaccattataaccaaaggaaaggatatttcctatgcgggctgtggactgccctattatgtaggcggcctcatcgagagccgggaggagttgattgtcaatacgccggaaaaatatacggccctgacgggagtgcaggtaataacgggcatggaggctacggcccttcatgcggagaaaaaaacagtgacgatccgtaaacaggatgacggcgaaatacaggaactcgcttatgataagttaattattgccacgggcgcttcccctgttcttcctcccattgaaggaatcgaacaggagggtgtttttaccgtgcgcacaccggaagatgccattcgcatccgcagttttgtgtcagatggcggtgtaaaacgggctgttgtcgttggcggtggctttatcggtttggaaatggcggagaatttaaaggcccagggtgtatcggtaaccgttattgatgccgcaggtcagctccttcccgagatttttgacccggaaatggccggatatatcaaaaaacatttgacacaaaaagggattcgtgtgttgaccaacaccaaagctctccgcttcgcaggcagcggccgtgtgacaggagtacagaccgaaggcatgctccttccctgtgagatggcaattatggcggtgggtatccgccccaacacggcgtttttgcagggcagcggtgtggaattgaaacagggaaaagttctggttgaccaacagctgcgcaccaatttggaggatgtctatgccgttggcgattgcgctatagtcaccaaccgaattacaggaaaacgacaatggtctcccatgggttcttccgccaatctcgaaggacggactctggcacaggttttggcaggaaaagaaaaaagataccccggcgttttggggacaggcattgtaaaactgccggaattgaactgcggccgcacgggcctcacggaaccccaggcgcaggcggcgggttatgacgtggtgacggcgctgatggtcacggatgacaaggcgcattattacccggattcctccaattttattatcaaactgctggcagaccgcgcttcgcataagctgctgggggcgcaggtgctgggctccggcagtgtggataagctgatcgatatggcggttaccggcatacagctgaatgcaaggctggaggattatgaaaatggagattttgcctatgctcctccgttttctaccgccatccatcccttcgtccaggcggtttatgttctgctgaataagatctcaggagagcttgtatccatgacgcccaaagaatatctggatggaaaagctgacgattatacggttatcgacgtcaatccctctccttctatccgcggcgcacggtttataaatctcacggaggttaatgggccgatcgatggcatcgacaaagatgaaaagctcctgctggtatgcagaaggggcaaacgcgcctatctgctgcaaaatcgtctgcgctatttcggttatacgaacactgccgttctggaaggagcaacatatttcagcgacgtccgtgtgaaaaatgcgcaggccgccgtttctccagaggagattacccgcgttaaggctctgggatttctttgggacaaaaacagtccggaccgttttaacggacgagtcattacccgcaatgggaaaatcactgcagaggaaagtgccgcgattgccgaggccgcgcagcgtttcggcaatggtgaaattacgatgaccacccgtatgactttggaaattcagggggttccatttgaaaatatcgaacccttgcgggaatttttggggcaggcgggactccagaccggaggaaccggctccaaggttcgcccggtggtttcctgcaagggaacaacctgtcaatatgggctgatcgatacctttgctctgtctgaagcaatccatgagcgtttctatgaggggtaccgggatgtaaaactgccccataaatttaaaattgctgtcggcggctgcccgaataactgcgtcaaaccggatctgaacgatctgggcatcgttggcc

SEQ ID NO: 177 - DNA, 2864 bp, Unknown
  16S sequences of unknown bacteria
cggcgcctgagcctctctgtgttccccctgaaaagggcgccccacgcgaagtggactaatgaaatcgaaaagacgccagtcttttcttctatctttttcacttaggataaagtgaatcttcattccagtggagtttcttagaggaataaagtagtctaaggaaaagaaaattgctttcgctctttctttgcaaaaaaaagagaaccataaagattctctttcttgttcacgcaaagggagagattcgaactctcggtcggttattagccgaacacacgatttccagtcgtgcgccttagaccagctcagccacctttgcatatgacataccgcctatgggttattcttttccgtccacggaaatcacctctccgctgaacgccttagaattataccatatccccgcgggtttgtcaatagctattttaaatttttatacgtttttttcaagctttttctgaaaaactcttgccgtcatgtctcagcgcggcttccaccagacctacaaacagcgggtgcggcttgttcggacggctcttgaactccggatggaactgtactcctacaaaataatcgttctcgggtatctcaaccgtctccactatcctgccgtcgggcgatgttccgctcagcttgagccctgcatttgccagaacctcgcggtagtcgttgttgaactcgtagcggtggcggtgtctctcgctgatgttctccttgccgtagcattcgcggatcacagtgccttccgcaagcctgcacggatatgcgcccagacgaagcgttccgcccttgctgatgctgcttgactggtcggggaggaagtctatgaccttattcctgcaaatctcgttgaactcacccgagtctgcgtccgctatgccagccttgtcgcgcgcgaactcgattacggcgatctgcataccgaggcatattccgagataggggaaattatgctcgcggcagtattttgcggtggttatcatgccgtcgatgcccctgtgtccgaatccgccgggaacgataacgccgccgcagtcggagagtatgtccgcaatgttgtcttccgtcacggtttcggagtctatccacttaatctcgaccttcgcgctgtgagcaaagcctgcgtgtctgagagcttcggcaacggagagatacgcgtcgtggagctgggtgtacttgccgacgagggcgattttcacgggcgtggtgctgttatgaactctctcgagcatttccatccactcggacatatccggctcggcggttttcagaccaagctcggcgcagacagtctcggagaatccgctcttttcaagcataacgggagcttcgtagaggacggggattgtgctgttttcgatgacgcagttcggcttgacgttgcagaacatggcgattttcttgataatggagtcttcgagaggctcgtcgcagcggagaacgatgataccggggttgattcccatgccttgcagctcttttacggagtgctgagtgggctttgtcttgtgctcgttggagccgctgaggtaggggacgagagttacgtggatgaagagtgagttttcgcgtccgacttcgagcgatacctgacggatggcttcaaggaacggctgagactcgatatctcccgtagtgccgccgatttcggtgataacaacgtcagcgtcggttttctttgcgacggagtagatgaaggattttatttcgttagtgatgtgggggatgacctgcacggtttcgccgaggtattcgccgcgtctttccttattgaggacgttccagtagactttgccggaggtaaggttagagaacttattaaggtcctcgtcgatgaatctttcgtagtgaccgaggtcgaggtcggtttccgcgccgtcctctgtgacatagacctcgccgtgctgataggggctcatggtgccggggtcgacgttgatgtacgggtcgagcttctgagcggcgactttgagacctcttgctttaaggaggcgtccgagggaagcagcggtgatacccttaccgaggccggagacgacaccgcctgtgacgaagatatacttagtttgtttcataaaatcctcactaaaaaatacaatttttctcaaaaaaaggaaaaggatattcgcggacgggaagagctacatccgcgtcggcaaacatccttgtttacaacaatactttgatattataatactcccgagggagtttgtcaaggggttttgaaaggagaaactcccacggagtttaaagtccatttctaccttagacgactatagccttctaagagacttcccctaggggagattcacttaagattcaagtgaagaagaaagaagaaaagacttacgtcttttcgatttcattattccactccgccgaactagcgtagcttgttcagggcgcatcctttcagggggaacgcagagaggctcagacgccgcccctctgtgagtaccggcttcacggtggagtatggcttagcaatgaactgctgtccccgcacactctttccgattagtcgcgcggcaaagcgtaaagcgtagtagtggagcataaaatgtgcgcgcggtgagttttggggcgcgacaacgcataagccttagtagtgtagttagaatgaccgcgtctgtttatttggtctaaatttactacacgttcgttggttcgtctacggaagcaaaacgaaattggacgttcgctccatttcaacgcacaaactcccgacaatccgcggttagcctaatccaattcacgtatgatttggtattctcgactccgcgcgacaacaaaagctgtaatttgtatgaactccccgcgtctacctctcccgcgcgaacatgctaatgccactactaaggctt

SEQ ID NO: 178 - DNA, 2422 bp, Unknown
  16S sequences of unknown bacteria
agattctgtcggccgattcgatttacaactccaccctcacgtcgtctatttcggaggaacctatttcctcaatcaacagattctgtcggccgattcgatttacaactccaccctcacgctcaacatcttcaacggcatttccggcgcaaacgagaccaccgaaaccgtcaacatctctcccaaggtcatcagcgccaacagcttttcaagccagcttataaacaacagcgcccccaccgtcatgtatatcgtctttgtgggaattatcccggtgggacttatcgcggccggcatcatcatctggaaccgccgccgcaagagaacctgatttaaggagcaaactatggacgaaaagaatcccgaaaacaaggtcccgtcaaagggcagacgcccaaaggacgaggaatataccagcattttcgacgcgcccgccgccgttcccgaaaagcagcccaaaaaacgcagaatttcaaagcgcacggtcaacacgattattgcccttgccgtctgcgttgctctcggcgccgccgccttcggggcgacaaagctttggggaaaggacgacgtgaccgacgaggtttcttcggatgagacctccgaaaccgagaccaccgaaattttcaatctcggcgactattcctattcggccaccaaaaccgacgaccttaaaatgggacccataacgaacgttgtggtcaaaaacgagcacgacacctttgccattgtccccaccgtcggcaaaaccacctccaccgactcggtgacgggtgaggaaaccgaaaaggacacaacgatttggaagataaacgccgccgaaaagacaaatatttcgggcattgaatttaacgacacccgcgtttcctttattctcggcgaggcgcttgccccctcctatgccagcatttatgccgaaaacaaggacgacgaaattccccagggcggcaagacctatctcgaggaatgcggccttgacagccccaaatcctctatcaaggtaagctttaccgacggctcggaatacaccatttactgcggcgatcagacccctaccggcaccgaccgcttcatcaccatcgacgagcacagcgcgggaaattccgacgagcttaaaaccgacaaccgcatttaccgcattgagcagggtctttgcaacttccttgaaaaggatctgacctattttgttcagaccgacataataaaggcgattgaggacgaaaccacctacaccgagaccggcgacgaaattgccgacaaatatttcttaaacggcgagctttcctatttcgacgacctggtcatcaccggcacaaatttcgaaaacaccattcgcttcacaaatgttgacgtggaggttccccctcacaacagcatttacatgatgaccgcccccataactcagaatgtcgacaccgacaaaatgaccgcgctgctcaagccccttgccgacggactttcggcaaacagctgcgccgttatttcaccctcggtttcacagaccgagtcatatgggcttaaaaaccccgccgtcagcgtttcctacaccgttaaaaataagaattatacaataaatataggcaacaaaatttccgacgactcgggagaaaactcctattatgcagtcatgataaagggaaatcccgccatattccttgtggaggaaagtcttgtttcggctctctttaccaaagccgacgattatgcctccaaaacggtgtacagctgcaacatcacaaagctcaagaccgtcacctttacaaaggacggcgtttccaccacctttaatcttgccttcaatcccgacgacgacagcgatttgaccgtcacggcgggaagcaagacggttgacaccgccgccttcagacaggcctatgccgacttcctttcgatctccacctttgaaaaggccgacggagcaaaggacgccgacagcccctatgtcacggtatcatttacctaccgcgactatcccggcaccgacaccgtgagattttcgctcctctccgaccgccgctatttcatcagcctcaacggccagggaagcttttcggtgctgtccacgggacttgacaaattcgtaagcagtatatccgcgctgatatgaccgataattaaattgaaagaggtgtttgcatgaccgaaaacaaaaatcccctcttcgagggagacggcgacatgaaaatcgccggtgaaaaggctccggaaatcagtcccgattgccaaaaggcgcagatcctcgagcagcttgaggaggccgacgaggacggaaagcttgctcttgcaaagcttgtgggaaggtctgccgcctccaaaatatgccgctgcgaggatgaatttgaaattctgaaggacaccgacgagcggctgctcatacattgcaggctgctgctgcttttctcgataacggtgggcagcgagcgctatc

SEQ ID NO: 179 - DNA, 7134 bp, Unknown
  16S sequences of unknown bacteria
ccagatgacacaccgcaacaattcccagcagcaaccctgctcgagctttcctcggcgggtctttccctttcaaacagccgttttgacgaggcgcttgccgcggcgggagattcctatgaaaaacagcttgccgccgaaaacattttgtttgaggattgccttgtttgtcccgtttattatgaaaaaagcttttgcgttttttcggaaaacgtgaccgagcccgagcttttcgccatgtcgggaacggttgatttccgtcgctgcggactcgaataaaaattttgaataaatctcgctttgtgaggaaaactattttcgaagaggtgagatataatgatcatggacagaattgcgctcattttaaccataatcggagcgctcaattggggcagtatcggccttttccgctttgatattgttgcgtggatcttcggcggacaggacgcgggattcagcagggttatatataccttggtggctcttgcgggaatttggtgcatttctcttctcttcagaggaagggaccgcgagcctgacagaaactatacctgacctgccccgacggcgatttttcgccgttacataaaagcaaagaggaaataaaaagtaaaagctgcagacattacgcctgcagcttttaaactgtccgcaaagtttatcggaattttgacggtaatacggctcccttgtgtaaagggagctgtcgcgaagcgactgagggattgtggatttacaaacatatttccgcgcaaaaacgtgatttgagtttttgctttgtacccgttgtcggtccgatttaaattgaaaaaacaaagcaggctttacgttaccgtgaaaacctgctttatctttttttcgaaagcctcagacgttatgtctgcagcctttttgtcattataaccgcgtcgtccgtcgggtcggaataatatcccctgcggacgccgacggggacaaatccgcatttttcgtagagcttctttgcgggaatgttgcccgagcgcacctcaagagtcagctcaagacagcctttttctttggctctttcttcaagggcggctatgagcgaaagggccgcgccccttttgcgaaagagcgggtcaacggcgacgttgtttatatatgccgtttcaaggacggcgtcggccgagatataacccgccacggtcccgttttcaagggcgcagagaaatatgctgtgcccgtttttttgtgtgtcgagaatgttctgccgagtccacgggtgggaaaaacacattttttccagccgttccaccgcgtcaagcatgctttcgtcaaaatcagccgttttcatcaagcagctccccgatttttttcacaagctcgtcccgacaggcacggtagacgtcaagatttccgccgaaggggtcgtcgacgccaagcggttcggtcaccttttcgccgtcgttaaaggcgtcggtgagaatgattttgtgggtggtgttcagcggaaccacacggtcggcctcataaaaaaggtcgtttgacagcatgaccgagcggtgatttgaaatgtctacgccgatttccttgcaggccgaaacggcattttcggcggggagcataccgggagaaaccgaaatgcccgcgcttttggcggcggcgtcaattccgcgctcttttgccattttgttaaaaataccctgagccatggggcttcggcaggtgttgccggtgcagataaaaagatattttttcatcagtcgttcacgctttcggcggcagattcctccgaggcggcgggagcgggctcaatgacggttttggaagaaaggtttatgtcggggaaggctataaaggaggttcccgcattgaccgaaagctcgctgccgtcggtgtttttaagagtcagacaatcggaggcgtcgccctttgaccatttgatttccttgattttgccgtcggaaatataatatcccgagccgccgtcaagatcggtgcggacgtgataaccgtcggaaaattcatgtgtgggggcatagagcacgaaaacgttgtcaaattcgaatttttcgtcggtaaaataatccgtctgagcctttccgaaggggcagcggcggtatttgcctgtgtcggcgtcataggtaaaggtcgagtagttgtctcccgacatataatattttatcgaggtgcactcgttgccttcggccgtctttttgtcggggtcgttaaagctgaaaagggttttgcccgaaagatcggaggaaatgctgctgcggtatttgtcgtaaacggcgtccgcaattgtttttccgtttatgtagagggtgtgttcataggcaagaccgttctttatgcgggtggaaagactgtcgctttgggcgcccaggtcgaagaaatcgaagttgtcaagctcgtttgcgtagggacgggtgtagcggtcgtccatgccgcagtggacatatatcgcgtcgagggatttggcaagctgaacataggaatatcttgccgagcggatggttccgagtctttcgcattttgaaatgtcggaaaagaccgccatgagacgggaaattcctccctccacaaggcattcgaaaaccacgtcggcgtcgttaagaccggtttgaacgggctgagcggtggaaatgttgttgaccataaccgcaacgggacgtttgcctacggcgctgtcgtcaagctcaccgtaaattcccgtgagaagattgagatttcctttgtcctcctctatggaaaccgccgactgtctgccgtcgctttcggatacggggtcggtcttttcgacgcagcccgaaagcaggagggcgaaaattatcgccgaagaaatcaaagcataaaactttttcataagcactctttcctttacatttgtatatttattatatgataaccgattttacccgtttttacaagtgctttgaaaaaaacagccgtcaaaaaccgcctccttttcggggaggcggcgaaaaaaactgcaatcagagcgttcctgtgacggtcagaactgcctttgagggagtgaccgtgacggctcccgtcgtcgaatcctgaacgaaggttgcagcgggaagtgtgatttgccctgcggttgtggagaaaactcccgtcgcggcgtcataggtgtatccgtcgggggaggtgagcgccgtgccgttaagggtgaccgagatgtcggataaaatgggattgaaggtatcggttatgatgaggttgtcggcggcggtcgcttcggtgttgcctcggttttccaccgtgaaggtgtaggtcacacgtccgttttcggcaacgggggagggagaaatgctcttgccgatggaaagaatcgggcgggctgcggcggtgacggtttcgtcggcggtgacggcggtgattcccgtgcccgaaagagtgaccgtattggttatcgacgaggcggcggacaggggagccgcatttgtcagctcggcgtcataaactattacggcggtggctccggcgggaatgcttattcccgaaaccgacatgggcggacctgccgtgacggtgggagcggtttgaagtgtgccgtttatataatagagaagcgagccgccgcgatagcttaagggatagaccgtttgggttccgatcgagtaggctccgaggttgtcggtgagggtgagccccgtaaagggcgccgaaccggaatttgtcgccgtgacgacataggtcactcgcccgagctcggcgtcatagcccgctcccaccgcggtttttgtcagcgcaagggtttccacaagctcggcggtggcgatgttggaatttgtcgaaccgccgttataggacagagtagcttggtttgtaatggttgccataaaaatcctccttaaattcaagaccggtctacacttcagtatatgtcccgaaaaagcaaggttgacaacctgtttgccgagctttcagccctcgacgcgggcggaaaggccgtcggaaagcgaaaagctttggggctgtccgtttttgtatgagattttatatgtttttccctcaagatttcccgaaaaggtttcttcgccgccttttttgccgcagtatgtcagcctgttcggcagcgaactgtcgtcgaaaatccgagctgtttttgcaaaaaccgagcgggtgtcggcgctcggcaatgtgtttttcatgccgaaaaaagcaagctcggttactccgtcggcatatgtgacggtcagtccctcaagggtgctcggagcaataaccgtgaaaatatatttgcccgtttgctcctttatcatgtcaaattcatattgctccgacataaactccgccgatatttttgccgaaaagcactcgggagtttttgcaaagttcccggaattacagccgcaaaaaaacagcagcaaaaaaatcattgccgctgttttgaaaaaatttttctttttcatttattctccgcccttctcgtattcgagaaacagtcggggaagctcgtttaaaatgtcggaaggcagcatactgcgctgggattttttctctgccgccaagtctcccgcggcgccgtggatgtaaacggcggcctttgcggcggtttccggcgaaagcccttgagccaaaaaggaaacgagcataccggaaagcacgtctccgctgccgcccgtcgccatgccgggattgccggtgggattgataaaaacgcgcccgtctttcagcgctaagacggtgccgtgtcccttgagaattaccgtcacaccgtattttttcgcaaaatcggaggctgttttttgcctgttttgctgcaccgttttgacgtcggaatttataagccgagccatctcggcgggatgaggggtcagcagaatttcgcccgaatgtttctctaaaagatttatatgctcagacagggcgtttatgccgtcggcgtcgataacaagaggggcggcacattcctctatgcaaagcccgatttcaagggcggtttgctcggtgttgcccttgccgcagccgatgagcaccgcgtcggagctttttatgccgctgaaaagaagggaaagagcgtccccgccggttttgcacactgaaaatacggcctccggaaccgaagaggaaacaatgggatatatgtcctcgccgacaagacctctgcaaaggccgacgccgcaaagaagggccgctctcattgaaagcacggctgcgcctgccataccgagggaaccggtgtcgcaaagacattttccgaaggtgcccttgtgactttcggggtcgcgttttgagaaaaatccgacaaaatccgaagggtttaccatggttcaacctcttttataatcaagctttacctgatagggcagggcgtttatgacattttcgagaattctttggtcgggctcaaaaacgacaagcacccttcccattttcgggtggcggagtgtggcgcagaaaaggtcgccgttttcgtcgcccacggcaaagattttttggtcaaaggttttgcccgacaactttttttcgtcatatttcgaaaagctttcaaagctgtccaccgtggtggaaatgaggtgctttcggctgcttttgttgattattttgtcgatgtcaaaggagccgtttgtgaccgaatattcatattccacgttgaaaaatgccgcaagcttaattgcgccgtaaaagacgagcacggcaagcattatgccgagcaaaaagaagttgggcatatattttatgaccgaaaacattatgacggctcccacggcaagcccgccgagataggtcgcaaaaacggcggcaaggtcgagagcggttttctttttctttattatctgttcaaaaaaaatatccataaaaacctccgaaaagttgcacggaaaaatgcaaccaaagcatatttttgaacccatttatgaagccgtcttttcggcggcttgctgttgtccgtcaaaaaaagaaaggagtttaaaaatgagaacacttaatattataatcgatgaatgggggagagtcaagaccgcaggctttgcgggacacgcgggcgagcacaacgcaacggcggtttcggtcgagtttgaggccgatttcggctgtgattactaccgaatgttcttttgcgccgacggaggcgagccgattaagacaaaccccatgtatgtcaaaagcggcaagctttattacactctgccccaaagcgtgaccgagctgggaagcagggtcgcatggcagcttgtggggtataaaaacagcggcactcagaccgtcatgacggtgaaaagcgataccgtcacccttgatttcggcggttcgcttaacgacacgacgctcacggcgtccggcgaaacgggaaacaccgtggagagcgagcttaagaagtttgaggattttctttcgtcgtcggacggttttgcaaaaaccgaaagcaaggcgcaggccgattttgagacctcggctctcttcggcaatcactacgcgcccaccgacaaaacgggagagcatcttaaatttgtgcgggtggggaacatggttaccgtgtgcggctcggtgatcttaaatacctctctcgaccgcggccacaccgaaactctgaatgaaagggtcgtgatttacctgccctttaagccggcgggactttattatgtcacggggctttcgggaacctcccaaagggtcatgtatcttaacccgacctattcctcccttgtcatggcgtcgggcgagcaaaacaacggcgaaaccgtgagactttgtttttcctatatatgcgaggaggacaaatgatatggaaaacgcaccggtgaccgaaaacctctgcaaggagcggcgaagcaagtttgatgaacgctgcgcgcgggacataagagacatagcctctcaggagcggcggctcaagacccttgaggaaatgtccataacaatgggtcagatcctcaaaaacatggatttgaaaaccgagcagcacgaacggcgtataaccgcccttgagggacggcggatttctgttttaaacaaatgggaaaccgcctttatcgcaagtttgacaggtattgtgcttggatttatattttcctttattttttgaaaaaggtctccccttgaggggagacctttttgttttactctatgtcgcccttggcctttgcctcggcaatgaccttttccaccacggcggggggagcggggtcataccgcaaaaagctgctttgggaaaaa

SEQ ID NO: 180 - DNA, 8078 bp, Unknown
  16S sequences of unknown bacteria
tgaaaaaaatcgttttaaccggcggcggcacagccgggcatgtgacgcccaacattgccctgctgccggcgctttgcaaaatgggctgcgaaatccattacatcggcgacgtcaacggcatggaaaaaaggctgatggcgccgtttgactttgtgacataccatggaatctccaccggaaagctgcgccgctatctttccgtgcagaatctcaaggatccttttaaggtgctaaagggcatttctcagagcaaaaagctactgggtgagattcgtccggatgttatctttgccaagggcgggtttgtttccgtgcccgtcgtcatggccgccaaaaagcataagattcccgtcgtgctgcatgaaagcgactttaccatcgggctggccaaccgcatctctgcgcccagggcctcaatcgtatgtaccagctttgcccccacggtaaacgaagtcaagggtgggcacggcgtatggacagggtctcccgtgcgcgaagagctgctgcacgccacgcgcacccaggcgcaggacttttttaaatttcccgtgccagagcagcctaccctcgtttttatgggcggcagcctgggcgcgcaggcgctgaaccgggcgctttcggactgctttgaggcgcttgtctgccggtacaacatcatccatatcgcaggccgcggcaacctagaccccggcttggcacaccccaattaccgtgcgtatgaatatttgaccgaggaaatgccgttggtctttgccgcagcagatctgtttgtctgccgcagcggcgccaataccctgtttgagctgctggctaccaagcgccccggcgtactggtgccgctgccctccaaatccagccgcggagaccagctgctcaacgcggagtttttcgccgagcaggggtacgccgatgtgctgccgcaggaaaccatcacccccgagtccctgcaagcagccatccaccatgggctagagaccgcccaggcaaagcagcaagccatggcacagtcgcccatgcaaaacggaacggaaaacgtgctgcggcaaatcaaagtcgccgcaggctgggaggaataaaatgaccgatcttcaggcattgtttacgcaatacatagaaggaaacgccaaggaacaggagcgcgccgccaagcagattgcccaaaccaacggtgcgcaggcctttttgatggaaaagctgtccggcgcccaagcgcgtgctgcgttggcgctgctgggccgtgcggcccggcgggaatcggtacgctgggcgctgatggacaaaacgcaggagatcgttccgctgctggccagcgaggatgcaaaaacccgcaaaaatgccgccattgtgctggggcagatcgggcagcgggccgtcgtgcccgccctatgcggcgcgctttccaaggaaacgcagcagtttgtgcgccccagcctgatccttgcgctggggcagctgggcggcacggaggcacagcaagccgtcaaggcgctgcccctgccggagggcacggataaaaataccctggcggagcgggacgccatccaaaaagcgctttcccggctagccccgcagaaaagccgtacctttactggctttgccgcgccccgtccggtatggctgatgccggtcaacgggctgattggctcgcttttggcagaggcgcgggccaagcacattgaggtaaaacaaaagggcagcgtggtggaggccgtgacgcgcagcctgccttctttgtatgcgctgcgcggcttttacgaggcgctattgccctttgccgtcggtgtgaaggcagagcctgaagccttggcagaggccgtggaggcaggcgggctgtacgttctgctttgccaaatgcacgatggcagtggcgcttttcccacccggctggaggtgcgcggccctggcatagaccgcgccgcgtttgccagcaaattcttcgctcgggtaaacggcgcgcattttgtcaattcgccgagcagctacgatatagagctgcgctgctggataaaaaacggacaagctaccctttcggtgcgcctgcatacctttcaagacccccgctttgcctaccggctggaaagcgtgcccgcctccatgcaccctgctgtggccgccgccttgctgtatgaccaccgccgctacatgaagcagacccataccgtgctggatccgttctgtggcgcgggtaccctgctcatagagcgcaaaaagctcatgggcgccaaggcctttaccggcttggacatcagccccaaggccttttccattgcgcgcgccaactgccacgaggccggcctgcatgccaaggtattcaaccgggactgccgcggattccacagcgatttcggctatgatgaaattctgtgcaatttgccctttgggcatagggtgggcagccatgaacagaatgaaaggctatacgacgatattttgcagcaatggcccaagatcctgcgcccgggcggctttgtgctggctgtcaccaacgacaagcagctgttttctgcgctggccacccgccatggctggaagatcgcttcgcagatggccttttctgccggcgggctttcccctacggcgttcttgctccaacgttgatttctgcatagaaaaagaggaagcatcccgcttcctctttttctattcggcggccaaacgctttttcattgcgcggtacagcatcgtcacaaacgccgtatacagcacggcaaaaatggccaaacttcgcagcccgaatggataagggcctgggaagccctctatcagcagtgtaaccagggcggagagcagcaaaaaagccaccaggcaaaggttggcaaaccgtatccaaaaaggcccctgtgttctggaaagcaaaacgccgatgccatacaccaagccgccgcacacttgaagcatcaagccgccccaaacgcaggtcgccgtctgcgcctcgtaccagctgcctatggccaaaatcagccccatggccatcagggccgcagaggataaaaacagaatctgcccagacaggggttttgtctgttccgcctgcatggtgtttggttctgggccctgcactcccatcaaaagataatcggtggtaacggcaaagtatcggctcatcgccacgatcttttccacatccggcgtgctttgcgtgctttcccatttggatactgcttgccgcgacacccccaacgcttccgccagctcttcctgggaaagtcccttttcctttctcagatgctgtattctctgtgccagatccatttgatccctccttttgccccatgctatcaaataaagcggttgccttgctacccacttccgttggtattttgtcaaccgccggttgcctttatgcctccggcataaaaaaagcgctgtttgaaagcgtttcaaacagcgcttgcatgctaaaatgactcttacggcgttgcgccctggccggccagcctcacatccttaaagcctgccttgcgcaccacatctgccaaggacgcgtaggcagtggcgtctatgtccgtaccgtctgccttggccaccgtcaccgaaccgcctgccgggatcttgtacatcagcgccgacagcgccgcgctatccgccacatgcgccttaacactctgccccagctcatagccggcaaacgaaatattttgcgcattggcctctacatccgggctaagcaatacatagctgccatccgcctggatatacagcttccaatccccagaggcttccggcaatccgttttcctgcggcagcgcacccaccgcatccgccgtcagcgtctctgcgccgctggcctccagcacagcctgcgcgcttaccgtaggcgtagggcttgcttttttttgctcgtcggtcggaaaaaacgcttcttggaaagcgaagaaagccaaaatcgctatgcatagcgtcatttggatcatgatctgctttttcgtcatcggcggacgttttctttcccggtaatctggcaacggaatgcctccttttgataacatagaaatatctttgtaattataccgtatcggcatatttttgtcaaaggattggcgcatattcggccataatatggccggcggcgcgaatgccatccaccgcggcgctgacgatgccgcccgcatagcccgcaccctcgccggccgggtacaagccgcggatggatgggctctgcccatcctccccgcgcaaaatgcgcagcggtgcgctggtccgtgtctctacgccgcaaagcagcgcatccggccggtcaaaacccttcaggcgcctgccaaacgaggccacgccctctttgatgccctgcgccacaaacccgggcagcacggcggatagatcgctcccctgcgtttgcctgggatagcttggaagcacacagcccagctttcgggtgcactttcccgccgcaaaatcgccaaaggtttgtatcggcgccgcatagccgcctccgcctgcggcaaacgcagcccgctccatctcccgctgaaaggcaagcccgcccagcagcccgcccggcacatcctcctgccgcacctgcaccaccacagcgctgttggcgtttttcccgtcgcgtgcgtgctggctcatgccgttgacgcacagcaacccctcttctgataccgaaggaatcacctgcccgcccggacacatgcaaaaggtgtatacgccgcgtcctccgctctgcgccgtcagcgcatattccgctgcgcccagcttgggatgcccggcataccggccatactgcgcctggtctatcatcgcctgcggatgctctatgcgcacccctaccgcaaacggcttaaagaccatctccacaccatcctgggccaggcgttcataggtgtccctggcgctgtggccgatggccaacaccacgcaggaagcaggaatctcgataacctgtcccttatgcagagccttgaccgccgccaccgccccttcccggtagacaaactctaccgcgcaggtgtcgttttgccatgcgccgcccttttgcaacacctcacgcttgatgctttcgatgaccggcctaagccggtccgtgccgatgtgcgctttgttttgtatcaagatctcttggggcgcgccgtgctgcgccagcgtttccagcaccagcctgcccagcgggtctttcccgcggctggtcagcttgccatcggaaaacgcccctgcgccgccatccccaaacaatacgttgcattgcgggtcaaacgcgccgccatcaaaaaacgtttggacggtgcgctgccgctgtgccaaggcacttccgcgttccagcaccaccggcgcatacccctgccttgccagcatcagagccgcaaacaacccacaaggccccgcgccgatgacaacggggctattctgcatccgttttgtgcccagcgcaaacgccggcgcctttttctcctcgatcggcttccaatccggcctggccttcacgccccggcgcaccgaaaccgccagcgccacctgaaagcaaacgcctcctttgcgcgcgtctatgctttgctttgtgatctccacagcttcaatttgcccgggcgcaatccccatcgccttggccgccaaaggggccagcgccgcctcggtttgctccaaagcccattttacctgtaccgcatatcgcttttgcatcgccgcctcctataaaaagagccggttccccggctctttgtcctattcaatgcgtcattgtaccggcccatcgatgagctccacggtcagctgtattttgtccgtggtaatgagtgttacgccgcttggcaatgacagctccacatcaaagctcgtcgtttggctgatgccgttgagccgtatcttcttgatggttacctttgtcacatcctccagcacggccttatcccccaccagcgtaacctgggaaggcgtgctatacaccgcctgaatctgttttccatctgcaatatcgcccgcatcctcaaaacaggcgctggccgatacgtcgatgggcacggtcttttgcgattttacctccatattcaccatgatggagggcagctcgcccacaaaggtaccgtccgtgatggcattgccgtccgcatcgcgcagctctaccgtgtacgactgctccaccgattctgtgactttggacagatccatcacgcatacacccttgctgacccgttccacgtccgttctggcgcccgtaatctggatggttttctggctaagctccggctcttcatggtaaaggtccggggcaagctcgccttggtattccaccgaaaccggcacggtattggaaatcaattcgtctacctccacctgaatggtggacggctctatccgcgccacctcgcccgttggggtcgtggctgtcagatggatatcatatgtgcctttggccttgatttttgtcaggtcggccgttactgtcacggtctggttggtaagctgccccatctcgctgacgcgcgcctctacgccgacggtggccttgccgaacacatcgttgaaattgccgcgcaccaccaggccggaagcctccagctgctcatagccgttggcctggatggcaatatccttgacattgcgcagcctggtcgggtctgtggaggaaatgacatagctccacagcaaaatggcaaagaacagcgcaatgatcttcagccatgtattatgctttagtttttgtatcacggaattcattgcgattttttcctccgatttttcatcttggcaaaaatgcggtttctttccgtgccgtccttgttttcatccccaccgaaaagcagccggcggatgccgcccgcagataggttgcggatcagccgcccctccaccactgcggagatctgccccgtttcctccgaaacgatgaacaccactgcatcagaaatttcggataggccgatgccggccctatgccgggtccccagctcctgtggcagatcttgccggctggtcagcggcaaaaagcagctggccgccagaatggtatcgccgtctatgatcatcgcaccgtcatgcagcgctgttcccgtcttaaaaatcgtttcgatcagcggcgcagagacacgcccattgatttgcgtacctgtctcgatgatgtctcccagcgccaccttcctctggatggcaatcagagcgcctacatgctgcttgctcatattgagcatcgcgcggatcagctctccgctggtctccatgccctcatcgttctggagggaatccaaaaacttgccccgtccgatctgctctaatccacggcgtatttccggctgaaagagcacgatcagcaccaacgcgcccgcgttgatcaaatagttgaaaatccaagtgacggcctggagccggaacagttccgtcaaccgcgatgcaatgaaaaccaacccaatgccctttaacacctgcatcgccctgctgcggctggccagcttcagtaggtagtagatcatgacagccacgagcaggatgtccagcgcatcgatcaaatcaaaccgggatatgctggccaatatgccgtcaaaaaatgtctgcacgttgtcatctcctctgcctagggcaaatatcggtcagtcctgtttttcctcctgcatggtctgctccatagcgccgagcttgccttcatccagcgaagcttttaccaagttggcctgcttaaacagcgcgggatcgttgagcggctttccctttttcaaaagggcctcgcccatttcatccagctttttccgcatctgttcggtctgtttagaagtttcggtatgttcaattacctgggagaggttcccttgttttgtatctttatcgctcatgtccaacgctcctttctcttgtatgctttttcattgtaacataaatccctcgttttattaaccaatcccctaccgaaatcttgtaattaaccaaaacttttcgtgacatttccttgtccatttccggggaaattcgtcgaaattttatagaaacaaagcccttttcgcctagaaatctgccgggctttgccaccagggaaaaccctttggcgaatcttgtcaaaaaaaggcggagaaaatttctccgccttttcatctttacagcgtaatcatccaagccagcagcgctgcatccgccaggcacaaggcggacagcac

SEQ ID NO: 181 - DNA, 1723 bp, Unknown
  16S sequences of unknown bacteria
gccattacgagaacaaccccgccacagtagacctgatgattcgttcctccaactcgatcatccgggatctggtgcgccgcggcgtccgctttgcgcgggatgaccacggggctctgcgctttacccgggagggagcgcactcccgcccgcgcattctgttccatgaggatattaccggccacgagatcacccagaccctgctgaacgaggtcctgcgctgcgagaacatcgaactgcgcgagcatacgactctgctggatttcttcgccgacgcctcggcttgcggcggcgtcattgctgccggcccggacggcgaaccgcgtgccatcggggcaggggcggtggtgctggcctgcggcggcatcggcgggttgtataaaaactccaccaacttcccccacatcacgggggatgccatcgccatggccctgcgccacggcgttgcctgtgagcacctggactatatccagatccaccccacgactttgtacagccaccgaaaaggccgtcgctttctgatttcggaatcggttcgcggggagggcgcgctgctgctggataaaaacggaaaccgctttaccaacgaattgcagccccgcgacgtggtgagcgcagcgatccgcgcacagatggaaaaggacggtaccgaccatgtgtgggaggatatgcgccccatcggtgaggcggctatccgtgagcatttccccaacattctggagcgctgcgaggaggaggggtacgaccccatccatgaaccgatccccgttgtaccggcccagcattattttatgggcggcatcacggcggacctgagcagccgcacagcactgccccggctgtatgtctgcggcgagacctgctgcaacggtgtgcatggacgcaatcggctggccagcaattctctgctggaatctttggtctttgcacagcgcgcggcagatgatatactatacggagaaccgcctgtctttacaggcgataagcccgatttggccccataccgtgaacaggaaccgctgtttgccgcgtatcggcaggaggttctgaccgctattgagaggagtaaaaaccatgaatgagatcacccagctgctgcatatagacccgctgctgctgcaagcgctgcgggaggatattccggaggaggacgtttccacaaacgccgtcatgccccacgcctgccccggcaccgtagatctgattgccaaggaggatggcattgttgccggtctggcggtctatgcccgcgtctttacgctgctggaccccggtgccaaggtggaattcttctgccgggacggcgataccgtacagcccggccagaagctggccgttgttacgggcgatatacgcgccctgctttccggtgagcgcgttgcgctgaactacctgcagcgaatgagcggcattgccacctatacccatcagctgtctgccctgctggaaggcaccggcatcaccctgttggacacccgtaagaccagccctaacaaccgcatttttgaaaagtacgctgtccgcgttggcggcggcagcaaccaccgcaccggcctgtccgacggcgttctgctgaaggataaccacatcggcgctgccggcggcgtggcgaaggccgtcaagatggcccggcagtatgcgtctttcgtccgcaagatcgaggtggaggttgaaacgctggaacaggtcaaagaggccgtggaagccggtgcggacatcatcatgc

SEQ ID NO: 182 - DNA, 13126 bp, Unknown
  16S sequences of unknown bacteria
ccacggctacgaaggaagctccctcaaccagatctgtgcccgcggaaatctttccaaagggcttttgtatcattattacaaaaataaggacgcgctctatctatcctgcgtgcatgtgctttttgatgatatgacgcgctatctccgcagcgagatcaatctttccacagtcacggtagaacaatactttactgtccgcatgcgctttttcaggcagtatcccctgcaccgcaagctgttcagcgatctattgctgtatccccaaaaccgtctgcagcaggacatcggacaatgccgcgcagaattcgacgcttttaacaatgcagcgctgcagtctgttctgcaaaaggaacctctgcgcagccagttatccatggaagaagctctgctgcagtttcgaagctttgtccactttctcggcatatacatccgcgaagacgctgcgtccgatgccgagcaaaaagccaatgatctgctccagaccatgctgtacggcctcctggcacggtaaacatctgctggaacacttccagaccgcaccagccaccggttcctatagcctgcttcttacaaaaatgtaagctatgcagagcaaactgtaagccaaaacgatggcatacaaactgcagtactggtaagataaagccacaataaatcgaggaggcaccgtttgatggtcattttggaagtacggcacctgaaaaagacctatgttccccgttttggcggcaatcaggtacatgcgctgaccaacgtaaacttttcagtggaacagggcgaatatgtagcaatcatgggagagtccggcagcggaaaaaccacccttttgaacattctggccgctttggaccgccccacatccggcgaggtactgctctcaggcaaggatctgagcaaaattccggacggcaagctggctgcgttccgccgcgaaaatctgggctttgtatttcaggatttcaacctgctggacacattttcactggaagacaatatcttcctgcccctggtgatggcaggcagatcctatgacaccatgcgcagccggctcggccccattgccaaacagctcggtatccaggagctgctgagcaaatacccttacgaagtatccggcggtcagaagcagcgcgcggcagtagcccgagcgctgattaccaatcctcagatcattcttgcagatgaacccaccggtgcgctggactcccgcgcagcggacaatctgctggatctgttcggctgcgtcaacgccgacggacagaccattttaatggtcacgcattccgtcaaagccgccagccacgcccggcgggtgctgtttctgcgcgacggcgaagtataccaccagctttatcgcggcgaagagagccaggaagcgatgttcgcccgcatttccgacacattgaccgtgctggcccaaggcggtgaagtacatgcgtaagggcagcttctacccccagctggcactggtgaatctgacccgcaacggtcagttttacctgccgtatcttctctcctgcggcggcacagcagccatgttctacatcgtagcctacctcaccaaaagcgacttgatcgccaatgtacggggcgcggcctatatccagagcctgatggcacttggctgcatgatcatcgccctgttttccattgttttgatgctgtatgccaacaattttgtgatgaagtgccgccgcagagaacttggtctttatcatgtgctgggcatggaaaaacggcacacagcccatctgcttttctgggaaacgtttctgtgcgctctggcagccattgccggcgggcttaccgcaggcattctcttttccaaactggtgcttctgttgctgctgcgcctgaccaatctgccagttcagttcggtttcgatatcagcccgggcgccatcggccagaccattgttttatttggttttttgttcttgctaacactgctgagcaacctggtgcggctgggccgctcaaagcccattgaacttctgcacagcgaccacaccggtgaaaaagagccccgcaccaaatgggtcctggcagcgctcggtcttgtgtctctcctgggcggctattggatttccctgaccgtaaaagatcccatttccgccatgctgctgtttttcgtggcagtgtttctggtcatcatcggcacattctgtctgtttaccgccggttccattgccgttttgaaacgtctgcgcgccaatcgcgctttttattatcagccccagcactttacggctgtatccggtatgctttaccgtatgaagcagaacgccgtggggcttgccaacatctgcatcctctccaccatggtgctcgtcacagtatccaccaccgtatgcctgtatctcggccttggcaacacactggataacctgtatccccatgacatccagatctcacaacggcagaaaaatgccctgaccgatgcagatcctgctgcactgctggcccagacggaggctgcggctgccgaagaaggccgcacactgcgccatgaaagctatatcatccattcccgggtctactggaccctgtccggcgacacctttcatttcgaaaatcagcaggaggggatcgaatataccgtttccctgatgacggcagcagaatacaaccgcctgaccggccgcgccgtatccctggcaccggacgaaatgctggtctacacctccgaaggaaccgtaccggaaactttccggatcgaagccacttcctaccgtgtggcgggtacgctggatacgtttcaaggcgaaagccgcgccatgatttccaacgtccccaacgctgggtttgtcgtggcggatgacagtgttctttccgctatttacgcgcaaagcggtggaaatttcaccacttacctcgactgctatctggactgcgacggcaccgacgcggaaaagatcgctttttacaatgttttaaacaatacaatcggcgcggctgacgatatttatatgaacagccgccagctcagcgcgatcgatttttattccatgtacggcggatttttgttcctgggtatgtttctgggaatcctcttcctatccgctactacactgattatctattacaaacaggtcagcgagggatacgaggaccgcaagcgttttgagatcatgcagcaggtgggcatgagccgccgggaagtgcgccaaaccatcaacagccaggtgcggatggtattcttcctgcctctggctgcagccgcactgcatattctgatggccttttccatgatccgcaagcttcttttgctgttctcactgaccgacgtcaaactctttgccctgtgcaccgtgggcacgctgctgatcttcagcgccatttacgccctggtatattcctttaccgccaaaacatattataaaatagtgcgcagcacctgagttccatggccacagcaaacaagcgcgccgcagaggttataccctgcggcgcgcttgtttaccggaatatgggccgctcagcggcttcctttctcctgtacacagaacgatcgaaccgtactgcgctttcccatatgataaaacgctcccaacgagcaacacagcatcatcacagccagtgcggccagcatcataaacgcggcgtggctgcccagcatagtacctgtgactacgtcccccggcagctgtgcctgggcagccgccacaatggagctgacaatcgacgtgccgacagcgccgcccagctgctgggtcgtattgatcaccgcgttgccgtcagcattcagctccgcactgagctggcgcaggccgttggtcatgctgttgcccatagaacagccctgaccaaaggcaaaaaagagataaataaccaaaaacatagcagcattcagctgcagggtaaaggcgccgaaacacaccgctgcaaacagaattgccaggtttcctattagaatggggcgtttcgcgccgaaacggtccagcaatcgaccgctgaacggtgagaccgccgcgcccacaatacagcccggcagcaacagacaacccgctgcaaaagcattctgatgcaaaacaagctgagcatagttcggaattaaaaagccgatgcccaagcagatcatctgcacacacacaatggccagcatactcagcgtgaacggagcacagcggaacacctgcacccggatgagcggcgcctgcgtgcctttgcagtggaaataaaacgccgccgcgcacaccgccgccgctgccagaagccccagcgtatgcgcgctgaaccagccggcggaggacgcgccggtcaacgcaaagataaagcacgcgaacgcacaaaccagcagcaaatattccagccatggaaaagacatacgcaccaattccgacacctgccggatggacgtgacaccgaataccaatgacagaaacagcaatggtagcagcaccacaaaaatcatgcgccagccgaacgcttccacaatagcgccgccggcaaagggtcccaccgcgggagccaccgccgtaatcagcgacgctacccctatcatcagccccattttgtccagcggtgcctgctctagcacaatgttgaacatcagcggcagcgccagtcccgtacccacgccttggatcagccgtccgcccagaagccaggaaaaggacggtgccgcggcagccagcacggttcccaaaaggaacaggagcgccgctgtcagaaacagtgctttcattgcaaagcgccgcttcagataggaagatgccgggattaccagcgccagcatcagcagatatcctgtggtaatccactgcactgtggcggtcgtcacagaaaattcctccatcagtgcaggaaaggtcacattcatggccgtttccaccaccacgccggaaaaagacataattccagtcgccacaatcgataaaatcagttttgtgtccaaagttcgctcaaacggtttcatattaacttgattgctccttctcctgtggttcggtcttgcgcaagcggatactttccatgggacgtttccgcataatctgatacacccggcggatggtttccgccgttgtgcacagatccgctggatccaactcttcaaagcactccgccaaaaaactgtggtagccaaacacataaaaatcatagtattgctgtcccagtgctgtcagagaaacccaaacgacccgtttatcgttcgtgtccgcctgtttgcccaccgcaccaagctgctccaactctccaatcaggcgggtcacactggggcgcgtaatccccaatcgggcactgacagcgctaacacagacatcgccttcccggctcaaaccgtgaattgcatcgattactccaatatgacggggcgtcatccccttcggcagcttaggcagcagttctgtaatccgtttggcctcatgacaggccgccatcagctcctgcaccgcttcaatttccatacgcgcctcctgaaccattatttttacaataattatcttaagtaattatttgtgataactaaattataacgaactgtttgcgcgtgtcaacccgcttggctccataaaatgcaaaaaggcaatctgcacaaaaaatgcgctttgaatttgtctcctattcatcagaagcgcttctttacatttacaatttagtatggtaaactgttgccgaattaatgaaatacatcaattcgctgaatttggaggatgacatgatgaaaaacagcaaaaaacttgcggctcttgccctctctctggccatgaccggctctctggccgcctgcggcggcaatgccaacacccccgcctctgcagacgataaccaggcagcgggcataatgtatgccgtagaggccggttccgccggcgaagccattgccaaagaaaacggctatacttataacgccgtgtcttcccaggccgacgcgctgatggaagtggcgtccggcacctctgaggcagccatcatcgatctgctgatggccggcgccatgatcggcgaaggcaccagttaccctgatctgacctacaccgatcgcctcactgaagaggaatacggcgtgggctgccgtcaggacagcgacctgaccgattatatcaatactgttttcgccgaggcttacgccgacggcaccatggctgccttggccgacacctatgccatctcccaggatgttttggtggaacagagtgaacctgccgagtttactcccgccgaagacggtgacgtggcttacatccaggacaaaggcacactgatcgtaggcatcaccgagttcgctcccatggattataaagacgagaatggcgagtggatcggctttgacgccgacctggccaaactggtggccgaaaaactgggcgtggaagcacaattcgtcgtcatcgactgggacaacaagatcatggagctgaattccaaaaacatcgatgtggtatggaacggcatgacgctgaccgacgaagtcacttcttccatgaactgcaccaacgcttactgcaaaaacgctcaggtggtcatcaccgcagcgcagtaaaccgtttttcgctcgattcgtaccttctctatgcaaaggcagggagtctccgctctctgcctttgcccctgccattccaaatacaaggatgtgacgccaaatgtttctgaatgttaccatcagcctgctgcagagcctggcagccacgatggaaatcttttttctaacgctgctgttctccctgcccctgggccttgtcattgctttcggctccatgagcaaatgggcgccgctgcgctttctgctttatggccaggaagcgcccggcgcgctgacgcgaactttggccgctttccgccccatcggcacggtgtgcggcattctggtgtggatcattcgcggcacaccgctgatgcttcagctgatcgccgtgttctatgtaccgggactgctgggctgcgggctgtggggcgggcctgtcgggcgcatgagcgccaccgtggtcacattcaccctgaactacgcctgctatttttccgttatttaccgcggcggcattcagggtgtccctctggggcagcgggaggccggcgaagtgctgggtatgacgaagcggcagatctttttcaaggtcacgctgctgcagatgatcaagcgcatcgtgcctcccatgtccaacgaggtcatcaacctggtaaaagacacatccctggcccgcatcattgctgtttacgagctgacgttcacgggctattctttcatgaaaagcgccggcctgatatggccgctgttttacagcggcgcgttctacctgctctttgtgggtgtgctgaccattctgttcaaccgcatcgagcggcggctggattatttcaagtaaagggggctgcaatatggcgattttggaagtatcccatctggaaaagcagttcggcgccacccaggtgctgcaggacatcagcttctctctggaaaaagggcaggccctgtccatcatcggcgcttccggcagcggcaagaccacgctgctgcggtgcctcaactttttggaaaaaccggacggcggttctatctccgtggccggcactacaattttcagcgccgaggacagccccgcccaatatgagcgggacatccacaccaagcggctccacttcgggctggtattccaaaacttcaatctctttccacagtacaccgccctgcaaaatatcacgctggcccgcgaactgctggcaaaagagcatggcggcgaaagccacgcatccatcgaagcagccggccgagcattgctggaacaaatgggtctggcggatcgggcggatcactatccttatcaactctccggcggccagcagcagcgtgtggccatcgcccgcgctttggcgctgcaaccagacattctgtgctttgacgagcccaccagcgctttggatccggagctgaccggcgaagtgctgcgggtaatccgcactctggcagaaaaacgaaccactatgatcattgtgacccacgaaatggcctttgcccgggatgtggccgatcggctgatctttatggacggcggcgtgatcgtggaacagggcgaccctcatcaggttatcgatcacccccgctgcgaacgcacgcgccaattcctggcctgttacgcagaagaatcataaaaacggcggttggccgcgccgatgcgcgcggtcaaccgccgtttatttcctgccaaatcaccgcagctgctttccgtcggaaaacgcattgcccactttctcacccagcacacgataagccgctttcaccgggtcaaacacaataggctggagtttgtccggatcgatgctgccttcgccgtccagcacacgttcatccgcacatacattgacgatctctccgatcaggcagccgctttcggcgtcatagctgactacagtgcattccagggccatagccagctcatcgatcagcggcgcgtctacaaaggaggatttcgtggtgtgaaaacctgcctttgccactttgtccgcttctttgttgcccgacacgatacccacatagtcgcaggggaccacctggttcgcttccgccatgctgacggtgaacgccccccgcgccagcaggtttttcaccgttttgtgtcccgcgctcaggcacatcgtaatgcgcgtatcatcacagatgccgccccaggccgcattcatggcgtcaggtgtgccgtcttcgttataagtggccacaatgaacaccggctggggataggtccagggctttgcaccgaaattctttctcatatgggattcctccatttccttcgttgttatggcggcatggcgcccacgccgcacaaatgctgctctattttaccatactctccgcttccgatgcaatgcccggcttcacggcgaagctatttttttaatttttcgcaattccttttagcatattttactttatcgcgcgaaatcaacaataaccaaaccgttgagaaagcgtacgtatcctgccggaaacgatgcagcaagccgcagcagaaaagccggtagacatctctgttcgccaagcgcagtgtgtggcagcgcgcacaacgtaggcgggcagtttgttccgccaagtcaggcggcactacagaagcagtatccacatctatctcagcaaaaggtagttgctgggacaggagcattttttcttttttcccggagcagcgaaaggcgttttttccacgaagtacgatcacaacatcccctacaaaatttacctgggcgagaatgtacttctgcagaattgatacaacgtatatgcagacatgaaggtgaagcccgcgccgccgctcaatacggccgaagactctccggtgcgttctgcgatggtctggtagcaacgatacctggaagatccctatttcccaggaaatccaggacttttataagatgcaccgtccctctcccttggtacaggcttactgcagccgcagaagccgccgccagtcaggaagaataccatgatgtcttggtcaacatactccactcagtgcaggcagactttgccggcattctccagtttcccggcaacgagtcttaagcacccggcatattcttttttgcgcgcttccactatggaaggccaaaaaacgctcccgcaccgctgcgcggtgcgggatgccttttttcatccttttttccggatcatattcaggaaatacgtatgaaccgtgggattttcatccaattccggatgaaatgcagtgaccagaagatgattctcccgggccgccacgatttttccatccacttctgccaacggccgggccgctccggagcacgaagcgatatagggcgcgcggataaacgtcatggggacctttccggcgccggcaaaattcgcctccgtgtgaaagctgcccagctggcggccgtaagcgttgcgtaccgccgtgatatccatcgcagcaaaatgtatgcgcgcgtcgttctcaatgcgccgggccagcagcaataaccccgcacaggtgccgaatgtgggaaggcccccctgaatgcgggccttcaattcctcaaagatccccagctcccgcaggagcttgccctgtaccgtgctctccccgccgggaatgatcaggccatccatgctgcgctccagatcgcgtcgctggcggatttcaaaagtactttccccaagccgctccagcatctgctcatgctctgcaaaggccccctgcagggccaaaacaccgatggtcatggcttatttgccccgctccgccatcagcagttcgatctcctgttcgttaatgccaaccatggcttcacccagatcttcggacagttctgccaagagcttggcgtcggtgtaattggtcactgccttgacgatggccgcagcacgcttggctgggtttccggatttgaatatgccggatccgacgaacacgccctcggcacccagctgcatcatcagcgccgcgtcagccggggtcgccacgccgccggcggcgaagttgaccacaggcagtctcttgtgttcatgcacatattgcaccaaatcatagggcacctgcagctcttttgcagcgtcaaacagctcgtcatcgctcatggcgccaatgcgtcggatctccgcctgcatcatgcgcatatggcgcacagcctgcaccacatcgcccgtgcccggctcgcccttggtgcggatcatagccgcgccctcgttgatgcggcgcagcgcttcgcccagatcccgcgcaccgcagacaaaaggcacgtcaaaggccgttttgtcaatgtgatatttatcgtcggcgggcgaaagcacttcgctttcatcaatataatcgatttcaatggcctgcaggatctgcgcttccacaaaatggccaatgcggcatttcgccattacagggatggataccgcctcctgaatccctttgatcattttgggatcgctcatacgggacacgccgccggcagcgcggatatccgcaggaatgcgctcgagcgccatgacggcacacgcgccggcatcctcggcaatctttgcctgttccggcgtggtcacgtccatgatgacgccgcccttaagcatctgcgccagatttttgttcagttcaaaacgcttgttgtccattgcaatacctctccttattttacggacgccatgcatccgatcggttttattccgtatcctcaatcgtaccgccgccgagcacagtttccccgtcgtaaagcaccacagcctgccctttggtaatcgctcgctggggttcgtcaaaaacgatccgaagccgcgccccttcctgacgcacactggcccattgctcttggtgccgatagcgcactttcgccttcacacgcagcgttcccgtaatgcttccacaggcaatcaaattgatgtcgcccgctatcagcgtccgtgaatacagtgcgtgctccggagcaagtgtgactgtattcgccgcagcgtctactgccttgacatacatcggttccggaaaggacagccccagaccgcggcgttggcccacagtatagcggatcagcccgcggtgccggcccagcacatgccctttttcgtcaataaaatcaccgggcgggcagacacttccggtgaagcgttcgagaaaagccgcataatcgccctccggcacaaagcaaagatcctggctgtcgtgcttcctggcattcaccaaaccatgcgcctgcgcaattccccgcgtctgtgtctttttcagcgctcccaatggaaaacatgtgcgggaaagctgttcctgtgatattgagtatagcacataactttgatctttagtagggtcttttgcctttttcaacaaaaatttttgtctctccttgtcatattcgacacgcgcatagtgccctgtagctacgacatcataccccagctcccgcgcccggtgatgcagcgtttcaaatttcaaaaaacgattgcagtcgatacagggatttggtgtacaacccgcttgataggcccgtacaaaacgctctatcactgtttcgcggaaacgatccgaaaaattaaaaacatagtgcttcatacccagtgcataggccaccgcccgggcatcttctacatcttccagcgtacagcaggtatgggtgccgcacgcacccaccgtttcattttgatacagtttcatagttacaccagcacatgtccagccgtgctgctgcattaaaagcgccgccacgctggaatccacaccgccgctcatggcgatcatcgctttgcgcgccatttttttcgcttccctcctgtctgcttttacccaaactcgatcatgcgatcgatacacctgcgggccgcggccgtggctgcctccttcaaaaggatctcctcaccgccctggccgcacacaacatgctgtccccgtgcggtcagttttctattcggtgggcaaaaccgtttgtcccggccgtgataagacaagtgtttcgcaatgctgcgttccgtaccaaataaattcccgccgcttggacgcgaccgcatctgccgcaatggccgctgtagagccgacaaaatcagcccattctgccacccatggcacacattccggatacgccggcaattccgcctccggatacgccgccccgtgccgcttccgctcccttcttttcgcaggggactcttcctgtcctcaattcagaattaagaagccggggtcgccacggatgatggccccggctctcgtttgtcaaggatcaattctcgaacgcctgagaaaggtcggccaaaatatcctcaatatgttctgtaccaatcgacagacgaatggtgttgggatatatcccctgatccagtaactcctctgatgtcagctgggaatgggtcgtagtcgcaggatggatcaccagacttttcacatctgctacattggccaggagggagaaaattttcagcttatcaataaaccgatgcgcctcttcctgccctcccttaatctcaaaagtaaagattgaggcgccaccattcggaaaatacttttcataaagcgcatgatctggatgctcaggcagagatggatgatttacgtgctccactttgggatgcttctccagaaaatccaccactgcttttgtattttccacatggcgatccagccgcagcgaaagggtttccgtaccctgaagcagcaaaaaggcatggaacggagaaagcgtagcgccggtatcgcgcaacctgtctcttatacacatctgacgctgc

SEQ ID NO: 183 - DNA, 2660 bp, Unknown
  16S sequences of unknown bacteria
ccggcgcagtttttcaaagctgtcaatccccaccggcagtttcttgctctccatcgcgcagcctcccttgctccggattcctcccatacccttcctcacttttattgtaccgcaaaattgcccgcatagcaagccgttggcccaaagataacgaaaaagcccgtgcgcattcgcggcgcgaccggctttttctccgggtattgacagaacgcggaaaacatggcaaaatagtgtgggcaacgcgaaaagcgcggcctttaccatgccaaaccccttcacctggagatgaattttttgaagaaccgcaaagaatggcttgaagtactccacctgagctggccgcccatcctggaatctctgctgctctcgctggccagttatatcgactcggcgatgctgggcgcggtcggtcccgccgcgcaggcgtccgtggccgtgaacatttccaccgtgtggcttttgggcgggctgatgagcgcgctggggctgggctttacctatgtggtggccaactcggtaggcgcgcgcgattatcgccgcgcccgcagcgccgcgcggcacgcgatcctgggcgcgctgctgctggggctggcgctcacgggccttgtgcaggccatcgcgcatcccctgcccatgtggctgggcgcagatccggagatttacgataccgcgcgcgtatacatgcttgacaacgtatgcattatatggtataatgtatccggagatttacgataccgcgcgcgtatacatgcgcatcatcggcgcctcgttcgttttccaggcgctctcgcgcgcgtgctcttccattctgcgcggcgcggggcagatgaagctgccgctggtggtgaacgtgggcgggaacctggtgaacatcatcggcaacaccctgctcattttccccacgcgcgaagtgcagattttgggcttttccttcacgatgtggggcgctgacatgagcgtcgcgggcgcggcggcggccacgctcgcatcgcacgtgttcgcgggggtattgctgctgctggccgttttgcgcgccaacacgcccatccgctatcaaaggggcgagcgttgcccgctggatccacgcattttgaaggacgcctggcgcgtaatgctgcccaacgcgctggaacagagctgcctgtccctggggcaaatcgccatgaccagcatggtcgcgcccctgggcaccatctccctggcggcgcacaaccaggcggtcacggcggagggcatttgctatctgcccgccatgggcctggccaacagcgccaccacgctggtgggccagtcgctgggcgccaaggagccagaccgcgcccagcgctatgccaacatgacctgcgtcgccgcgctgggctttatgctggcgctttccacgctgctgttcatcttcgccgagccgctgatccgcatcttttcgcgcgacgcgggcgtgatcgagctgggccgcacggtactgcgcattgtggcctttggcgagccgttctatggcctgaacctggtgatctccggcacgctggccggggcgggcgattcgcgccacgcctttctctatagcgccatcggcatgtggggcatccgcacgccgatatgcctgctgatggtgaaggtgctgggctggggcctcgccggggcctggctggccatggccgccgacctgatcgtgcgcggcatcctctgcaccctgcgcctcatgagcggcaagtggaaaaccgccgcgctcactccccgctagagcaagacgcaaaatgcggccagtcttccgagcgaaacaaattatacgaggagaaacagccatggtacgcctagcaacggaaaccgacgcggaaatgctcgcccaattgaacattgccttcaacggccccggagatgccagcctggaacatattcgggcctctttgcgcgaaaaccagcaggaagtcgtcatagtggacgaagcaaacggaatccttacaggctttctttgcctgcagatcaagcgttccttttgttacgatacgtgcgcgctagaaattaccgagctatatgtccagccggaatatcggcggcaaggcatcgccagtcgcatgcttctgtttgcagaagagcattgccaaaaggaatattcttgccacggactcgagctgttgaccggggacgacaactggattgcccaggccgtttatcgcgccgcaggatacgcgccggatggggaattgcatctgttcaagcctctgtgaaacggcgcgcatagcgaatgaatcgtcaaagagggcgtgacccctcagtcagcttcgctgacagctcccctttcccaaaggggcgcacaaaggccgcgcgcagtgcgcgaaacaggccgtagtaagcccagtaaggcaaggaaagccgcgagtgagcttgcgaacgacgcggattgactatgccgcactgtggaacggtggcacggcgcagccgtgacggagggattggacaaactacggcgcaaaggcatcccctcagtcggctaacgccgacagctccccttgatgccaaggggagccttttgaatagtggcactaccgtaggaagtagccctttctatgtttccccgcccgcttccggcggcggctgcggcgtttcgcctacgccgcgcagcttgcggctgacggcgcgggcgcgcacatccacgctatccagat

SEQ ID NO: 184 - DNA, 32759 bp, Unknown
  16S sequences of unknown bacteria
cactctttccctacacgacgctcttccgatctgtcttcaactcggaatcgggaattttatccaaccgttccgcgtcgatagaagaggagctttgcgaatttcccgacgaactgtccgtcgaagaattcgtaccgcccgagctcgaagaagccgaatctccgttcccgccgcacgcgacggcggaaaacagcatccccgtgctcaaaagagccatgagcgccatcgtgatcttctttccctttctcatacaaagacctccttatgtcttcattgaaatgtattttacgcggctttccaaaacggcaaagccgaataatttttaattgtttcctgtgttctcgcccgcccgacagaattttttatttctatcaatgttttttatagggtgtgcatttaggactaaatgcacaccccccggggggtgaaaaattttcatgattttatctgaactttttacatcgttaacgttaacgttgtgtgtaataagtgcttttcccgtcgctcggacgggcataagcccccatttttaaaagaataattttttttcaaagactcaggccgtcgtgccttccactaaaaatacgcctttcttttcgatggctcggttcgtatcgcccgtttccactttggaaataatcatctcggtggcgcgcttggcgagtgcgagtttatccgtgccgacggtggtcaggcggcggggaatgtggatttcctgctgtacgttgtcgtagccgatcaccttgacggaaggcagattgtttttttcgatgaaatacagcgtttcgaacgccagcatatcgttgaagcagaagatgccgtcgggaaatccttcgggggacttcatcagcgaaagcaattgctgttcgagtcccgggacattgggattgacgatgcggggcttggagatgccgcgccttttaagttcctcttcgaatccgtgatagcgatcgtaagcgcaggtgagttcgagcgcttccgtgatgcacaccgcattcttgcagccgtcgtccgccagcctcgccgccgccagacgcccgccctcctcgtcgtccgtatggatacagtctatcctctttacgttcgtgcgccgtccgaataacagcacgggaacgttatagctcttgatcagttcggtcagttcttcgtccggttcgaggaagctgatgatgccgtccacgttatgggaaacggctgccatatatgcctcttcattgaggtgaaagctgcggacggagatggtcagcatggaatagccgcgttctttcaggcaaaactgaataaaatcggtcatgacggagaaatacagattgatgagattgtcgtaaatgatcccgatcagtcttgtcgagcctcttctgagggcgctggctgtggaatttttcacatagttgagattggaggctatttccagcacgcgcgtcttggtggattccgcaatatcgggggcgtccctcaaagccctcgacaccgtctgtggcgtcaccatcgcaatccttgccacgtctttgattgtcacccttgcttttctttccatttttctctccgacctttttcgcccgttacgccctctccgcacccgcggggattcggttttctccctttgctcgggagcttctcttcgtccaaaataaatttgcgctttgcggctttcccgccttttgctttctttcggaaaaacgctttccgaatcttttacttttcaagcttcgaaattctttgtctattccgcttaaagccggaatctcatttttcccgcctcgtcgaaatatacttccgcgatgcaggcgcggcggtcgccgctcggtttgtcgtaatcggtgtgaatatggaacgccgtatacagttttccgtcctttccctcgaaaaagcagttgtgcccgggtcccgaaaactctcctttctcgtacttcaagatgggattatcctcgtacttttcaaactttccccagggcgacgtactctccgcgcagcccaccgaatattcccgggaatcgaaacagttgacggaatagttgagataatatctcccgtttctcttccagagggcgggtccctcgttccaatgccattctttgctcaaagaagtttcccagggaacgtcgggagaagtgatttttttgggttccccgacgagagaacgataatcgggcgaaatctccgaacagtatatctcgctggtatgtaccccgtcgatgatgttttcgctgcaatcgcgcacatagtagagatactctttgccgtcgtcgtcctgaaacaaggtggcgtcgatcaccgcgtatccgaaatcgaacagcggagcgcccaaaagatccttaaactccccctcgggactgtcggcaacggccacgccgatgcgcagactgtgcttttccttccagcgcgccgtgaaaatcatgtaatattttccgttgcgcgcatatacctcgggcgcccagaaattgttttctccccacggactgtccttgtagcaatatccgcccttcgtccaatccgtcagattcttcgacgtgaaatacttgaatccgtcgggcgcggacgtcgcgtacatatagtaagtgtccccgtctttcaagatgaacggatcccctattcccgtaatctccgtgcgtatcattttcctcagttctcctttccgtttcgtcccgacgcaaacgcttctactctcttgccgcgcgccgtttgtcaacgctttaacgtttttcgtatacattcccgttaacgttaacgtaattttattatagcacctaattttcaaatgtcaaggggtttttagaaaattttttcaaaaaatttatttttttcacaattgtcgcttttcgacaaagaccgcgaaaatcccctcgcccttttgcgaaaaggaaaaaagcgcctgagggaggagttctatcccgcccccgattattttttgctcccattttcaaaattatcttttccgcggctctgttctaagcgctttcattttccgttttctcctctcttacttgttttagcaatagagataaaataaaagcggataatctgtcggtaggcggcggactttcccgactgtctatttccgcgccccggcgccttgtgcggagcgcggcgaggaggcaacgggattccgcctatttttaaacgctttctcgtccgaaaaacgcggacgcctcgtttgttcgtcaaagcttttttaaacgacgaaaaaacgcgaaatcgtccgaaggggacgattccgcgtttctctaagaccgccgggaaaattacttgcgttcgaaactatcgcagcaggtgcacttttcctcttcgcaggaacaggtgttgcccacatggatcttcgaaagcgtgcagtagtcgcccgaacagttatacttacattcggtgacgccgcagccgatgcaggtattgatttctttttcgttcatcatagtttaaaaaacctccttacgcataacttacgtatcatcagtatgtacaaattcctcaaagactattgacattttcggaaatttcctgtaaaatatataaaaagacagattctaaaagaattcccaaattcaaggagggcagaaatatgaaagtaattctcaaagcggacgtcaagggcaccggcaaaaaaggagacatcgtagaggtttccgacggctttgccaaaaacttccttttcaaaaaaggtcttgcggaaacggcgaccgcgagcggcatcaacgaaatatctcaaaagaaagcggcggaacaattccataaggcggaagagatcaaggcgatcaaagaactcgcggagtccttaaagggacagagcgtcgaggtaggcatcaaagtaggcgaaaacggaaaggttttcggaagcgtcacttccgcgctggtggcggcggctttggaaaagaaaggctttgacatcgacaaaaagaagatccagatgacggcagtcaaagccctgggtaccttcgaggcggagatccgcctgatggagaacatctccgcaaagatcaaagtgaacgtcgtggctctgtaatttttccatcttttctgttttaaatcgttctccccgccgcagaaacggcggggaatttttccgctccctttcgattgatgtgacgcactccgcagcctgtaagtcttttcatcgcccttttcttagcgcggcggatcattccgccgccataagcggcgaaaagcgcgccgcataaaaggacctgtcctgtcctatcctatcctgtcctatcctatcttctcctatcctatcttctcctatcctatcttctcctatcttgtcttaccctatataaagataaacgattctttgcccttgactccccttttctcttggagatttccgaatttatggcgcgcgggagcggcgcaaaaaatattttgtcacaccgcatgagaagcgcttgcgcataggcggaaaatgtgctaaaatagagctcgctgaaagggacccgaaaaaaaattcagccgcaggattcagccggaggacatatgaacgaaaaaaaagaaacggagcaggtttccggggaaaacgtgcccgaaacgcctcagcttccgcccaaaaagacaaaggaaagctttttgccggagggcagcgcgaaagaaaaatttttctatatagtgaaaaccgcgatcctgatcgccgtttccgcttttttattggcgttctcgtcctattgtctgatcgcccccaacgactttgccatcggcggagtcacgggtatcgctatcatcctggaaaaagccacgagcggcaggattccgcagagtatttcggtattcttcatcaaccttccccttctcgtgcttgcctttttcgtggtgaaaaagaaattcgcgctcctcactttcgcccacgtaattttgcagtccgttttctttatgcttttggagcggctgcacgttcccacgctggtgtttccggaaaaaatcttcgcggcgcttgccggcggcatcggaatcggcatctcgatcgcgctcggcttcaaagcgggcgggagcacgggcggagcggacgtcatcgccgtggtggtgcagaaaaaatttcccgcgccctccatcgcctggatgatcttcatggtcaactgcgtcatcatcgcctcctcctttttcgtctatcgcgtgcccggggacgcgatgcagagcgttctgcccctcatcatggccgcctgcgaacaatacgtcgaaagcaaggtaaacgattccatcaccaacggcttccattccgcgatcgaattcagagtcatcaccgacaaacccgacgaaatggcgctcaccatcatttccaagttaggcaggggcgtcacttccatccccgcgacggggatgtatacgcacgaaacgcactccatgctggtctgcgtcatcaaccgccgccaaatcgccacgttccgaaagattttgaaagacgtggatcccgattcgtttgcggtcatgtccaacgtttcgcaggtgctgggcttaggctttttctcgggcgacaattgattttctgacacggtaaacgttttttcggggggctttgtcccccgacttttttgcccgaaaagagctgaaaaaccttctttttccattttttggtattttatacccccgaatttaagaaatttcttttattttcaagggtttaaggcgcttctttttgcttccagggcttgacttttgcgtatagatacgctataataaaaatacttaaatgaaaatttaagaatctaaccaaaggggataactcttatgaacaaaggcgaatttattaaggctatggcagaaaaagccggcttcaccaacaaggacgcggccactgcctacgatgcgtttgtagcgacggtgacggaagctttaaaagcgggagataaaatccagcttgtaggcttcggctctttcgaggtcaaagacgtgcccgctaaaaccggtatcaaccctcagaccaaagaaaaggttgaaatcgctgcgtgcaaaaagcccgttctcaaattcggcaaagcattcaaagatacctttaacgcgtaaactaccaaacatccattatttgaaaagccgacggcgaaaacataaccgaaagcaaatgacgtatacaaaaaacggctgttgcaatgcgattaagcatagcgacagtcgctttttgttttagcgcttttttataaaatcagttttgctttaccgtgggcactccgtcaacatattcccactcgttgccccaatgcaccgttgcggaacagcggtctttccaacgaccgtcccatccgattggctcacttgtcgccttgcagtatatgtcgctaagacttgtacaatcgtagaatgcttgttttccgatagaagtaacgccgttgcctattgttatgtttgtaagaccggagcgaaagaatacattttttccgatagaaataacgttatcgggaattgttatgcttgtaaggcttgtacaatcgccgaatgcccggtctccgatagaagtaacgccgttgcctattgttatgcttgtaagatcggagcaaccgtagaatgcaaagcttccgatagaaataacgttatcgggaattgttatgcttttaaggcttgtacaatcgctgaatacccagtctccgatagaagtaacgccgttgcctattgttatgcttgtaagaccggagcaaccgtagaatgcatattctccgatagaagtgacgctatggggaattgttatgcttgtaaggcttgtgcaaccgcggaatgcatattctccgatagaagtaacgctatcgggaattgttatgcttgtaagaccagagcaaccgtaaaatgcatcacgacctattaccttacaaccgttttcaatattgacggcagtaatgtcatcagaggttacttccattacaataacatagagatttgtttcattgcctaaatatttgattccgtctttttcgttatattcaagactgtcgcaagcttcgaatgcctgaattccgatataaataacgctatcgggaattattacgcttgtaagactccagcaatagctgaatgcatcataatctattaccttacaaccgttttcaatattggcggtagtaatgttagagattgcgtccattacaataacataaggatttgttttattgcctaaatatttaattccgtctttttcgttatatttaagattgtcgcaatagtagaatgcacaatcaataggcacagggatttttctttctttttagatagtggcgcggctttcattgtcacgccacttctataatttttgttttgtctgtttttatattatagcatatctttccgtttgtttcaatccattttgccacataagcgaaaagtcaaatcgcttgctgtcaaccgtttaccactcctgattttttatgttatccgctatattcataatcggaacacagatttcctgtgcgtacttatagcatttatacgcaccgccataatcacgctttacggaattagccgctaacccctttccggttgtcagattgcccgactgcataagttcggtaatatacttcaaatagaaactccactctaaacggcataaaaaagagagaacatttattttaatcctcttgtaacaacaagcgtgtcaaccgtatttcttgcaaaacggcacacttcacgcgttacaatcaagtcgaatttcttttgcttcgcgtcttgaatcatttgaagaaatgatagacgcttcttcgcttgagttcccgttataccttcatcgacgtattttctcaatacgttccaattcttatgccttgccgcaatatcgtcataccactgcaattggttttctaatgcggacaattgcgcttcatgttcgcttgatactcggccataaaacacaacttgtcgccgttgagttctgtctgtattcacacccatcggcataaccatactgctttcaaccattcatttcgacctcctgtataatttattctgtgtttttatactttctccgtattgtttccttttacgttcgatattcacatatttgctatcgtctattattccgttgttccgtaaaatctccaacattttgaaagcaataactttgttaattacatccatattcaattctgttttgttcattttcctctccttataaattaggggaaacgataacaaacagttgaatatgtatttggcattgccactttatactttatcgtttcccgattttgtattcttcgtggaatgccaaacggcattcaaattattaaattgtatcagaccggactacttattatcggtcttttcgtattatgagaagcagaaacttttcgtaataatacttttttcaaacgaagaaaaaagtcgccggggacactatcgattgtgtccccagcccccccgcaactctttaaagatcgaaagttgattatagtagaagttggttatagtaaataaatcgggctgcggcggtatcttaaaccgatattataactcactaaaaaagtatcattttcagcaaaaatatcattgcggatattgcgccgatgagtaaattcggtgtataattaaatgaaatcaaataacgaaacgaggggcaaaaagtgaacacgaaactcataaacgcagccgtagacaagcaccgtgacgaaatactcgccgccgagcgctacatctgggcgcacccggaaacgggctatcgggagtggcagactacggcttatcttgaaaacattttcgagaaagcgggctatacgcttactaaagcaggcaatattcccggtttttacaccgacatcgacacgggaaagcccggtccgaaagtactcgtactgtgcgaactggacggactgtacgttcccaaccacttcgcggcggtcgacggcaacgcgcacgcgtgcgggcatcacgctcagtgcgcggctatggtcggcattgcgctcgcgctcaaagaaaagggcgtaaccgataccatgagcggctcgataaggctgtgcgccgtacccgccgaagaagaaattcaggcggacttccgcgaggaactgcggaaagcgggcactatccgctactacggcggcaaggacgaatttctctaccgcggctatttcgacggcgcggacatggcgttcatgttccatacgggtcccggcatgaagaatcttttcgacgtacacgccggctgtaacggcaatattcagaaacgcttcgcctatcacggcgtggcttctcacgcgggcggaagtccgcagaacggcgtaaacgcgctgtacgccgccactctgtcgctgaacgcgatcaacgctctgcgcgaaactttcgccgactacgaccacgtacgcgttcaccccatcgtcaccgccggcggcgattcggtcagcgttatcccctcgtccgccacgctcgaaacgcttattcgcggcaaatcgctctccgtcatcggtaaaacgaacaataaggtcaatcgtgcgattgcttcgggcgcgctggcgatgggcgctaccgttaccgtcaccgaccgtacgggcgcggcgccgctctctaacagccgcgaactccgcgaagtcatggtgaacgcgctcggcgaactcaccgacagaagcgaaatccacgtcaccgaaaactggggcggcgcttccaccgatatgggcgatctcagtcaggtcatgcccgtcattcacccctacgttgcgggcgcctgcggcaaaagtcacggcgacgattaccgtatttccgaccccgaaaaagcgtgcgtactgtctgcaaaagcgcaaatcgcggtgcttacggcgctgctcgaaaacaacgcaagggaggcgatccgcgtaaaagaaaactacgtcgctccttttcccacgaaagaagcgttcttcgccgaatgggataagtacgtttccgataccgaactcgtcgagtacggcaaaaccgaaaccgtcgtccgcgtaataaagtagcgtaactgccaattaaataacgagaaaaacgaacccgcagtttcgggttcgttttttcatgcactcgtagtcgaataaaatttttattttacaacttcatgccggaagtcgcgataccctcgacaaaatacttctggaagatcgtgtaaagaataagtatcggcatgatcgtgacgatacagcacgccataagcgcgggataatttctgccctgcgaagtacccatcgccgcggacttgaagtttgccacgacgagttggagtgtggctctgccgggatcgcgaagatacaggagcggaccgaggtacgcgttgtagtgtccgataaagccgagcaagccttgcgcgagcagcgcgggaacgacgagcggaagcatgatgcggataaagatgccgggccaactgagtccgtcgattttgcccgcttcgataacggaatcgggtacgccgtacatgaactggcgcaggaagaatatcagacttgcgccgccgaagaacccgggcacgataagcggcaggaacgtatcgatccagccgaaactttcgtacataaggtaatgcggaatcatgaggatagtgccggggatcatcatcgtgaacagtatcacggcgaagaacggcttgctcattctgaacttgattttcgcaaacgcgaacgccgcgagcgcgccgaagaacagcgagccgatagtaggcacgagcgaagtgatcatcgtattgagaaagccggtcagaagccacgggataccggtatcgtagtcgctgtacttaaagaacagtttgtaaccctgtacggtcagtccgtcctctttgccgacaagactgaattcccacgactgcgcgtcggtaatcgacttgaacgacgtgacgagaataatcgcgaacggcagaacgaccagaagcgaagcgacgataagcccggtataaactacgatattactgcggattcggcttccgctgtgagatttatgcaacgtcataattcacccactttttcgacataacgaagttaagtttggtaagcgcggcgataatcagcgcaagcaccacgctggcggcgcaagccacgccgtacgccgatcccgcgataccttccttgtaaacgtagaacacggcggtaaggcacttctgcccgttcggatccagcacctgaatacgcgtgaacgcctgcagtacgccgatcgaccccatgaccacgacgtagaaaatcgtcggcgtgatcgcgggaagcgtgacgttgaaaaatatctgcagtttgttcgccccgtcaagttccgccgcttctttcagcgacgaatttacgttggtaagcgcggcggtaaacagcagaattctgtacccgcaagtcgaccacacgcccataatcattatcgaccagataaagttatcggggctgaaccagttgaaatctcctaaaccgaaaattctgtttacaataccgtactgactgttaagcagccagttccacataaacgtggtcgcggtgaccgagcatacgtacggcacgaatagcagtactttgaagaacttagtgccgggcagtttcttcgtgagaagttccgctatgactaccgaaatcgcaatggacaccggcagttccagcataagtatcacgttgtttaacagcgctttccagaaatactcgtccttgagaacgtcgacgtaattgccgaaaaagttttttatcggcagcatctttgcgttctcgataatgccgtacggcacatccatgaacgacatgactagcgcgaagccgatgggaacgtaggtgaacactatcattgcgagtaccggaatacccgcaaagacggtgccccacaattcgtcggatcttctgattttattcttgtttgcgatcattactccctctccttcggggtctgttatctgttgcttaccttcgtgtatttctgtaacagttcgaacgtgtttttatattctttcgaggccatgaacgcgttcatagtcatcttgtattcgcgaacctgcttgttgagcggaatggaccagcaaccgttaccgtcaatccactcgccgtcgctgaggaaccaccaatcgcccggggtctgatactcggctccgcgcgcgaaaatctcggcgttcatcggctttttgccgtcggcaaggtcggctgcgagtatctcgctcgccagcgttttctgattgggaagaatgctgcccgactgcgcgaggattctctgcccctcttcgcccgccgcgaacttgatgaacagatacgccgcgttcttgacggtgctctttttccacatagcccaagccgtcgaaccgctgtgcgcgccctcatttcccgccacggtcacgttatcgttgccgtcgaactctttataaacgagcatgggtgctacgtcccagtcgaacttcttgatactgcgggcaatcgcggtgctggctctgacgtccacgaccatagccgaagcgccgttctggaacgagccgaacagtccgtccgtgccgaacgatcccggtgaagtggaaatgcccttgttgtacacgactaccatatcgccgtaacgctgatccgcgggaagcgaagcgtaatccgtaccgttgccgtctttcatatactcggtgttcttggcgatagcgtccgccgccgtgccggcaagtttgtacggaataatctgatagaacgcgtcggtcacgccgcttacgccgccgaccggcttgtgataatggttttcgttcttcttgcccgcaaggctcatgtactcggcaaacgctcttctctgcgagggaagcgcgtcgcacttagccgcgagttcgtcggtaaggtagaatttgtcctcgtagtcgagaatctcgcccgcgttataagtcttgccgttgacgacgacggtttccttggctttgtagttgagggttgcgtcctcaagcgtaaaggtatagtaaccgccgttgtattgatcgtcggaagaggtcagatactgtatgcagtttccgcccaccgagaatgcgtaattgaaccaccaactggtgataaaaccgtacctgcaacccgaggcttcgttggcagcctgaagatcggcggcaagttccgaacactcctgccaactcatggagatcttgttgttgaagtaccatttgccgccaagttcgaagtacgctttagcgggaacggtcgcgtccgccgcgatgcccgcctgcgctttggtcttgccgtaagcgtccgcttcgccggcgttatacgcggcgaggttttcttcgtacacggaaatctcggtgacgtcggcatttttaaggtaatccttgttgtagtagatgaccgtcgatccgctgcccttcggaagcgcgtaataatgcgcgtcctcgccttcgctcttggtggtgaccacgtcgtaacggtatctgcccaccgctccttcgttcatgttcgcaatgtccgcttcgaagttaagcgtcttgttctcgctcttgatgtaagtatcgaggttttcgagaagccccgccgtcgcccactttttgtaatactggtcggaaacgagcactacgtcgtggcaggtcttgcctttaagacgggtttcggtaacgttctcgtaactgtcggacgaggtcttttcgaatttagccgtgatattgtaggctttgtacttctcgttgaacgcgttgcggagctgatagtaaacgtcctctttctcgccctcggcataactggtgaacgtgattaccgtgccttccgccgacgctacgatattgccgtcggtgtcgaacgtaatatccgcgccgctcttgttcttaccgccgcaagcggtcaaccctaccgtcgtaactatgagcagtaaagccatcgtgagtgttagaaattttttcatgttttctccttatatttccgaatccgcggttatccccgcgagttcgttgaatttggtttgcgcgtccgtgcctttaagataagtataatcggaaaactccgctttcggaccgaacgagtaaatgcccaccatgcacttcgagtagtattttctgccggtagatccggtagaagccgtcgtgccgcgaagagtaacctcgggaacgtctgtaaagccctgcgcttcttctttggcagccgccgtcacgcacagaatctcgtcgttcacaaaatacgcgatagcgtcgccatgacggtaagccgcaagtttgataacgtcgccctcctccgccgtttccttttcgtacggcgcatagtccgcgcccgccgtcagcacccacgcggaatttttcatatcgcgctgagcaactccgacgtacttcttcccgctcgttttgtccgttcttatatacaagagcgtgcggttggacgggaaaatattgactatgccgacgtaaggactcgaaaccgtacccgcgtttatcttcgatacgttgcactcaaaataataatcggtgtcatagccgtttttaacgaacgcgtaactcgtcggcgagaaactgtcgagcgttatctttctgtcggtcgcgttgtccgggccgaggtcgaatttataggtcgggtaatacttatccgcgcccacttgcagcatgccgaacacgtcgccgtcggcactcgtaaggcactcgcccgtgccgtcctctcgtttaccgatcggcacccaggtgtacggagtcgcctgaaaactgagcgacttggtggtgtacgagcggctggacttgaattcttcggtattgaccgtagcgtcggtctttgcgctgtacgccacgcgataggtaaggtcgcctgcgttatacgcgccgttctcgtccttgatgaagccgaattcgtaccaggggataaacacttccgcgtcgaagccctcttcgttcgtgccgttcagcgtgccgttgaccttgaccgcgtgcgccgagtcgaaataactcgttacataagtgcttttaccgcccacgcccacgagttttgagtacttgcctccgcagtcaagtcggtactgaagcgttctgcggtctatcgaaagtttatccgtgccgtcggctttcgtcgcggaattgaagaacaattccaccgaggtgttctgatgcaccgcgcggaggtggtgataactcagcaccttgtcgtgcgcgctgacgaagcaatgcaagccttcttcgccgaagtagatataactgtcgacgtatatgctgtcgtcgctgccgtcgtacaagcggtagcagtactctgagccgtaattaccgtcctttacgccgtcggttttcattccgtcggcttcggaaaaatcgtatacttcgctcgcgatcggcaaagcgttctcatagccgtacttatcgaatttcgcttcgccgcaaccggtagccgcgaccgcggtgaacgccataagcgcgctcgtcagtattataagcggttttttcatgcgctcgccctccccagtaccgtgacttcggaaaccgcgaacgtatcgcccgttttcggctcggaaatttcgatttctatctttcggatatccatatcggcaaactgaatcgacaccgaagcacctgcgaagatacagtcgaagtgtctgtcctccagcgagaaagtcgagtagtcgaagtcgagtctgcccgtctgcactacggcttccttgccgtccttacggtaagtaatgcggatattgtcgattgcggtgaatgaactttcaaactcgcaggcgttatagatcattatcgcttttgcggaaacgtagtcggtccacgcgagcgtgattttgcccttgcctttccggaaccgcgtttcgtcgactaccgccgagtcgtcgtgaatcttgatcgtgccgtcgttcagccagtacgcgtcggcgtcgtccgcaagcccctgtgccgtgactatcgctgcggcggctttgttctcgtaaccgctgatttctgcgggcagcggctgaagcgtaacggtaggaccgttggcatagatgaccggaagtccgtcctcgttcgtcacgaagctcactttgtcaaagcggatcttgcgcgcttcggcgatggattcgtcgtttttgaaagtatgataactgatatacagttcgtcgcccactttgatgaaactgtggtgaccggacgagttcgtgtacattgcaagcccgtcggtagtgattaccgcgccgcccttttcgaccgcgactttcctgaacggtcccataggcgattcgcccacggcttggcgcacctgataactgccctcttcgtacgagtgtacggagaacgtcaggtaataaagtccgtcgcgatagagcatgaacggtccttcgttgaccgtgccctcgtctgtctcttccgtgccgttcaccgccgtatagccggtgacggataccagcgaaagcgaagcgtagtcgggatcccaccactcgttcatttgcattatataagtgtcgctgctcgtgtaccccgcggcgttacggtcgcgagtgaacagcaggtacttctgccccgataccgggtcgacgaacggctccgcgtcgatcgccgaaaagtaaccgtcgggaagattgtactcggagttgccgtactgatacatcgggtgatctttcggaactttcgaaaagtccacgagcgggcgcaaactttcggtaggcttgttgccggggttgtactcctcgaacggaccgtaaggcgttttcgaggtcgccatcgaaacgtagtgcgtgttcttgccgtaagtttcgtcgcgatcggaagcactgtaatacatgtagtaagttttatccgtttcgtcgtaatgcaccgcgggtgcccagtagtttcgcattgcccaaaacttgtcgaggtcggggcggaacactgcgccgaggtattgccagttggtcatatccttggttcgccacgcgttgatcgtggaagtcgcggtgacataggcgtaatagtacccgccgccgtcgatttccgcgcctgattcgtcgcgctcggcaacccatataagcgacggatccgcgccctgcatggtttcgacgttgccgtagaacagactcgtgtcgaattcctttacgctgtccttataatagacgaagccgtcgccgaaagtattctttgccgcacagccgcaaagaagcgccgcgcacgttatcgccgtcgcaaagacgataagtatcttctttttcatgcgccctcctttacggtaattttataaattttcacgttcgtcacgctgtcgttgcgtccgaccacgaggtcgtgccccgttttatcggtacagcccgcaaaaacgtagccgatcgcaaaaccgtcgaacacgttctgcgaacggtcgttcactccgattctgcccgcgataccgccgaacacgccgcttgcgccgccaacgctaaccgtgccggcgttccctactccgataagaccgacggaaattttcttgttgatactcgcgcagtaagcgttcccgagaataccgcccgcccgcgaaatccccgcgaataccgatccgtagttcaccgaattcgcgatcttaagattgccggtggtcgcgccgactattccgcccgcgtcgtacttgtttgccgccgacacgctcgcgtaagaaacgcaaccgtcgataatcgtttccttgccgtccgagtacaacaccgcgcccgcgataccgcccgcgccgccgttgtcgccgttttttacgaccgtgccttttacggtaaggttctttatcgtcgcgccgccgacgtagccgaacgcgcccacggaattatccgaatcggtatccgtcgtaagtcttaggtacaccgtcttgccgttgccgtcgaacgttcctccgaaataatttgccgcgctcgcgccgactcgcgcccatacgggagcggcttccgtgccgatatcgttttcgagtatcaccgtgcgcccgacgtaattatcgccgccgttgaccgcgttcgcgaacgaaacatattcctcgagcgtgcttatgcgcgttataaacgtttcggtcgatacgaactcgccctttatcgccacgtcgcagggcggcatcacgaactccgtaactatcgcttcggtcgcacgcggcttgtaaatctcggtgttgttcgcgacgagcgtgcgctctttgagaacgtacccctcgtccggcgtaacggtaacggtgattttctcgccgtaagccgccgtagacttatccgccgcgatcgtgccgccagaaacgccgacgggtacggtcacgccgtaagtaacgcgcttgaacgccgcggaaatattaacgtcgttatcgggcatgtcgaaatacacgccctcgctcgccgagccgtcgatcttgacgtaatcgacttcgtagccggtatcgggcaaaagattgatcgacaaccgctcgcccgccgtcgccccgccgacttcctcgccgcgataggtgacgtaaactctgccgtgctcgcactcggcgacggaaacgcggtgataagtcctagcaaccttgccgcaaccgacgagcgcggcgcacagcacaaccaacgccgcaaaaagcattaagacgtaactcttttttctcatttaaccctcattaccacctttccggtattttcaaagcgctgaagtatgccgtgcgcttcgtcaacgtcctttatatccagcactttgtaaatgctcggctttatcgtgccgtcctcgaagtacttccacatatcgcgcgaaagactttcgagtatctcgtgtttctggtcgttcgtgcggtttctcagcatcgagcctacgaggtgcaagcccttggtgagcagcggacggagttttacgttggtttctatgcccgcaagcgtgctgatgaccacccagtaaccgccccttgccataaacggcatagccgcgccgaggtccgctcccgacaagcagtccatgcagacgttgaccgctttaccctctttctccagacgctcgaacgccgcagggatcgattcctcttcctgaataatgatctcgtccgcgccgaggttttcgatcttctccgcaacggctttggtctgtacgctcgtcacgacgtacgccccgaacgctttgcccatggggatcgccgaacttgccagcccgctcgctcccgccgcgacgtacagcacctgacctttttgcaacttgccctcgataaacaggttgagataactcgtgcagtaagcctcgggtatgcaagccgcttcctcgtaagacatgcctttgggcattttaagaagcagtttgtacggaatcgcgatacgctcggcgtaagcgccgccgcccacaagcgcgcacacgtcgtcgccgatcttaaaaccgctttccgctttcgccgtttcgctcatttccgcgatcttgccggcgagttccagccccggccagggcgaccagcccgcgggcgaaggatacgttcccgcgcgttgcagaaggtcggcgcgattgagcgcggtcgcgtatatctccacgataacgccgtcgggcgcaagcgtaggttcggctacttccgaccagacaaaattcttattctcgtcaatcaacattgctttcatcgactttaacctccgttccgtcttgcggttttgccgcggtttcgtcgttaatttttgccgtttcgtacgttttgcggggctttttcccgaaattcacgttgctaaccagcaccgccgccacaacgagcgcgaacgccgcgccgtgctgccaggtcagcgtagcaccgataggcagaagcaccgagatcattgccgcgaacagcggttcggtcatctttattatgaacagtttgctgaggctgtatttctgcactaccgcgtaccacagcccgtaactcaccaccgtcgccgcgacaataaacaccatgattcccgcgccgccccaggtaacggttccgaaactgccgccgaaacaaagtccgataatcatcagcaccacgccgccgatgaactgcgaatatccggtaaccgacacggggtttacgtcgccgagcgtctttttgaacaccacgttgtttattaccgtgcacagactagccgcgatgatgagtatcgcccccaagccgaaatcgaacttggtcgattcgaaattgaccacgagaaccgaagccacgcccagcaccgcgcccgcaatcttgccccagctgaatttgtcctctttgaagaacaaaaacgatatgcacacgaacaccactacgccggactgtttgagcaatgcggtcttgccggcgtccacgagacagagccctatgtaagtacaggtataatgcagtaccaccgcaaacagcgcgacaagcgaagtcccgatcagttttttcggctgacgtacgatataagtccgtttggtgaatatacagaacaccgaaagaataaaaccgctgatcgtaaaccgtactccggcaaacagaatcaggttcggataaaacgtcgtatcgatggaaaagaccttatagccgtacttgacgaacggaaacagcgcgccccaaagaatcattacgagcagactgacgagtactattataatcgttctacgggtgctcgcgtcaagttttttacgcttgcgttcggcttttttcggtacttcggaacggtttttgccatccgacgaagtcgaaaccgcactatccgaaacaccgtaacccgaggaagccgcaacggttccgtttaccgattcgttttccatttttcagtccttcggttccgttccgcgagttgcgaggcatctgccgccgtcgactacgagattgtgtccggtgataaaacgcgcgtcctcagacgcgaggaacatgaccgcagccgtgatgtcgtgcggcgacggagtcattcgtaaataattagtgtacgaaagatcgccgccggtcgcgttcgccgtgggaatcatgcccggacaaaccgcatttacgttcaccccgaacttgccgagttctttcgccatggacttggtcatactcagtactccgcctttcgacgctccgtattcggtgtgcatgacgtgtccgttcagccccacgaccgaagtggtattgactatcttgccgcccttacttttttctatcataactctcgcgcactggcgggcgaaataataactgccgtaaagattgactttgataattctgtcgaaaacctccggcgactgctcgtacgagagcgcgcgatcttttcttgcgcttccgccggcaatattcgccagcacgtctacgccgccgaagtccgcaactatatcgtttacgcacttctcgaccgcgtgaaaatcggtcacgtcgcaaacgtaagccttcgcttctccgccgttttcgctaattttctttaccgtttcgttcgcggtttcgccgttgaaatcgactaccgcgacctttgctccctcggctgcgaacgaaatcgccgtatcagatccgataccgccgcctgcgcccgtcactataactaccatgttctcaaatcttttcatagtatctctcctcaatttgcgtcgtttttaatccacgtcgtagccgcacgcttcgagcgtatatttttgtaagttatactcgtgttcgaaatccacgtcgtagggaatcgtgccttgaatcatgtcgataaactcgcgcatcatcacgtcgtaacgcccctcttcgggaatatcgatcacgcggtggcagtccttccacggattgccctcgcccgccgccgcttcgcgaacgatcatcggacattcgatgggcgaaacgctgaccgtgcctttctcgccgtaaaccgtaaactcgcgcataccccaaccgttgacttccacgctcgaggttttcacagtcgcgatcccgtcggggtacgacatcacaatcaccgaagtgtcggtaagttctatcccgccgtcgcccgaaaccgcgttgaacgccgtaagttcttcggggttgcctttcagtttcatcacgagatctatgaggtgtccgccgaaaatgaacgtcgaggggcatttcacgccgtagcccgaaagttgccgtttgaaccactcggggtgcttggtactcatggtcgcgacgatattgtatatccgcccgagttccccgcgtttcgccttgttcagaacgtatctgatacccgcgttgtaacggtacatgtaccccgtctggaacacgagttttttatcttttgcgatatcgagaaactttttgtaagcgttaagattcgtgccggcgggtttgtccatatgaacgtgcagtccgcgctcggcgcagatcgtcgccgtatccacgaggtccggaaccgaactttccaccattgccgcctctacaccggtcgcgaaaagttcgtcaagagaaaaccgcggaatatcgtcgtaaacgccgggattttcctttacccgtcgcgcgtacgtttcgtcgctcggctcgtaaagccccgcaatctccgcgccgtcggttttgcgtaaagtgtctattgcggccgccgcgtgattgtgacctattccgaatatccctatcctcgtttttttcataaacgctcactccgttttccctaaggcttgcctgaaattgtcgggttacatagtaaattataaatcataccgcgccgcatgtaaatagttaaagtgatatttttatcttttatgataccgaattagtttatctgaatttagataattcgcgcgtttcttcttgacatttttatcaaaaatgctttacaataagcttgttatgaacaatctcgacgtatccgaaatcatcttaaatcgcatcgtcgcaatcaacacgattgccaaaaacgatcatcgcgtggtcaccagaaacgaccgctcgacttacgcgctcaccatgaaaatcgccgggcgcacgacttacgtttgcggcggcgaacgcttcgtgtccgacgtgaacaatatgctgctcgtcgacaaaaacgcgcggtatcagtggcacatggacgagaaaggcaagtgcgttatgatcgagttcgaggggaacgtcggcagcgagccgttcggttttatcgacttcactcttaccgataccgccgcgcaggaagtctccgcgctgttcgtctcggcggccaacctctgggatatgaaaaaggacaattatatgctcaagtgcaagtccattttctaccgcatactcgacaaagccaccgcgcacaaaaagcaatcgtatcttcccagcagttacaaacatatgctcgaaccggtagtcaactatatccacgccaactacggcgatcccgacatcaccaacggtgctcttgccgctatcgcaggcatcagcaccgtgtacttccgcaagattttcaccaaggttttcaacgtttcgcccataaaatacctgcgctccgtccgcatcaaaaaagccaccgaacttcttatcggcgacggctcgtcggtaagtgaaatcgcggaagccaccggttacggctcgctgtacaatttcagcaaaatgttcaaactcgaaacgggcgtttctcctcgcgagtacgccgccacctactccacccgcaaagaatacatcggagaataacgaggaaaaattaacgattacgccgtaaatccccgccgcggaactggaaattatcctttttcaacccgctacgcaacgaaaaaaggaactgcaatcgattcgcagtcccttttttgattattatttaattctcgttagtcggcgataagcgtaaacgcgcctttggaagaaccgaacattaaaccgggtttcgcgttgccgtccgttttagtcgtgaaatcggtatattcgcaatcggtttcaacgccctcgacgtagaatttaacgttcgtcacagtccagtttctgtacttgataccgctattgctggaacgccccatcaccccgccgagagaagctttcgtagtgccgtccaacgctttcgtggctttgatttcgcaatctttgaccgtaacggtatcgatagtctgcgttttaccgcttgcgttgacaagtccgacgatgccgccgacccaagtctttccgactacgttaccggcgttttccgctcccgtcaaagtcagcgtgccgccgcttacgtagcctacgattcctccgacgtatttacaattttcggcgataacgccgccgtaattgttgcaattcgttatcgtcgcaacgcctgttacgctgccgactataccgcccgcggtacacgacgccgaagcggtcgtaacgtcggcatagttattacagttttctatcgttcctcccgcagtggtcactaagcctactactccgccgacgtgggaagtcgaagtagtcgaatttctgactacgctgccccttacggtcaggtttttgacggtgccgccggcaaggtaagttacgaatcccgccgcgcaatcgagtttaagatcgacgtaagcggtcttgtcgtttccgtcgagcgcaccggcaaaatacatagttgccgaaccgatcgcaacggtcgcaggctcgctttccgtgcctatatcgataagcagtttgaagaatttttgactgtacgcctttttaagatcggcagaagccactccttctcccgtcgcgaacgccagataatcggtcatatttgcgatagcgtacggattcgtttcgccgtttgtaaaagcctcgtcgtctttctgcgcggcgataagtccgtcggcggttttccacgcttcgaggtcggaaatcgcgttgtcgcaagcgctgtccgcgaagtgttcgtgacatctgtcgcaagtgtaatactcggcagtgccgacggtggcgtacgaagcagcaaccgcttcggttccgactccgttatgcccgagcgccgcggtcgcggtgtcggtatgcgaatagccgcactcgcagacgtgcgaggtatatccgcccgtcgtacaggtcggatcggtcacggtatcggtgaaagtatgcgccgtttcgtccgacttcgcgccgcaggaacactcgttccagtggttggtgtcgtcgtacttgacggtatcgtaactatgaacgtgcgcgtcggcaagcacgtaagtcgttatgccgtcgacggtcgtcgagttgacgaccttaccgtccacgccggaagtcacggtcagcgtatagtcgccgagaatcactctcagcgtttgcccctcgccgagcgtggtttcgccgtcggcaagaagcgtgactacgccgtcgttgcccgccgctgcaatcgccgcgccgagcgtcgcatagcgcgtatctcctacttttgccaacgctacgagtttgtcggtaatatcctttcggtaagttgccgagcatacggaacaagtatattcggtatagccgttctcgtcgaacgtgggatcggtcgtagcgcccttgactaacgagcaatctgcggtttccttgtgttcggcgttcctcgagcaaacgcgggagtgcgtttcctcgccctcgtcgtgcgcccactcgccgtagtcgtgatcgtcgtttgcggcaatcgcgagttcgtcgacggtaacagccgtataattgccgtccgcgcccaaagtaaacagtgcgccgcaagtacatttataatgttctttcacgccggcagccgagcagttcgccgccgtaccgtcaacgtgcgcgtaaatatgcgccgtatgcgtgataactaccgtagccgccgcggaagcgctgcccacaagcacgtcgtttccgttttcgtccttgacctgcgcggtcgcgtaagagatattcacggcggtcttagcgtccataacgcctaccacgtcgccctttacggtctttgcggtaagcgtggcgttttcgttcttaaagcccgtaacgttgcagaaacgggtttcggcttgatcgtatctgacgagtttaccgattgcgccgcctaccgcgccgttttcggaaataacgctgcccttcatcgtgcagttttcgataacgacgttaccggtcgccgagcctaaaataccgcccgcataagccttggtcgcggtaacgacggcgttgaccgtgcagccgcttatcgtggtcgcggtgccgtcaccgtaaggaacggtgcctataatcgcgcccgcgaaactgctcgagccggtataagtaaccgagccggaaacggtaaggtttttcacggtcgccgccgtagcgtaaccgatcaagcccacgccgccggaagtcgaagtaagattgacgtaaacctcgtggccgtcgccgtcgagcgtaccggaaaatcttgcggcgttagcgttgccgacgatcgaagtaaccggttcgtccgcgccgccgatatttgcggtgagtacggcgtgcttgccggacatattatcgccgccgtttaccgccgccgcgaacgccttgtagtcggcgatatttgcaatcttatacggcttttccgccgtgccgtaagattcgtcgtctttctcggcggccattttaccgtcgcccgctttccactcttcgtagtccgcgatttcgttctcgcaagcgccgtcggtaaagtgcttttcgcacacggaacaagcgtaatgcgccttaacgcccgcggtcgcgtaacttgccgtaacttccgcaaccgcttcgggagtatgcggaagcgcgggaacctcgttgcgtttttcggtttgaccgcaaaccgcgcaggtatagaggtcgtagccgttgcccgcgcaagtcgcgtcgacgtgagaagtcttttcgaaactatgttctttgcacgtttttacgagtttcgtagcgttgccggggtttgcacccacgggagtttctgcgccgtccgcttcgtaccccgccgctatatactctatcgtaagatcggtgaacttttgcccgccaatcgtgccgacgatgccgccgacctgattttctccgactatctcgccggtatttttgacgtagcggagcgcgtgcgcggcggttttcgtgccggaatggataagcccgactacgccgcccacgcccgtagcgccgattattttgccgccgttggtaaagtcggtaatcgtcagcgacggaacgcattcgccgctgttgatgatataccccaccgcgccgccgacgtagttcgccgtcgtagcgacttcgccgttattcgcgcagtttattatcgtaatgttgcaaccgtcgcttcttccgagaaagccgccggcgttgttcgccgccgtaaccttgccttcgttagtaaagtcactgatagcaaccgcgggaacgtaagcgttttgtctgagaacgtagcccgccgcgccgccgacgtagtttgcgtccgcgttaaccgcgccgccgttcgagccgccgacgatagaaatattaccggtgcttctgccgatcataccgccggcgttgccgccgccgttagccgtaattatcgcttcgttcacgcagttcgaaagcgtcgtaacctttccgtcggcataaagaaccgcacctaccaagccgcccgcgcccgagccgcttgccgtgtactcgacttctccgctcacggtaaggtcggtaatcgtcgcgcccgcggcgtaacctataaagcccactccagcgtttgcgccgagatcgatacagatcgttttaccgttgccgtcgatcgtaccggcgaaagccgtcgcggcggtcttgcctgcatacaaacgaagcggactgtcctccgcgccgagatccgcggttattttgtagtaagccgatctcgccgcttcgttgaaatagttttcatagacgaaagtcttgtaatcgtcctcgttcgcgataacgtacggattttcgctcgtacccgcgccgtcgagagtcgggagcgcgtaagtctgtttttcgttataaatatcagcgtacgcgagcgcgaaactcttgccgaactcgttgcccagtcttatcatggacagcgcgtcgaggtgcgcgtagtcggtgttgtcgcggtcgtaagtcagccagtcctcatgcgcgacttcgacgaaatacgctttactgctgaccgcggcgtaacgttctttcgcggcgttcaccacgtcgtagttcgtccagcgctgagtgatgccgccgtcgatagtggtaagtccggtttcggtaaggtaacccttttcttcgaacgccgccgtcacgtcaccgataaagttattccacagcgtgggataatcgaacgcgtaagactgcgcgtcgttctcgccctgcatccagacaaacgacagaatacgcgcgtccacgccgtccgctttcagcgtcgccatgccgtcgtcaacctttttcatgaggtgattataaagcgtgatatcctcttccgtcttttcgaaaagtccgagcgacgaagggcacagccacgagccgtgaagtgtcgccccgcccgtcgcgtccttgattatatagaaagtttcgtcgggatagttctcggtaagatacgccgcaagcccgatctcgggaccgaacgctccgtcctcgagcgaggtataacgtccctgaccgagtttgacgggttcgaacgcagaattctcgttcttggtttttgtctgcgcgtcgtcggattgaagcggcgcgttggaatagaaaattttcacgttgtcgaagcccgcgcggtacttttcgtactcctcgggcgtaaccacggttttgagatttttgctgtaagtccagcccacggcgttgctctgcccggcaatcacgatgactttcgcgattctttcggtttcttcgccgcgataagtatacccgcagtcgcaggcatgctcggtataacctttctcggtataagtcggttctatcgtcttatctgcgaacgcatgcgccgcaacgtcagtcttgtcgtgacagatcgcgcattcgcgccagtggtcgtgatcgtcgtactttacggtatattcgtggtcgcagtgcgcaggctcgggcgtatcgttgccgccgcatgcaaccgccaccgccgcgagtgccgcaatcaacgcgaaaacgagtgtactcagacaaattcgtcttttcatttttcctcccgccgccgaaggcattttgcccccggcgttaaatcgaaatgcgtttcggaaacttgatcttttcgcgccagaagcggatataaccgctcacttaacgcaatcgccgtcaccgaatcgcttttatcttacaccgtttacggcgaacttgtaaatagcaaaagtgatatttttatcaattatgctaccgaaaaacgccgctaaaggtaatttttaccgttttttaacctttccgtttgtcttttttgacaagaaacctaaaaccgagcgggattattttaaaacataacgagcagtatccgtctttcaccgtcatgcagagaaacagccgagcggtttgcgcggctgtttcgtgggatcccctgcaatagaggtataattatcccttaatcggcttatttaattttccactttccgcttgccgattgcaaatcgaccatacgggcgtaaatgccgtttttactatatagttcgtcgggagtcccctgctccgccacgacgccgtccgccaaaaccacgattttatccgcgcccgcaaccgttctcatcctgtgcgctatgataagcacggttttatcttttataagacgggaaagcgccgattgtactgtcataagtttttatggataggtcaagcacggaaaacgcctcgacaacggaatacagacagccgtccttttccattttgtcgatatgcttgatatagacgaccatcatatcgcagttctcggcaagccatttgttgcgttcccctatcgccgctttgtaatggcacttcctatcggtcgggataataacgctatcataagacttctctataatatccaagttcgccacgggatatggttcaacaagcgtaagttcgcaccactcttcccattctcttcggaatcgtctgacggcttgtgtagcaaggtcgtcaaactcgccgtttcgtcccacgttaaagtctataaacccatatttacggtgcagtaattcgattacttcgtcaagttcttcttcaacttgccggtactcgtccactactctatgacctataaatgaaacccgaaaaatatccaattcaatgcctcccgataggtgaattatctcgcagaattttgttcgcctattaaagcaataggtgaacaaagccgtagacttcggacacctatcgagagtatttacgaattttattacttttcttaccgcgcgaaagcattgaacattgactttactaccgttttatggtataataaacataatatttgagccgtctattgctttaacagacggcttttttagttgaaatttttgccgagcttattcatcatatcctgcttgtgttccataagcgaatgggcgtatctgttcagcgttaccgtagcgtttttatgccccaatatctccgccaatgttttcacgtccattccacactccaaagcgcgtgtagcaaacgtatgtcgaagcgaatgaaaacctttacgctcgatatgcaaacgcttttgcagaagttcaaaggttctctgataagatcgcaccgtaggcggctcgcccttctccgattccacaacatactccgaaatgctttttcgtttatattctttcagaacgggaagcaactgcttcggaagcggaatcattcttttggaagaagttgttttcggcaagtctgtaatccggcaaagattccctttttcatctcgtccgtcgtggcaagttttgttcaccgcaagcgttcctttcgtgaagtcaatatccgaccaagtaagcgcaagcaattctccgatacgcaaacccgaataaagacaaatcacgatcccgatgaatttccgtttcttactcgacaacgccgcctgctctatcttcttctgttcggcaagcgaaaaacacgatacttctttctctttcgttttcggtcgtctgattttgtctgtcgtatactctttcagttctccgagcgtacacgcaagtttcagagagttctgaataaccgtaataatcccgtttacggaattagccgctaacccctttccggttgtcagattgcccgactgcataagttcggtgatatacttctgtatgactatgggcgacagttcctcaagctcgtactcgtccaactttaccttcaagtgcttttcgataatctccgaatatctttcgcacgttttcgttttagacgaaggctctatgtagttcgcaaaccatacgtccaaccattctttgtatttcattgaaaactcctttcgatttactgttattattataatttttctcaccgtaaataggaaatcacccctcgaaacggcataaaaaaagagagaacgtttatccttgttctctcttatgtttcttatattaaattataaagtcgaatgttcttttacgaatatccgactttaagctatcatttgaaggctgttttctatgttatttggtgttttttgttgtgtttttcggaaatccctttcactattgattgcatgacttccgatagaagtaacgctatcgggaattatgacgcttgtaagacttgtacaatagcggaatactccttcttcgatagaagtaacgccgttgcctattgttatgcttgtaaggcttgtgcaatcgcggaatactccgttttcgatagaagtaacgccgttgcctattgttgcgcttataagaccggagcaaccgtagaatgcttcttctccgatagaagtaacattatcgggaattgttatgcttttaaggcttgtacaatcgcggaatgtccagcttccgatagaagtaacactatcgggaattgttatgtttttaaggcttgtgcaatcgcggaatgcctcgtatccgatagaagtaacgctgttgcctattgttatgcttgtaagatcggagcaaccgtagaatgcatctttttcgatagaaataacgccgttgcctattgttgcgcttgtaagaccggagcaaccgtcgaatgcattttctccgatagaagtaacgctatcgggaattgttacgcttgtaagactcctgcaagtatcgaatgctccatatattaccttacaaccgttttcaatattggcggtagtaatgtcataagaggttacgcccactgcaacaacataaggatttgtttcattgcctaaatatttaattccgtctttttcgttacattcaagactgccgcaatagtagaatgcatcacttccgatataagtaacgctatcgggaattattacgcttgtaagactcctgcaagagctgaatgctttttccccgatataaataacaggcaaatcgttatatatttcgggaattactatatcggtatccgttgcggaacctattccggttaccgcatatccgataacggtatcgttttcttttatttcggaatatttaagccctaaggttaccttgcgaccgcacacggtacaaattccgtcgtcaccgtacttatgccttgccgaaatgacttccgtttgtttatctttgcaaacggagcaggttctttccctgcttccctgctcggtgcaggcaggctcttttacggttacccattcgccgtatgtgtgaacgcctgtcgcctgtatagactcggtttctttattttcgcatttggtacaggttctttccctacttccctgctcggtgcaggtaggttcttttacggttacccatttgccgtatgtgtgaacgcctgtcgcctgtatagactcggtttctttattttcgcatttggtacaggttctttccctacttccctgctcggtgcaggtaggttcttttacggttacccatttgccgtatgtgtgcttgcaatccgtatcgcttttgtcaccgcaggcggcgaacgaaaaacatactgtgcaaacaagcaaaagtgcaaacagaactaccgttattctctttttcattacaatactctccttaaaatttttgtaatttttgggctttgggctatcctaacggatatccaattgcgtacataatattgtccccccctcgcaagttttatcaagtacttttataaatattctcggaaaaaattttcatatttcttctttttccttgacttctatttacagttttctttttgacggaatctccgccttttgttatgtgtattgtaacacataacaaaaggcaaggctttggattaaatttttatcgcgaacattctgtttatacagacaaaaagggaacgaaaaaatttcgctccctt

SEQ ID NO: 185 - DNA, 1862 bp, Unknown
  16S sequences of unknown bacteria
tttgtgtggtcgaacttttccacagccttgatcaggcccaggttgccctcctggatcaggtccaggaactgcatgccgcggccgacgtaacgcttggcgatggaaacgaccagacgcaggttggcttcgctcaggcgctttttggctttctcgccctcggggccgccggcctgaattttcagggccaggtcgatctcctcctcgggggtcagcaggggcacgcggccgatctctttcaggtagaccttgacggggtcgtcgatggtaatgccgtcggtattcagggcgtcgtcgaagtcgtcggcaccttcctcggtggtgccgctcagcaggctggcgtccacatcgctgacggggtcatcatcgatgacctcgataccgttgctctccagttcctcgtagagcttttccatctgctccacgtccaggacgtgaccgctctcctccatcgcgtcgctgatctcgctgttggtcagcttgccggcacggcggccggtctcgatcaagctgcggatagaatctttcttttctgccataagtacgttctcctttggttttttatatgaacacggatgtttgagagaaattcttcaatcagattggggcgggtcggccgcgcctttttccttgcggagtttcgagaaggcgcttaaaaactggtcgtcggtagtgcctttgacggtctggctgatgggcttggcgttgtccagccgttccaggtacatgtcaatgtcctcctgctggagggggtgcccggcgttgacggcctgggcgcggttgacttcggccatcggcttatcgtccagcatctgctgcaggctggtgatgttcaccggcagctgctcgtccgcacagcggaaaatagcccgcagggcctcctgcatttcgggcaggaccacggcgtccatgttcaaacgctggcgcacataggggatcttttcggggctttgcagcagcgcggcgatgagttgccgcccggcactggcggcacccaaagcggcatctcccccggcgctgtagggcacccggatgtcggcggcattgccctgcccggccaggtcgcgctgctctttgcggcggtcgcggcgctgggtgctgcgcagcacatcgttcatctgctccaagattgcctttttacccacgccggtctcctcggccaggcggcctgcgtagacgtcccgcgctgtgggggtaacgcccttgcgggccaggatgtcgatggcgtccttgaggtagttcagccgcccggccgaatcccgcaggtcatagttggcggcagcctttttcagctggaactccgtcgggtcagcgctgccgtccagcagcatggcgaaccgctccttgccgtattttttaatgaactcgtccgggtctttagcgccctggtagctcagcacccgcaccttgatgtcggcctcggtgaacatggccaagctgcgggcggtggccttttggcccgcctcgtcggagtcataactcagcaccacttcgtcggcgtattcggtcagcagcttgacctgttcgggcgtcaaggcggtaccgcaggcgcagacggcggtgtcaaacccagcctcgtgcatcgagatgacgtccatgtagccctcgcacaaaatataacgtttattcggcgattttttggctacattcagggcaaacagcgtgcgggactttttgtacaccatcgtctcggggctgttgatgtacttgggtttggagtcgtccagcacacggccgccgaaggcgatgatggccccgcgcacatcgatgatgggcaccatgacgcggtggcggaagatgtcgtagagattgcccttggcgctgcgcttgacgaggccggagtgttccagctcttcctcggagaa

SEQ ID NO: 186 - DNA, 3552 bp, Unknown
  16S sequences of unknown bacteria
gaaaagacaacgcatgggcagaacagaacccggatgaggttcagcaggaatacctgatcagcaaccgggagacagcgagaggagagactctccggatccgtctgatggaaggattccatacacagcagttgaaggtaaacactttggatgacccgaagcgctggtgggaagttatcgaccgcacgacaggtgaggttgtcccgactgactgctgggagttcgatgaggcatccggggaagtggagattcagaccgtaccatatcatgaatataccgtaagctttctggcattcctgatctgggatccggtacatatgtacaatttcctcacaaatgactggacagacaccccacatcagcttacttacgatgtgagacagccgaagacacagaagtatgtgaaggagaagctaaagagatggtgtgaggagaacccgcacattgatgttgtgagattcacgacctttttccatcagttcacccttaccttcgatgatcagaagagagagaagtttgtagagtggttcggctacagcgcgagcgtgagcccatacattttagagaagtttgaaaaatgggcaggatataagttccgcccggaatatattgtagaccagggataccacaacagcatgttccgtgttccaagcaaagagttccgcgatttcattgaattccagcagatggaggtctgcgcgctggcgaaggaactggtagacattgtccattcctacggtaaggaagcgatgatgttcctcggagatcattggatcggaacggaaccatatggcaaatattttgcaggaatcggtctggatgcggttgttggatctgtaggaagcggtgtgacgcttcgtatgatttctgatattaagggagtgaactatacagagggaagacttcttccatatttcttcccggatgtgttctgtgagggtggcgacccgatcggagaggcaagaagcaactggatgaaggcaagacgtgcgatcttacgttccccgcttgacagaattggatacggcgggtacttaaagcttgcgacaggctggccgggatttattgaagagatccagaatgtggtcggggagttccgccagattcatgagaatatgcagggcacgaagtcctatgtagctccgtttaaggtagccatcttaaactgctggggtggacagagaaagtggatgtccaaccaggtacatcacgcgatctaccacagggagacttattcccaggaaggtgtgctggagtgcttgagcggtatgccgtttgatgtggaatttatttcctttgacgatgtgagagacggaattccggaagacatcggcgtcatcatcaatgtcggagatgcctacacagcattcagcggtgcagagaactggattgatgagaaggttgtcacagccatccggagatttgtagaccagggaggcggctttatcggtgtgggtgagccaactgcttatcagcatcagggaagatatttccagttgtccgatgtactcggcgtggacagggagatggagttctccttaagcacagacaagtacaatgagatggatccgcatcacttcatcctggaggatattgacggagacattgatttcggtgagggtacaagccgcatctatgcgcagggcagacattaccagatccttgcacaggatggtgagtacagcgagcttgtggtgaatgaatatggaaaaggacacagcgtatacttcgcaggacttccgtattccccacagaactgcagaattttacttcgtgcgatctactatgcggcaggcatggaagaggagatgaagcactactatgtgaccaatgtggacacagaagtgactgtcttcccggagacgaagcgcatcgcagtcatcaacaatgcagataagccttgccatacagacgtatacatcaaaggaaagcttatctatgaagtggaccttgaaccaagggaattaagatggctggatgatgtagaagaataagttgtgataatttatgacgggaatcaacctttcatatcttatagaaaatgtattcataaaattaaaggaggtaatttttatgaaaaagaaattagtaggggtattgctcgtagcagcaatggcagtatccacagtagcaggatgcggtggtccaagcaacgatgcagcggctgacagcagcaacggcgcagcagaaaagacagatgcaacagagacaggtgctgacgcatcaacagcagaagaaggggacgagacactgactgtatggtgctgggatccaactttcaacgtatatgcaatgcagcaggcagaggcaatgtaccagaaagatcatccaaacttcaaacttgatatccaggagaaagtttacaccgatattgagcagagcttaatcacagcagcagaatccggaaacttcgatacattacctgatatcttcttaatgcaggataactccttcagcaagaacgcaacgaactatccggaacttttcacagatctgacagattccggcattgatttcgaccagttctccggcggtaaacttgcagactctaccgtagatggcgtacattacggtattccatttgataacggtgcaacgatcatggcaatccgtacagatatggttgagaatgcaggacttacagtagaagatttcaaagatacaacatggtcagagttcatggaacttgcacagaaggtcgtagatgcaaacggcgttccgatgttaacaagctcaggcggatctgagatcgtcatcgagatgttacagtctgcaggtgcttccccaatggataacggcgaagtgaagttagttggaaatgatgctttaaaagaagctatcacagtatacaaagagcttatcgacacaggaatcatggttgattacacagactgggatcagtacatcgcttccatgaacgacagcaaagcagctggtgttatccagggatgctggatcatgtcttccatccaggcagcagaagatcagtccggaaaatgggcaatcgtaaatatgcctgcattagataacattgatggtgctactaactacgcaaactgtggtggagcaagctgggcagtatcttctaactgcaagaatacagaccttgctttcgatttcctgaactctacattcggttccagcgtagaattatatgatgaactgcttccaaacgcaggtgtgatcgcaagctacttaccagctggtgagtctgatgcttacaacgcaacatctgatttctacggcggacaggctgtatacaaagatatcgtagaattcgcaggaaaggtaccaggaatcaactatggtgcatactacaacgacatcagaagcgcattgacagacgctgtcacaaacgttgtacagaatggtgcagatattgacgaagagatccagaacgcacaggatacagtagaatttaacatcagtgaatagtttttaagaaataagtcagtaccggggatgcagtattgcgttcccggtatcactttaggagaaaaatatgaaaaagaagaaagcaaaattgagtttggaaaaaaagcataacctgaccgg

SEQ ID NO: 187 - DNA, 18854 bp, Unknown
  16S sequences of unknown bacteria
atcccgccgctgcagccggtaaatggagaaggccgtacgccccgccatgccatagcctcggctgcgcatgctgtcagccgtctcgatggcgttttccagagcccaggtgattacgatagaaagaatcgtcagtccattgtggatgcgcttgcgcacgctcccggaggagacatcccgccccacacagcgctgcgcctgggtcacgaccttgatctgggccgtaaaccggggcacaaaccgcagcgtcatggacaggatcagcgacagcgccgggatcagctttccaaataaataaacaaatttatccgacgtcatcacgacattgcagcaggagaaccaggtgataaccgccaccatcatcgacgctgccgcgataccgtagtagatcgcctccagcgtcagggggttgccatcgccgatatagagcaggatcgtcgcgccctcgtggttaaaaaccgggttgagcagcgctgtcaacagcaaaagcggcagcatgacccgcagctgaaatagcatcgctttcggccccttgagatagccactataggctaccgcgcataccagggagatccccaggcacactgggtgcataataaacatgccaagtcctagtactgcaagaaaatataaaaaattcaccaccggatgatagcccgcaaaggtatcccgattcatgcgctcacctcttccgcgccaaaatagaacctgagaaagaaaaaatccgcggtcccgcccgcagatccacagctttgctgcatcattttccggttacggcagaaaatatgccgtctgccccatgttcctgacctagcctcttccagaaaggcctcccagtgacctgctcgtgggttcttgccccgttccatgtgccgcgctgcggccagacagacaatctttctcattatcttttttattataacagccccgccgggcaaatgcaagatgcgcactgttttttccagaggtttcttgtcactttgaacgtttcgctgcaaagatagcgaagaatgattgaaatcctgcattttgtgtgttatactatttttctgtaaagataatgttcagattttccacattttcggaggcatccaccatgaaaaataccccccatagcacccaggcgcttttccagctcaacggtatcccgcccattggcatttccctgtccatggcgctgcagcatctggtcgccatgatcgtcggctgcgtcacgcctgcaattatcatcgccaatgtcgtcggcctgcctcaggcggagcgtgttctcttgatccaggcgtccctggtcatgtccgctgtaacgacgctgctggagctgttccccatcggtggcaaattcggcgcaggactgccggtcatgtttggcgtcagctttgcttacctgcccagtatgcagtccatcgctgctggtggcggcggcattgccagcattgccggagcgatgatcgtcggcggcgtgatcgccatgatcgtcggcatcttcgtcaagaagatccgcaagctgttcccgccggtcatcacaggcactgtcgtcttcaccatcggcctttccctgtaccccacggcgatccactatatggcaggcggctccggcaacacctacgacctcgtcgtggcccagaaggggctgagcgaagcgctggtctacggttcctggcaaaactgggccgtggccatcttcaccctgatcgtcgtcatgctcctctccaaccacggcaagggcatctgcaagctggcctcgatcctgctgggcatggccgccgggtatgccgtcgccgctgtgatgggcatggtcgacctatccgagatcagcaacgcaaaatggttctccctgccccgcttcctgcacttcggcatcacctttgaaccctcggcctgcgtcgcgctggggctgctgtttgccatcaactccatccaggccattggcgacctgaccgccacgaccgtcggcggtctgaaccgggagccgacggaccgggagctgcagggcggcattatcgcctacggtgcgacaaatatcctcactgccctcttcggcggcctgcccacggcgacatattcccagaacgtcggcatcgttacgacgaacaaggttatcaaccgaacggtctttgctctggccggtggattcctgctgctggcaggcgtcgtgccgaaattctccgcgatcctgacgacgatcccccagtgcgtgctgggcggcgcgaccgtcacggttttctctaccatcgccatgacaggcatgaagctcatcgcgtctgagggcatcagcccccggaatacgacgatcgtcggcttgtctgccgcgctgggcgtcggcatctcccaagcatcggcggcgctgagccagttcccggaggccatcacggtcatcttcggcaagtcccctgttgtcatcgcaacgctgcttgccgtcattctcaacctgatcctgccgaaggaaaacgacaagctcacaaacgcggaaccggtcgacaagccggaataatcgcgcctacccgcgccgacatcggtcacacgatgtcggcgctttttctcttgcaccggcggggcatgacgggcatagactgggagaaaggagggttttccatggatctttctgattctgccgccgtgcaacgcatctggcagcgggtcggccttacgccccagccgggcaccccgagtgccacgcccagtgcgccaagcatcaccccaggcacgccggacgcactgccagactgcctgccccagtggatcgccgcggagcaggtctcctgccgccgctgccaggccatggcccgctgcgccggggcgcaggaggccaaaatgctctgctgcctcgcccgccgatcggcagaccacgcccgccagctccaagcggtctattacgttctaaccggccagtgctgctgtcctgacgctgcgcctactgactctctctgctgcggccccgctcaactgcgccagaccatccaggcagcgcaggccgctcaagcggcatatctccggcatattggtggtccctatggcgctgtattctcccgccttgcccaggccaaagcagcgcagatggacggtcttctgcggcttttggcacggcagaacctgcaaaattgcgctggaaaaagcagctatgccggagtataatagacttgcgttctactgcgccgcccaagcctcggcgcagaaggaacaatcataccacaaaaggatgttactatggattacctaaccaaatgcgccccccagcgggtcttttattactttgaacagctcagccggatccctcgcggctccggcaatatggcaggcgtcagcgcctattgtttgcagtttgcccaggcccacggcctggacgccaggcgggacaagcaggataatgtcatcatccgcaagcctgcctccccgggccacgaggcggcggacccggtcattttgcaggggcacctggatatggtctgcgaaaagctgccgggcagtgactttgatttcaccaaggacccgctgcacctgcagctagagggcgactggctcaccgccgatgggacgaccctcggcgcggacaacggcatcgccattgccatgatcctggccattttggaggacacgaccctggcccacccggccctggaagccgttttcacaacggatgaggagacgggcctcttcggcgccgccgcactggacacgtcctgcctgcagggcaaaaccctcatcaatctcgactcggaggatgaaggcgtcctgaccgtcagctgcgccgggggcatccgcgtcacgggcaccctgcccgtccgccgcacgcactgcacgctgcccgggctccgcatcaccgtcggcggcctgcggggcgggcactccggcgcgcagatccacgaaggccgcggcagcgcgacccagctgctggcccggctcctgctgcactgcagcgcggcagcgccatttgccctcgtcggcttagacggcggcggccgggataacgtcattgccgcccatgcaactgccacactggccgcagaacctgacgcgctggcggccatccagcaggcagcggcccagctgcaagctgcctaccaggccgagcttgtaaccgccgacccgggcataaccgtcactgtggacgctctgcccgcagaaaaacgcagcgccctcacgttggaagatacccgccgcgccgtgcagctgctggccagctgcccccaaggcgtgatcgccatgagccaggacctgcccggcctggtgcagacctccctgaacctcggcatcctgcagctaagcggcgaacagctgcaggtagatttctccgtccgcagcagctgcgaaagccagaaggacatgctggtcgcccggttgggcgcgctgttcggtctggcgggcggcgagatccatacccacggcaattaccccggctgggccttcctgcgccactcgccgctgcgggaccacatggtcgagacctggcagcagatgttcggcactgctcccaaggtggaagccattcacgccgggctggaatgcggcctgttcgccgggaaaatcccggggctggacgctgtctcgctcgggcctcagatgcaggaggtccacactgtcaacgaacgcctgagcattgcttccacgcagcgcgtttaccgctatgtctgccaggtcctcgcgacctggggcacacaaaaggaggaactatgaacgtactggaccgctttctcacctacgtcgcctactggacgacctctgacgacgccagcttggaatctcccagcacagcgcggcaaaaaacgctgggccatctgctggtcgacgagatgcaggctctgggcctgcaggacgtgacaatggacgccgccgggaatgtcatcggcacactgcccgccacctgtgccagcgcaccggtcctcgccctcatcgcccatatggacacctcacccgatgccccgggcaaggacgtccatccccgtatcgtcccctgcaccggccagccgctgacgctgtgcgacggcgtcaccatcggccaggccaattgccccggctggcaggacctagccgggcaggatctcatcgtgaccgacggcaccacgctgctgggtgcagacgataaggccggtgtcgcagaaattctggccgccgtgcagaatctacgggccggtcaacgcccccacggcgaggtccgcgtcatcatcacaacggatgaggagatcggccaaggcacccgcgggcttgatgttgcgcggctgggctgccaatatggctataccgtggacggcggccccctgggcgagctggaatttgagaatttcaacgccgccgatggagatgtcatcctgcacggcgtcaatgtccaccctggctctgccaaggggatcatgcgcaatgcgctgaccatggccatggaatttcaccgcctgctgccgccggaatccgtaccggagcgcaccagcggctacgaaggcttcctccacctgcacaatatggaaggcgacgtctcccaggcgcggctgcactatatcatccgcgaccacgaccgggagaaattcgaagcaaaaaagcggctgctctgcgatgctgcccagactctctgcgaccgctacggccccaacgccgcagaagccacctgtacagacacttattacaatatgaaggagtacattctgccccacccacatctggtcgaccgggccaaggccgccttcgaggcccacggcgtcacacccctgtgccagcccatccgcggcggtaccgacggcgcgaccctctctcgcctcggcctgccctgccccaatctctccaccggcggctatcagttccacagtgtccgggagtttatcccggtacagagcctgcatacgatggtggctgtgctggaggaccttgtctgcagttttgtcgagaaaaccgatgtttcctgattttctatcgcaaaaacctgtttgtcatttcttccctggccccgtataatagaaatacgtgattcttagctcagtatcacgttattctattaagaggaaaggaagatttcttacaatgaaaaaatggttctcccagaactggctcattgtgctctctggcttggtcattggcgcggcagctgtgacgctgacagccctgggcaatccgggtaacatgggcttctgcatcgcctgcttcctgcgggatacctctggcgccctcggcctgcacagtgccccggtcgtccagtatttccgtccggagatcgtcggcatcgtcttgggtgctctcatcgcggccattgccgccaaggagtttaagggccacggcggctcctccccggtcctacggttcgtcctgggcgccttcgtcatgatcggcgcgctgatgttcctgggctgcccgctgcgtatggtcatccgcctgggcggcggcgacctgaatgcgctggtcggtctcgtcggctttatcgccggcatcctggtcggcatcgtgttcctgaagaagggcttcagcctgcagcgctcctatcgccagatgaaggcggaaggcgcggcgttcccgctggtcctggtcgggctttatgtcgtttatctgctctttaagacggccttcaaggcctccgaagagggccccggcagcatgcacgccgccatcggcgtcgctctggccatcggcgtgattgttggcattctttgccagagaagccgtatgtgcatggtcggcggcatccgcaacagtgtcatgttccgtgacttcggcctgatctccggcttcctggccatcctgatcgccgtcatcatcggcaacctgatcctgggcaaatttaacctcggcttcgaaggacagcccatcgcccatacggacggtgtctggaatttcctgggcatggccctggtcggctggctctccgtcctgctgggcggctgcccgctgcgtcagctggtcctcagcggcgaaggcaattccgacgctgccatggccgttctcggcatgctggccggcgctgccttctgccataactttggcctggcctcctctgcagacggtcccaccgccaacggcaaggtcgctgtaatcatcgggttcgttgttgcattgctcgtatctctggtctgcacaaggagggcaaaagaatgaaacaggtcgacgcaagaggccagctgtgccccatgccggtgctgatggtccaaaatgagatcaaggcttctcaacccacttctctggaggtcctggtggacgatggctgcgcggtggaaaatgtcacgcgctttgcctcgaaccatggctacagcgtaaaaaaagaagcccacggtgatgaattcaccctggtgctggaaaagaacgcttgattccataaagcttttcaaggctgacgcataaaaatgcgccagccttgttgtgttttgtcaaaaaatatttttgacaagctctcaaacacgactccgctgtataagctcgaggcgcaaaatcagagattttgactctcgcttaagcttttgactctcgcttcttagtcaatcgcgctgcgctacgcttgcgcgcttggcgtctcacccacttaccgccggagaaaataattttggcttgatttgcgccgtgcacggcgcaaactctgcgaggcttttgtgagcaagctgtcgcggccaacgcataataatactacattggctttgttgctatatggttttgtttttcttgcacagttttcaggtgcgatcgtcgacagaagctacgaatttctcgttttcccttgtctgccccgcctgcctgtggtattctgggcacagaagcaggcacaccccaccgccagaaaggagccaacgatgatcaaagcaagcgacccccgttttgcccacttcacccctgagatggacgccaaattcctccgccgggccatggccgtggcagaggaagcccaggctgccgggaaccaccccttcggctgcatactcgtcgacctggaaggcaatatcctcatggagcagggcaatattgaagtcaccggccgggtctgtaccggccacgccgagacgacgctgatgcagcgcgcctcccatgattttgaccgcgccaagctctgggactgcaccctctataccagcatcgagccctgctgcatgtgctgcggcgcggtctactggggcaatgtcggccgtatcgtcttcgccgcgacggagcaggacctgctggagctgaccggcgaccatgaggacaaccccacgttccacagtgactgccgcacgatactgtccactggccaaaaagacatcgtcatccaaggtcccatccccgctctgcgggaggaagccttggccccgcaccggtattattggaaataaaaacacaaaaaagcaaaaccgcgggcggcgcccatcctaggacgccgcccgcggctgcgtttataccggcagattaaacagcgggcagatcagccgcagcgccacacccaagccctgggccaggctctccggcagaatatactcctgccgcgtatgcgccccgcttccgtacacaagccccacgcaggcagcggggattccccgggaaaacgggatattgcaatccgtcgagccgatgatcttgcggggcgcgtgccccgtttccgccgtgacggcggcgcagatatcgttcagcaatgatgcctgacgttccgggtcccggcacgcgcctgtccccggcctgcggcccaaaagcgtgatctccggcgagaacggcgcggcgatgcgccgcagattttcctccatcgccgccatggcagccgccgtctccgcccggtactcgtacagcagctccgcccgctgggcgatggtattgacggaggtcccaccgctgatttgccccacattaaacgtcgcccccggcgcgacgggctggcggtagagcgcgcagatcagctccgccatttgggcaatggcattgggctttccgaaatctaaatacgagtggcccccggccgtctccaggcagatgcgataccgggccgagcccaccgcgccggtaaagaccgtatccagccccaggtcgaacgagacgacctggcagatatcctcccccagcgcatccagcagcgcccggctgcccttgagatttcccagaccctcctcgcaggtattggcagcgaaaacgacgccgcagcgcggctgccgcccgctgcgcaggacatagcgcgccgccatcagcagcgccgccacattggccgtatcgtcaaaggccccggggcaatacaggcgcgccccctcagcctggggcgtaaacggcgcgatatccggaaaaacggtatccagatgcgccagaaaaaccgccaccggacgccctggcgtcacgccgatggtgcagatcacatttttcgccctgtcgatcgccacatcccccgcgccgctgcggcgcagccaatctctgcaaaattcggcgcgggcgtcctccttccccgtcggcgctgggatctggcagagctgcagcgtcagctccagcagttcctgctggtgttccgcgatatattgccgcaccgttccttccatatgccgcgcctcccggtcttttgttctgcccccattttaccgtgccggggacggatttacaaccgccttgcaaaaaatacggaaaagtcgcgcatttttgtaaggaatgtgttataatataggtatcggggcgcctgctgccccacccgcgcaccggcgcggatctttttacagataaaggagatgcagacaatggagatccttaccattacaaaagataactttgacgccgaggtcctgcacagtgacaagccagtcctcctggacttttgggcaacctggtgcggcccctgccagatgatgatgccagtcattcacgggatcgccgaagagcgtgaggacatcaaagttggaaaggtcaatgtggacgaagagcgcgacctggcgtcccggttccagatcctcagcattccgaccttcctggttctgcgcggcggcaaggtcgtcgcctctgccatgggcgcacggcccaaggaacagatcctggccatgctggacgcctgatgcagtagcacgccggaacgcttcccgcaagcgcgccgcaggccggatcggccacattttgcgccaacccctgggcggacgcggggctttcccgccgctgcccagggtatttttctgccaaaggacggtttttcaaaaatttttctggaaaaaccgaagaattcactgtataataataggataacacgagcaaatattccagcaaggagggcggcagatggattttgggcaatttctgggaaacgacacgctgaaagcgcagctttctgcagcgatcgacgcccagcgtctgacccactgctacctgctcagcggcccgaagggcagcggaaagcatacactggcgcagctcctcatggccgccatggagtgcaccgccgctcagcgcccctgcgggcgctgcagccagtgccgcaaggctttgcagggcattcacccggatattgccgttgtggacgacaccagtcgcaagactatcccggtggatttaatccgccaggtctgcagcgacgcgtatatccgccccaatgagggacggcgcaagatctatctgctgccccgcgcgcaggatctcggcctgcccgggcaaaatgcgctgctcaagatcctggaggaaccgccggaggcggtcaccttcctgttgctgtgcgagaacgcggaccgactgctgccgacaatccgctcccgctgtgtggagctgaagctgatgccgctgccggaggcgttgctgctgcaagccttgcagacgcggtacccagaccgtccccaggcggacctgcaagccgcctgccgccgcagcggcggttttctgggccaggcacaggatctgctggcggaccaagccgcgctcccaccccagacactggcatttgccgaagcatttgcccagggtgaccggctgcagctgctggagctgctggtcaagctggaaaaggcccagcgggacgattttgccagctgctgctgcaatggcgggccctgttggtccaggcactgcaggcacagagcggtatagatacgccgctggcccagagccgcgagatcgcccggcggcggaccatggcggagctctcccaggccatcgcccagctgagcaaggcggcagaggcctgccaggccaatgtgggcgtcggccacctgtgcgggatgctgtccgccacactgctttgatacacattccgttttagaacgagacaggagttactatggacgaacaaaataccatcctctccacggcggaggccgcgcggaaagagctgacactgccgccgatgcccgaaccgcccgccccacccgcgactgtgaacgtagtcgacattcatttccgctctggcggaaaggtctatttctttgaccccggcgatctgacgctgcaaagcgggcagcatgtcatcatcagcactgcccgggggctggaatacggcatctgcgcctccggcgtccacgcggtacccaagcgggatatcgtcccgccgctgcgcccggtgctgcgaatcgccaccacggcggatgaaaaaatgatgcaggagagccgtgagaaggaaaagcgcgccttcgcggtctgccagaagaagatcgccgagcatgggctggagatgcagctggtctcggcggagtgcgccttcgacggcagcaagattctctttttcttcacggcggacgggcgtgtcgacttccgcgagctggtcaagaccctggcctcgacctttcggacccgcatcgagctgcgtcagatcggcgtgcgggacaaggcaaagatggtcggcgggcttggcatttgcggccgccccttctgctgcagcgaatttttggcggacttccagcccgtctccatcaaaatggcgaaggtgcagaacctcagcctgaaccccacaaaaatctccggcacctgcgggcggctgatgtgctgcctgaaatatgagcaggacgcctatgaggacctcatcaagcacagccccaagcaggaatcctttgtcgacacccccgacgggcgcggcacagtcaaagaggtcaatctgctgcgccagagcgtcaaggtctccatggaaaagcagcccgataccatcggctgctataaaaacgacgagatctgcgtcctgcgcaacggcaaagcccgaaaaaatgacccgccgatcccggacgacctcgcccccatctccggcaacagcgtaaagcgtcgcaatccggacgaggaggagtccttccccgtcctggaggacgtcgttatcaaaacggcgctgccggacgagcccgcagcacagccggcggagccgaaaaagcgccgcagccgcagccgcggcaagcgcagcgggcaattcagggatggcgccgcccccaagccgcaggccaaggagccccgagcatccagcggcaagcagtccgccccccggcaggacagccagccgcagcgaaagcccgcgcccaccgcggagggcgatgctcctgccagcaagccccatcgccgccgcaggcaccgcaaaccccgccccagcggcgacgcacccaaggcgagtgaataacacaaaaaaagcaagagcagcaataactgctcttgcattttcattttcccttcgtgtgcttatttttcgcctcccagcacgaccatatactctggctcctccgccgtgacggtcacggtcgctgctagttgcccgtccctttccagcatatatgtcccgggtactaacccctgaaagctgcagctgctgcgataataaccgttgtcctccggcgcaagctccggcacaaaatggagggccgtactctcgaccacctccccacgccgcagattgagccagcaaatctcatattgcccactctcaaattccgcctggctcagccagcaaaccacctggatgctgcagcccggctcattttccagatacaagatctccccatctgtccatccattgctgcccaccatacgcagcgatgcattctgcgccaggcgaaagccgatctgcgtaccgtcctcgcgctgcagataataatcccccggcggcatggccatcgtcagcgtttcgccgtcgtaaaacgtcagattctgcatccaatcaccttgactggaatagagcaccgcccggcctgtgccccggacgcagacccgccagcatggctgcgtcgcttccgtctgcactgcctgctgcgcagccgaggccctggccgccacagcaggcagccgcagcagcagcaccgagaccagcagcgccgctgccaacgccagcaccaaaaagcctgtccgaatcagattcttactcatgtcgcgccctccgttttgctttgttggacccagtttagcacaagactttgggaccttcccacacaatccgtcgatgcaaaattttcggtgaaaattttttgccccctccgcccggaaggcgtggctttgggggaaaaattttgcttccatgcccctttgccgtgcacagcgggcacatctgtggtatgatataggaaaattccccgccggatggcgcggtgggaaacaggaggcatctgcatggcagcgttcgatctggaacagtacctggcccagggcgtccggcatattttgacaagcctgacggctgccgccgggaaaaatattaaaaccgccgcattcctcgcccgctttgccacggcagcccaaagtgccaaacatcgccgggtgcagctggcagcggccggggagcacatcccgccctttctcatcgccagcatcacagagcagtgcaatctgcactgccgcggctgctacgccagagcaggcggtgtctgctgtgacggcggcgcaggcgacgtgctgaccgccgcccagtgggcggaccttttcacccaagcagcggagctgggcgtcagcttttttctgctggccggtggagagccgctgctgcggccggacgttctggccgccgcggcccgggaaaagcggatcatcttccccgtctttaccaatggcacgcggttttcgccagacgcctgcgcactgtttctccagaaccggaacctgatgcctgttttgagcttagagggcgacgctgcggcgacagacgcccggcggggcagcggcgtttaccgccgcctacaggatgcaatggccctgctgcacaaaaacggcgtcctcttcggcgcttctatcacggtaacgcggaaaaacctaacggccatcctggcagaggactttctccaggcgctgcatgcggcaggctgtcgggcggtcatctatgtcgagtacgtcccggtcacgcaggagagtgtgccccttgccttgacggatgcagaccgggccacgctggaggcccgcctcacgcaactgcgcgccgcgcagcgggagctcctgctcgtcagcttccccggtgacgaaaagagctccggcggctgcctagcagccgggcgcggctttttccacatcaatccccggggcggcgcagagccctgccccttctccccctactccgatacaaacctgaccctggtgccgctgcggcaggcactgcactcgccgctatttcgccgcctgcaggagcagggctatctgacacaggcccacaccggcggctgtgttctctttccccatgcagatgaggtcgccgcgctggcccagggacgcgaaatttgccgggaatagaccttcctatttccgggcttttgtgctatactgaatttatcacaatcaccaccagggataaggagataattatggataagctgtttggaaacgaccttgccattgtggcaacaaaggcacggctcttagcggtggacgcggtacataccgcctcgtccggtcaccccggcggctcgctttcgtgcatggatgcactggtgagcctctatttcaacgagatgaacctggaccccgcccgccctgactgggccgaccgggatcgtttcgttctttccaagggccactgcgccccggcgctgtacgcggtcctggctctgcgtggctattttgacccggcagagctgaagaagctgcgctccattgattcgcacatgtccgggcacccggatatgcgctatattcccggcgtggatatgtccaccggctctctgggccaggggctgtccactgcggtcggtatggcgctggccgccaaggctcaggacaaagcctaccgtacctacgccatctgcggcgacggcgaaattgacgaaggccagatctgggaggctgccatggccgctgccaagtggaagctggataacctctgcgcctttgtcgacgtcaacggtctgcagatcgacggcaccagcgaagaagtcatgccgaccgagccgctggacgcaaaatttgccgcctttaactggcatgtcatcaaggtaaacggccacgactacgccgccattctcgccgccctggcggaagcccggcagacgaagggcaagcccaccatgatcctcctcgccacaacgaagggcaagggcgtctcctacatggagggccaatgcggctggcacggcaaggccccggatgatgcgctctttgcgcaggcaaagcaggaactggaagcgacattgcggcaactggagggaaagtaatatggcaggcaaaattgcaacgcgtaacgcatacggtcaggcgctctgcgacctggcggagaaatacccggagctggtcgtgctggatgcggacctggccaacgcgaccatgacgaagatgtttaaggcagcctatccggaccgcttctatgactgcggcatcgccgagtgcaacatgaccggcatcgccgccgggatggctgcctgcggcctcaagccctttacaaataccttcgcgatctttgccaccggccgcgcttacgaccaggtacgcaactccatcgcttacccccatctgaacgttaaggtcgtcggctcccacggcggtgtctccgtcggcgaagacggcgcgacccaccagtgcaccgaggacttcgccctgatgcgggccgtcccgggcatgatggtcgtctgcccctgcgacgggtatgagatgacgaaggcagtcgaagcgctgctggaatatgacggccccgcttatctgcgcctgggccgccccgctgtcgagacggtcacggatgagatccccggctactccttcgccctgggtaagggctgcaccctgcggggcggcagtgatgcgaccgttatcgccaccggcatgatggtccagatggccctcaaggcggccgaacagctgcagaccgagggcatcagcctgcgggtcattgatatgccgacgatcaagccgctggacgaagccctggttctccaggccgcccaagagaccggcgtggtcgtcacctcggaagagcactcagtgatcggcggcttgggcgctgccgtggcggaatacctctcggaaaattaccccgtcccggtcatccggcacggcgtggaggactgcttcggccgcagcggcaccgccgccgccgtcctggcccactatggactgacaccggaggtcctttgccagaaggtcaagctggccctctccaaaaagcgctgagcctatgaaaaaaacgctggaggccgccgtccaaagcgggcagctgcagctgaccccggcgcagatcgggcagctgtgccagtacggcgccatgctgctggagaaaaaccgggtgatgaacctaacggccatcacagagccggaagcagtcgcgcagctgcactttctcgactgcctagctcttttacagctggcggactttggcggcaaaaaggtcatcgacatcggctgcggggccggatttcccggcatcccgctgctgattgcccagccggatcttgacctgaccctgctggatagtacggcaaaacgcatcggctggctgcgggaagaggtcctccccgcccttgggttgcaggcgcagtgcgtcgcggcccgggcggaggaatatgtctccggctgccgggagacgtatgcggtcgccgtctcccgggccgtcgcccggctgcctgtcctggcggagctggccctgccctttgtgcagcccggcggcgtctttctggccatgaagggtgccgcagcgcagcaggaggcagacgaagccgcccgagcaatctgcctgctgggcggtacagtcgaaaaaatcgccgaataccccatcgcggacgcggtgcaccgggtcgtcgtcatccgcaaggagcgcgcgacgccgcagcggtacccgcggcgctttgcccagatccggcaatcccccctgtagcaagacatagaaaggagcgccgccatgcgcgaccagagcagaatccgcgccacaatgctgggcggcgcgatcggagacgccttcggctatccggtcgaatttctgacctttgagcagatccagaaaaaatatggcaaggacggtatcctaggctacgacctcaccaacggctatgcggagatctccgacgatacccagctgtcactctacaccgcaaacggcctgctgctgggcaagacccggggctgcatgcgcggcgtcatgggcccgtatgctggatatctcaccattgcatacctggactggatcaagacccagcgcatggtccagcaaaacagcgcacaaaaggcgtactgctggctgaaccaggtaccggagctgcatcaccggcgggccccggcagtcacctgcatccaggtgctctcggacaaggccatcggcaccatcgagcatccgaccaacagttccaagggcagcgccggtgtgatgcgcgtcgcgcccatcggtgctttttttgacccgcgccagatgcctcagacagagatcgaccgcttgggcgcagaggccgcagccatcacccacggcaatgtcgccgggtggatgccggcggcagcgctggtgcatatgatcaactgcattatctactgcggtgcgacccacgacgactggccggatctcatcgacgacaccgtccgcgcgatgctgcacggcttttccagctacccggccgacggcatcgtcacgcctttaaagaaggctctgtccttggcccgcagcagtctaccggaccggcaggccctgcaaatgctgggcgagggctggaacggcccggaggcgctggccatggctgtcttctgcgccgtgcgctacggcgcggattttgaaagcagcgtcattgccgctgtcaatcacgatggcgacagcgacaccgtcgcgtccatctgcgggaacctgcagggcgccatgctgggcatggagggactgccggagtatgatctggagccgctggagctgcggggcgtcatcgacgagattgcccgggacctctggtgtgactgccggatgcagaaggattccaatttttatgatgaagactggtcccgaaaatatctggaaggccgctgggcagaatagcggacctctgcaaatacagcgcgggctgaggtgaaatttcctcggcccgtgctgcgcatttgacccaaagattgtaagtaaaaacggcgaagggagcccttcccttcgccgttttcactttgttgtaattttttgctgtacgcttggagaattctttcttgcttatttgctctcgtccgtcgtatccgtcccgataccttcggtccggatgaggaatttcacatgcccctcggcgccgtccggcataccggagaagctgccatagtcctttgccaggtcccggagggccgtcagacggtcgatgagcgccgggatattatcccggtaaaggctgcaaagcttttcaatgccgtcggcctggaattcttccatcccgtcgcgcagcgtctcagcgccggactgcagcgcagccgcgccctcggccaggctctcggtgccgtcatagagcgtcttggagcctgccttgaggctggcactgccagcggccgcctgaccgatgccctgcgccagactctgggcacctgcgttcagactggtcgcaccagcctgcagtgtacctgcgcctgccagtgcatcctccagaccagactgcagcgca

SEQ ID NO: 188 - DNA, 2532 bp, Unknown
  16S sequences of unknown bacteria
atctctgttgcactttccctaaggtcaccctcggcggccgttagccgttatcctgtcctgcggggctcggactttcctcatatgccaaagcatacgcgactgctcagtccgctcggtctctttatgatagccttttaaaagtcatttgtcaagggtattttaacggacagcccgtcatataaattattcgggagtgatttttgtggaacaaaacgaaaaatacaattttaacgaggcgctgcccgaaatcgaaatgcccctgtcccccgaaaagccaaaggaaaaggactcaaaggtcaggctgctgcttgtgcagtcagcaatttgcgccgtatgcctcggaatgattttccttgtcaaaacggcgggaaaagacgccttttcggccctttgcaacgcggcgaaagagacggtttaccgcaccgtttcccttgacgaggtcaaatcggcgctgtcaagcaaaatatccgagaaagaacaagtgacaaacggcgaaaactatgttacccccgcagcacccgaaagcgaaacaaacaccgagcaaacggatttttcggaaaatgcgccgatttcgccccaaagcgaggttcagtcacagaccggagagcaaagcgcaaagcctgcatctgccgtcacgctgaattttctaaagcaggagcaagaaacgtcggtcaaggacataaccctgccggtgagcggggaaataacctccgatttcggcagccgaattcaccccatatacggcacaaatcttctgcacggcggcattgacatcggcgtcgaaacgggaacgccggtcaaggcggcgctgccggggacggtcaaggaagtgggtagcaacgcttcggcgggaaattttgtttcgctcattcattccgacaaggtggaaaccaaatatgcccatttaagcgaggtgctcgtttctgagggcgacagcgtttatcaggggcaaacggtggctctttcgggaaacaccggggtttccaccggccctcatctgcattttgaaatccgcatcggcggcgtgagaatcaatcccctttgggtgcttaattttgattgattttacgcttttcgggtgcggcatttccctttcgccgctttttgtcatgcggctgaccgcaattctgcttatcgacaagacgggtcaggcgggcgtcattctgctctgctcgctttttcacgagctcgggcacctgatttttatgataattctcggatttccgccgaaaagcattgcacttttgcccctttcggccgacataaaaatgcccgaaaagctgcttcccctaaaagccgagctcgccatacacatgggcggaattttgacaaattttgctgtgtcgtccgtctttattctcgctttttttgtgtggcgaaacgacacatttctgctttttttcgcggcaaatctcattatcgccctcttcaatctgacaccgatttcgggtcttgacggaggaaattttctttttgcccttttgtgcgcttttgcgccgacagcggccgacggcgtttgcagagcaatctcgttttttttcggcctcgggctctttttttcggctgttttcctaaccctgcgctttaaaaaccccgccctgctgcttttttgcatatacatcggctttatgagcgtgggatttaatttgaaaaaataaaaagaggcggaaaccgcgaaatttccgtctcttttttgttgtaaggtcgattactcggccacaacggtataccaaatgtcgccgttggactgagtctcggacacgactttgtagcctttggcaacaaagttggtgcccgcaccctcggcagcattgtccgaggggtcgaagttaacaaaggtgccgccctttacgatgatgtcggcggtgccgtttttataattctcatcgatgcaattaagaaggtatctgtaatcgtgggtgccgatgtcgggagcgcattcaaagaatccgccgttgacaaccaaggttccggcctgaacattaaacaccgtgccgccggcatagtattttccgccgttgaccgtgacggttattccttcttttgcaatgtgagcaacgtaggggccgccggtgtaggaatatttggaatcggttttatcaaggcacataattcccgcattttcggaggcgttaattgtggtgtcggcagctatgaaaagagccgcccagttgttcgaatcctccaactcaccgggaacggtatatacggcgcccatatcaagggtcgtgggagccttaacgacaaggcggtcggccgcctccgtttttgtttcatcggcggtaatgttgctgctgacggaaaatcttccgccctcggcaaaggccttttgcatgtcggcgtgtcccgtaacgggataacctgcatttgcgtcataggtattgttgtagctgtcattttcgacggtgtcctgggtggcaacaacggtgattgtgataccggtgacctctttacccatgtaatcgttgccggcagtttcctgcatttttcccgacatggtgatgagcttggtggaggctcccgcaccgagat

SEQ ID NO: 189 - DNA, 4692 bp, Unknown
  16S sequences of unknown bacteria
ggagaggagacactgcggcggctctattttgaaaatttaatgggggtttaccggcaatgtatgaactagagaaaatcaaggtgcagtcgctgcaccataagacgcatgtggcggagctgtggcatgggcagacggacgcatgggagcagatgtcactttccgaactggcggagatctttctggcagtcaagcgggaggtcgcacggctggagctccacgcggccgagatgccgctgaattttgcgatgccagcggtggagcttgtttggccggcggcggcgctgcttgcctggaagggcggcatgccgctgcatcttgccatctgcgccggcgcgccggaggacccctgcgctaagtttctgcgcaccggccgcctgccgggcgggctttcggaccgcacacgggaagcggcgggggtgattttggagatcatcggtgcgccggagcaggcggcgctggcccggcagggcgaggcgctctgccttgcgccggaggagctggcccggctgacgcagatgatcggcgtggatgccgtgaccgacgccaggggagagaattatgtccgcaagatctatgagatgacggaatacgtcctccacccggaaacgggacggctttacaccggcctgcaggactatcgggtcatgtgggccgagagcacgcccagcgtgatcctggcgctgcaggacccgctggaagcggcggatcaggtctgcgcgctgctgggcctgccggatgctgctgcactgcaagcggcgcaggccggcggcagaggacgttttgtcgagtactaaaaaatagcaagggagctggggtatggcactgtatgcaatcggagacctgcatctgtccctggggacagacaagccgatggatgtctttggcggcgcctggaagaattatctgcaaaagctggagcgcggcctttcctgcatcggcccggcggatacgacggtcctgctgggcgatatcagctgggcgatgaatctggagacggcgacggcggattttgcgtatcttgccagcatcccgggccggaagatcatcctcaagggcaaccacgattactggtgggtcacggcggcaaaatttcagcgcttttgccaggagcacggctttgccgatctgcatctgctcaataacaacgcctatttttacggcgagatcgccctgtgcggtacccgaggctggttttttgaagaggagcgccacggcgggcagcacgatgccaagatcctgaaccgggagctcatacggctggaggcgtcgctgcaggcggcgggggagcgggagaagtattgcttcctgcactatccgcctcgctaccggggctatacctgcccggagattctggcgctgctggaaaaataccgggtcacccggtgctattacggccatctgcatggagacagccacaagctggccatcgagggcatggcaaatggcacagattttcacttggtttccgcagattttattgactttacgccaataaaagtgtgttcatagaagaaattaaaaaaaagagtagatatttgcgcgcgtttctgttaaaatgatacagattttaaaggtggaagacggccaacgcgccgcaccagatagcaggaggaaaaaccatgaacgttaagagcatcgagaaagaaggctccaaggcaaaagtcgttgtcgaggtcgaggcggaattgctggaatccggcaagcagaaggcgtatctgaaggcacggaagaacattatggttcccggcttccggaagggcaagtgcccccggcagatgatcgaggccatgtatggcgcggacgtcttcacggaagacggtatcaatgagattttcccggaggtctatgccggtacggtgctgaaggaagagaacctgaagccggtcggcatgccgacggtggttgacatgcagttcccggaggctggcggcgtcgagctgacggtcgagacggagctttaccccgaggtcacgctgggcgattataagggcctggagatccccaaggcggaagccacggtctccgacgatgagattgcagcagagctgaaccggatggcggagaacgttgcccgggtgacgacggtcgagcgcgccgccaaggatggcgatatcgcggtcatcgacttcgaaggctttgacaatggcgtctcgtttgacggcggcaagggcgaggactatgagctggagctgggctcccactctttcgtgcccggctttgaagagcaggtcgtcggcatgagcgccggggaagagaaggacctcgacatcaccttcccggagaattatcacaaggagctggcgggcaagcccgtcgtgttccacgtgaaggtcaaggaagtcaaggaaaaggttatcccggagcaggatgatgaattcgtcaaggatgtctctgaatttgagacgctggacgagctcaaggcagatatcaagagccgctttctgaaggaaaaggaagattccatccagtccgcgtttgaaaacgccgtgctggaaaaggccgctgccaatatgacggcggatatccccgattgcatgatcgcggaggaagtcgaccgccagatggagcgcttcggctaccagctgcagatgaacggcatgtccctgaagcagtactctgaaatgatgggcggcaacctggacgcgctgcgggactccatgaagggcatggcggaagccaaggtcaagcagatggtcctgctcgatgccgttgccgaggccgagaaggtcgaagtcacggcggacgatatcgctgaagagtacaagaagctggccgattcctataagatggacgaggagaaggtcaagcagatgctgtcggaggacgatatcaagggcaacctggagagcagaaaagcagcgaagctgatcgttgacgcggccgttgccgtagcgccggtggaagagaaggcagaagaagctgccgaatcgaaggacgcagaataagagaacggctaccggaacgtgccccaagcgcgttccggtcccgcataccgggcggcgcgccggaagcggccacccgcaaggcagggcggccacaactgggacgcgcaggccgtgttccagttctttgaatttctcgcagtgctttgggcgggaataaaagcccaggcagacggttagaatgttacatccaaagaaaggagtttcactatgagttttgtcccctatgtcgttgagcagaccagccgcggggagcggtcgtacgatattttttcccggctgctgaatgaccgtattattttcctgtcggaggaagtgacagatgtatcggcgtcgctgattgtggcgcagatgctgtatctggaggcccaggacccggataaggatatccagttttatatcaacagccccggcggcagcgtgacagctgggatggcgatctatgacacgatgcagtacctcaaatgcgatgtctcgacgatctgcgtcggcatggccgcttctatgggcgcgtttctgctctcggctggtacgaagggaaagcggatcgctctgccgaacgcggagatcatgatccaccagccctccggcggcgcccagggccaggcgacggatatccagattcaggccgagcgcatcgcccagatgaaaaagaagctgacgaagatcctggccgataacaccggcaaagatgtagagacggtggcggcggactgcgagcgcgatcattttatgaccgcggaggaggccaaggcctatggcctgatcgaccaggtgatctataagagataaatcagccggaataggagctgacgaatttggcaaaaattgatgaaagatcgatccgctgctcattttgcggcaagcggcaggaccaggtaaagcggatcctctctggtccgaatgtctatatttgcgatgagtgtgtggatctgtgcagctccctgctgcatgaggatatgtacgagacgcaggagccggccttccagcccggcgataagcttcccacgccgaaggagatcaaggcgtatatggacggctatatcatcggccaggaggatgcaaagcggaccctctccgtctcggtgtataaccactacaagcgcatcttcttcggcggagactccaaggtggagctgcagaagagcaatatcctgctgatcggccccaccggctgcggcaagacgctctttgcccagactctggcgaagatcttgaatgtccccttcgccatcgcggatgcgacgacgctgaccgaggcgggctatgtcggcgaggatgtggagaacatcctcctgcgcctgctccaggcggcggattttgacgtcgagctggcagagcgtgggatcatctatattgacgagatggataagatcgcccgcaagagcgagaatacctccatcacccgcgacgtctccggcgagggcgtgcagcaggcgcttttgaagatcgtcgagggcaccgtcgccaatgtgccgccccagggcgggcggaagcatccgcagcaggagtttatccaggtcgatacctcgaatatcctctttatctgcggcggtgcgtttgatgggctggataagatcatcgaagcccggacggaccgctcctccattggctttggctcggaaatctctagtaagtcccagcgggatctgggcaagctgtttcaacaggtgcagcctcacgatctgctgaaattcggcatcattccggagctggtcggccgcctgcccgtcataacgacgctgcagga

SEQ ID NO: 190 - DNA, 3145 bp, Unknown
  16S sequences of unknown bacteria
tgagatatgcctgatttttttcgatcagcgccacacgctgggccacgcagtcacggctgcgcagcgggtctgcggtttttttgaatgcaaagtccaaaagctggccaatggtcgtggaagcaacgtgcaggcgcgtatcactggcggcataataaatatacaccttaccgtcatcatccgcaatagcaccattggtaaataccacgttggaaacatcgctgacgcgctcccagccacgcggcgcgatcaaaaatccggccggttcagcaatcactttccagggctctttcaaatcggtcacaaacaggtagctcacatagcacaggccctccgcagtgttgcgcacgccatgggcaatgtgcagccagcccctggccgtcttgatgatggtacacatcggcggcagcagcggcatagcggtgttcagcggttttctggtatataccttaaggggtatctgaaaacaaagaaaatgacggatattccgcaaacacaagcaggatttaaggcaaagagccgcaggaatcctttgtggattccaaggctttttaacgcataatccggctgtgtttgtagaaatagaagatattttcgtcttttcagatccaccctggtcaaaaacacataaatgctctctatataactttcagtgtttttatttcactgttcgctatatagggagcatatcagatcccacggagattttattcaaaccatttttcaaccgctggccgccaaaggtttcgcctgtaaatcatattgagggggtgtaaatccatttccccatatggtatgataatatcaaattcttttacatcgagatccacccgagggcattcgccacagaacttaccagaatgatggcagcaaacaccgggcaaagggtgcggatcataaaattgaaaaccttttttcggcggaaaggttgaccattctgggtcacctcttcctcaatcttttccacgccaatcacgctggtcaccagcaggcaggttgcaatggccgcaatgggcatcataactgagtttgtcaggaagtcgaagaaatcaaggaactgcatcccgataacggtcacgcccgacagcgggccatagccaagcgccgacaagcttccaagcagcaccataataatcccaatcactgccgcagcctttttgcggctccatcccagttcatcctcaaaagtcgatactgcgctttctgtcaatgcaatagagcttgtcaccgctgcaaacagcaccagcacaaagaacagcacgcccaccagcgaaccaagttccatgctttcaaaaactttcgggatcgtaataaacatcagtgcgggaccggcctgcagggtgtccgggtcaccaccagagaacgaaaacaccgccggaatgatcatcaacccggccatcattgcaatcagcgtatcaaaaatctcaacgttcttggtagatccctcaatggacacatcttttttcatgtaagagccgaatgttactaaaatacccattgcgatggacaaagaatagaacatctggcccatggctgtaaccactgtcatccatgaaaaattggccggattcggtactaaaaagtacttcactccttccagcgcaccgggccgtgttactgaataagctgcaataattactgataacaccaccagtaccggcatcatcatccgggaaacacgctccacaccattgcggacaccggcaaaaatgatgcccagtgtaagcagggtaaagagcaggaatacgatttccaccgaagcgccattggcgatgaaagaggaaaaatacccatcctgtgccagctcactgccatgaccggtaatataccccaccagatacttgataacccaaccgccaataaccgaataatacggcacaatcaaaatgggaattactgcgttgatccatcctccaaatgcacgccagcgtccctttccagaagctgcaaaggccccaaccggacttttccgggtcatccgtcccagcgctgtctctgccataatcattgtatagccaaaggtgaccgccagcagaatgtaaatcagcagaaaaattccaccgccatattttgccgccaggtatgggaaccgccagatattgcccaagccaaccgaggcgccggctgccgacaggacaaagccaagtttgccggaaaatgagctccggccgctgtgttgtgtttccatttattttttctccttaccattttcacactattattttagtgtaacataaccgccaaaaaactgcaatctacgccacaaacaatcgctttcatagggaggggcaaagtcgttgcttttatatccctgtctgccattctataaaaaagcttccaccttacggcagaagcttttctttggtgggccatccaggggcccaacacccacggactaatgaacagtccactggactgttcattacctcgctctcgctcggccgtcctttcaagtcctggatggcctttttataaaaaaagcttccaccttacggcagaagcttttctttggtgggccatccaggacttgaacccgggaccaagcggttatgagaaagcatcgctgacaaaaattctagaatcaccgtaaaattttgttggtattccacaaataagagcaactgattttaggtaatgtgtagtaattttcgcagcgtttctcaaccaaaaggcagagccgtagataatttggtagatgggttttggagagaggcaagattaaaagtcacacacagaaattagagtctatggccgcaagggctaatacctgtgcaacaaacccatcctcagtctgcacaaagtgatagggtgcgtattccccataggcttcggggcggctgatggtcataatctctacaccggtattcccaatggcttcattcatcgcccatttcaaatcggctaaatgtttcccatgtacggtttcaaatgctatgcagccgtgggcatagcggtctttagcaataacgtaacacatttgtttacccttatttttggcccggcgcaagaagattcagcacgtcaggcgattgcgaccaattcactaagattgggatactcgtcaatatgatttcgcacatatgtacgggtgaagcctgcaaacttatggcttctgttccgcattccacgcagggttctgtaatttctc

SEQ ID NO: 191 - DNA, 7811 bp, Unknown
  16S sequences of unknown bacteria
gaagaaacagggttttgcggggaatcgtgcaccaaatccgcgccggccggtcgccgaaaagtctctcggaattggtgcaagggaaacgaagaaacagggttttgcggggaatcgtgcaccaaatccgcgccggccggtcgccaaaaagtctctcggacttggtgcaagggagacgaaggaacaggggtttgcggggattcgtgcaccaagtccgcgccggcgatgcgccgccgcgcaaagccctgcgccggccgcgccaaaaaataacaaaaagcgtgaaaacacccggagcctccgggtccgttccgcttttgtcgggtcttgccgccagtcaatatttcttcggttttgatggttttaagccggttcatcctatttcccggaactgtcgatttcttcctggatgtcctgaaccctgcgctgattcatatcggtgtaatcctcgctgatgcaggtgtactctcggttgaagaaatcgctgtgaatcataaaatccgctgtggatcggttgttggcaaaaggcacatcgtacacatttgcaattcgaagcagcgccttgatatccggatcgtgaggctgggcttccagcgggtcactgaagaaaatcaccatgtcgattttcccttccgcaatgcgggcccccacctcctggtcgccgcccaaaggaccgctcttcagcgcttctaccggaagtcccgtgttctcggaaatcagccgcgcggtggttccggttccgcagaggaaatgctgtcccaggatgtcctgattcttctgacaccaccgaatcaacgcttccttcttgtggtcgtgagcgatcagtgcaatccgcttctgcaggccgagtgttcttgtaatatccgccatattttttcacctccttgtatgcgttcagtatagcactattcggaaaatgtaatatcccgaaattgtatttttgcagaaaaatttctgtaaaaaaagggacgaaaagtgcggaggcgaccgacacatttctgtggaaaactatttctgttcgtcacatcatttcttcacaatgcgaccatttacaaaacgcgggatgtggtaaaattctagtgtatagaaatgtagagtattgattttttatagggagaatccatgattaacaaagttgtgggattgtatttcagcccctccggcgacaccgcgaggctgaccaaaagagtagcagaggaaatcgcgacgcgcatggacgacgcctgcattgagaacctctctgtatcatatatcgatttgctgcgcaatcctctgatggaagactgtacttttgatgaggaaacaattgtggtgatggggattccggcgtttaccggacgggtgcccctgccttgtgttaagatgattcagaaaatgcacggcaagaacaccatgaccgtctgcttggtggattacggcaacagctcctacggagatgcgctgtacgagttgtatacctttatggaggaccagggattttccgtgctcagcgccggagcattcgtctcccagcacgtgattttcaaaaaaatagcggcgtgccgtccggacgtccgggatctccagaaggtaaaggaattctgtgagcttacctcccgcaagctgcaccggttctgcggcaccatgattcaagagctgcgggcgaagccggcaccgctggacatcaaggggtccattccccacaaagccccgctgcgcttgccgctgcacccgacgcccaacaagcactgcactaactgcggagcctgtgcacagatttgccccatgggggccattaatctgagggacgtgcgaaaggtggatgtgcggaagtgcatttcctgcaccgcctgcatccgggcatgtccggaaggggcgcgggattttcacggaccgatgtgtgcggcttccggcctggcgctggagaagctgtacagcaaaaggaaagacccggagtggttcttgtaaacattgaatacaatctgcggcaaccggaaacctccggtgctgcggatttatttttttattcatttttttacaaaaataaacataaagcattgtttaaaaaaccattgacaggagaaaaagggaagtttagaatacaagtatacaattttaaaagaagggggcgcatggtgcccgaatagcgtaagaggtaagagatatgaatgaaattaaactgaacgagcggacccatcttttgcaggaagagccgtacagctatcagctgcaggatgtggcagagccgaatttgatgcgggagttcttcgaatatacggagattccgaaagtttcgttcaacttccggcggagcccgtacaacatgccggagaatatatggattacggataccaccttccgggacggacagcagtctcgggagccgtataccgtgcagcagattgtggatatctacaaaatgatttccaaactgtccgggccgaatggaattatccggcagacggagttttttgtatacagcgatcgggaccgagaagccatcgagaagtgcatggacctgggattgaagttcccggagatcaccacgtggattcgggcgaagaaggaggactttaagctggtgcacgatatcggcgtaaaggagaccggcatcctggtgagctgctcggattaccatatttttacgaagctgggtatgacgagacggcaagccatggagcattacctttccgttatcaacgatgcctttgaggccggcgtggtgccgcggtgccacctggaggatattacgcgggcggatttctatggattcgtggtgccgttcgtgagagccattcaggaaatgtcggagcaggcgaagattccggtgaaattccgcatgtgcgatactttgggatacggaattccgtatgtgggaacggcgcttccgcgaagcgtgccgggcatcgtctacggcatgcagaattactgcgatgtgcccagcgagatgctggagtggcacgggcacaacgacttctacaaagccgtagccaacgcggccagtgcatggctgtacggatgcgcttcggtgaacaccaccctgttcggcatcggagagcgtacgggaaatgtcccgatggaagccatggtattcgagtatgcacagctgaagggaaccctggatgggatggacaccacggtaatcaccgacctggcgagatactatgagaagaagatcggattcaaggtgccgccgcagactccttttgtgggagagaatttcaacgtgaccaaagcgggcattcacgcagacgggttgctgaagaacgaagaaatctacaatattttcgacaccaagaaattcctgaagcgtccgccgctggtttccttgaaccagaattccggtgcggccggcgtggcactgtggattaacgaatcctacggactggagggagaacaccgggtcggcaagcacagtccggtggtgaaatacgtgaagagctggatcgatgagcagtacgccaacggcagaatgtccatcatcagcggaaaagaagtggacaagaagattgatgaatttatcgcctccgatatggggacagaaggagaacagtaaaaatgggtaagacaattgcagagaagattattgaacagcatctgctttccggggaaatgaaaaccggggaggagatcggtcttcgaatcgatcagacgctgacccaggatgccaccggaaccatggcgtatctggagtttgagtctatgggcgtggatcaagttcggacggagcggtccgtggcttatatcgaccacaacacgttgcagtccggtttcgagaatgcggacgatcatcggtacatccagagcgttgcggcgaagcacggcatctggttctcccgtccgggaaacggcatctgccatcagctgcagtatgaacgcatcggaaaaccgggaaagacactgatcggttccgattctcacacacccaccggcggaggtctgggtatgctggccatgggtgccggcggaatggacgtggcggttgccatgggcggcggtgcgtattacattccgatgcctcgtatgattcgggtgaacctgaagaaccggctgggcgacaatgtgagcgccaaggatgtgattctggaagtgctgagacagctgtccgtaaagggcggcgtgggtgccatcgtggagtacggcggggaaggaattcagtccctcagcgtgccggaacggtgcaccatcaccaatatgggtgcggagctgggtgccaccacctcgatttttccgtcggatgaggagacttggaagttcctcaaggctcagaaccgggaagaggattggattccgctgtccagcgatgaagatgcggtatacgcagaggagtacaccattgatttgagcgagctgaaaccgctggcggcatgccctcacagcccggacaacgtgaagccggtggacgaattgaagaaaataaaggtggatcagattgccatcggatcttgcaccaattcctcctatgcggatatgctgaaggtagccagaatgctgaagggaaagaaaatcgccgacggcgtcagcctgggaatttccccgggatcccgccaggtgctttccatgctggcggagtgcggcgctttgacggatatgattgatgccggtgcccggattctggagtgcacctgcggtccatgcatcggaatgggcttttccccgaattccggcggcgtgagtctgcggacctttaaccgaaacttcctgggccgctccggaaccaaggacggacaggtgtacctggtgagcccggaaaccgcagcggcttccgctctgacgggatatatcacggatccgacgaccctggaatccgtaggaaaggtagagataccggagcagttccggattaacgacagtggttttattccgccgctgccgccggaagaggcgaaggatgcggaagtgcttcggggaccgaacatcaagccgttcccggaaacccacccgctggaaaacgaaattcaggcggaggtccttctgaaggtgggcgacaacatcaccacggatcacatcatgccggcgggcgccaaagtgctgccgtaccgttccaacattccgaagatttccactttctgcttcggcgtagtggacgaaaccttcccggagcgggccaaagcggcgggcaagggaatcatcgtgggcggatccaattacggtcagggatcttcccgggaacacgcggcattggcgccgctctatctgggcatccgggcagtgattgtaaaaagctttgctcgaatccacatggccaacctggtgaatgcaggaattctgccgctggtatttgaggatccggcggactacgatcggatccggcaaggcgacgtgctgaccctttcggatatcttcgaagggttaaaggagaaccgggtgattcttcacgccggggaaaaagaaattccgctgcgaatggagctggcggaaaggcagaaggaaatgctcctggccggtggattgctgaaatatgcggcgacaacgggtaagcagagataaaaaggaaagaaggaaagacagtggactgcggagttgaaaaggatattcagaaagcggtagcggaatttgaagtgctgctgcgggaacaggtagcgcgaaatgaacggattcggaagagccgggaagccgccggaagcggcaaagaagaaggtcggggcgtgaccatcggtctgacggcaggagacggcatcggtccggtcatcatgaaagaagcccgggcggtgctggaaaaactgctggcagaggaactggcatcgggagaggtgcgccttcgggaaatcgatggctttaccctggaaaatcgactggagaagggacagactgttccggacgaagtgctggcggagatgcggcagtgcgacgtactgctgaaaggccccaccaccacaccgaacgcatccatgaataccaagaatctggaaagcgccaacgtgtacctgcggaaaacctttgacctgtatgccaacgtgcgcccggtttccattccggaggagggcatcgactggaccttcttccgggaaaacacggaaggggaatacgcgttgggaagccgcggcattcgaatcggcgactcattggatgtggatttcaaggtgaccacccgggaaggaaccctgcgaatcgctcgggctgcctttgatttcgcccgggccaacggaaagaagcgagtgtccatcgtgacgaaggccaacatcatgaagaagaccgacggcgacttccttcagatttgccgggaggtggcggaggaatatccggaaatcgagacggacaactggttcgtggacatcatggcggccaacctggtgaacaaggatattcgaaaccaattccaggtgttcctgctgccgaacttgtacggggacatcatcaccgatgaagccgcgcagattcaggggggcgtaggcaccgccggaagcgccaacatcggacgggattatgccctgttcgaagccattcacggaagcgctccgcgcatggtggaagaggacatcgaaggctatgccaatccggccagtctgatgaaggcgacggcgatgatgctggcccacgtgggatatgtggaaaaagcggaacgtctggaaagagctttggatgcggcagatgcaaagctgggaccgaagatgatcggacttccgggcggcggaacctgccgggagtttgcggacgaggtgctggcggcgctgtaggaaaggtgtcggaaatgttcgcctccccaaaacctctttttgtggtacaatattcctcgtgaatgaaagaggaatgggggcaattgatgatacataattttatagtgtgcttaaatgcggtcatcccgctggtgctgtacctggtggtgggaatgctggtgcgaaaatacagcgtgctgacggaaaaggacgtgcggaaattcaacaagatggtgttcgtggtgttttttccggcgctgatgtttgaaaatctctatgcggcggatatttcggaagcctttgacgggcggctgattctttttgcctgcctcttcgtgctggcagtgtgcggaatcacctggggaatcgtagttcgcatggacataccggaccgaacccggggcgccatgatccaggcggtgtaccggagcaacttcatcctcatggggcttccggtggcagagaacatctacggcaagggctgcgtgtcggtgacggcggcgctgatcatgttcgtggtgccgctgtacaacttcttggcggtcatcgtgctggaatacttccggggcggccgggcgaatttgaagtccgtgttgaaaaaaatcctgacgaacccgattattctgggtgcggtggcggcgattctggcgctggcgctgaacatttcggtgccgtctgcggtgaataaaaccatctccggaatgtgcgatgccaccacgccgattgccatgattctgctgggcgcatccttcaacaagagcagcgttcatgcgggcaaaaaaaatcttacgatatgcgttctgtcccggctggtcatcgtaccggcgattggcttgggtcttgcggcgatgctgggcgtccgagacgtggcgttggtttccctgattgccatgatggcggcgccgccggcggtttcctcctataccatggcggaggcgatggactccgacggcgagctggcgggaaatgcggtgatttttgccacgccgctgtcctgtgtgaccatcttcctgtggctgttcctgttcaagaacctgggaatgttttaaacaaaaagcctgtttttcacaggacacctattgaaaactgcatttttggcggaataaaacgaccaaagtcaataagacggggctgtcgcattaacaacaaataagacagctccaaatgcaaaagaaacaggcc

SEQ ID NO: 192 - DNA, 32759 bp, Unknown
  16S sequences of unknown bacteria
cctccttatgttgttcttttccatatgtaacacgtaatgtatggctgtacaatgccagtctcgctcgtatcgcctgttgacgaagcctgtgctacatcgcgggtgtttgccgatgcttgaatccctgcatttacgcctgcctgtgcactgccttcatacgcataggtaccataacttgatgtagagtatttatacgcttgtatcatattatcgtcagaacccacagcagtaccgtagtaacctttatatccaatcttgaattcgtgtctttcggttttcttgccgcctgttttttctactgtattaaagtcgttgtcggcagtattcactcctacagggacacgaccgcctccccaggctgcccatgtgccaccataaagtgcgcccggatttgtagaaaccgttgtttcaaacagactgcccacaggatgcgatgccaaaaagattgcgcttgttccgatgtcctccactgtaagtgtaatattacctgttaacgccttaccattgatagtttggtttgtaggtactgcgcccacctcttctgcggtcggcatttgtattaatttaccgctttcgtttaaacctgccacaccgttcgcctgatttcgttctgagcttgcaatcgcactgacatcctgcgccattaatgtaatattgcctgacaatgcttttccgttgatagtggttcccacagaaaccgcacctatgtcattggcagttggcatttgctgtaatttaccgctgctgtccagtcctgcaattccgtttggctgatttttttgctcaaaaattgcctcttctaccaattctcctgctacttgcgccatttgttccacagcttgatttgctctgtccgctgctgtatttgcttgactgactgctgcttgtacagcagtttgagcctctgttactgcttgctgtaattgttcgtctccattgtccagccagtcgtccacactttgcattttatgtaagatttcttcatcttttacggccagccaatctttcatttgactttgcatctgttgggataacgcatcaaaagcatcatcgaattcatttagtttttcgtttaagacttcagttacagtgtctatcagtccgtccgcttcttttagtgcttttaacaataatgtaaattcattgctgctttctattgctttatcatcttccaaagaacggtcaatgataatcgttaaacccaaaatttttaacagagaaccgtttttatctataatatgaatttcacaatcgcaaatcgtacctgccacagcactcatttgagatgttaattctactgaaatcaaaccgttttttgcgtcaagaatttcacaggtattatatacaatggttttgtcgggtttggtcatataaatcgccgctgttttttctgaaatatccaaccgtttgtcatggtcatacaaagacacttcaatccatctggcagcaatctctccttgtactgccgtaactaccgcatgtgcgttacgccagacatttaagcataccttttttgatgtcatagtttcctcctttatgtaatgttatgatagttccatttttactttatcaaaatagacaagaacaaatcgaacaactgagattttgttcataaaatttccaaatatattttcatattccttacgtaatgttcaaaaaatgtccataatctaggattaaaataaaatcattccaagaaggaaaggtaacattacaattacctgaaataatcgaaactgcccgcgttatggattggtcggaataccggatcatagccagagcagaccaaaaattctttccatacggaaattcatatatatcatattctcatactcctcctaaatgccgctgtaaagcggtatttttttgttctcatcatgaaatcgtttcgatgtttgatacatattacaaagaaacaacagctatttgtaaatttgttttgaaaataattacaacctcttttatcatgtggcagatattcgtaaaaatcacggtgtcagtaaaagcattatcgttgccaaaacagttttgaaattgaatgtatattataaaacaaatcttgtaatttcctcttgtatgtatgaaaacgaaataacatggaaaacagtaaacattgccaaccatattttaattatttcctgttcatactataaacggaggtaatcaacatgcaggaaccttttttatgtttatcagagttactggaccaagatttgtccagctatgaatattttcattctttgcccttggaagttcaaaagaaaattgaagaaagtgatgtcaattcatttgcggatatgcagcagatagctgaaaaaataaaatcggaacaaacacaaaaataaagaaaaaaaccacacaccgtatggtgcgtggttttctattataagacgcaatttaagaattcttttgttctttgttctcttggatttgcgaaaaatgcttttgcgggaccttcctccactttataaccgtctgccataaataccacacggtcactgacatcacgcgcaaatcccatttcatgggtaaccacaatcatggtcataccgccggttgccaattccttcatgacctgcaatacgccgcctaccatctcagggtccaaagcggaagtcggttcgtcaaacagcatcaaatccggttccattgccaaggcgcgcgctatggcaacacgttgtttttgtccgcctgacaggttgaccggatattcggctgctttattttttaatccaacacggtccagcaattccaaagcacgaacgtgtgcctgttcttttgacatcagtttcaaatccacaggggccaacatgatgttcttttctacggtcaaatgaggaaacagattaaaatgctgaaataccatgccgatatgctgtcttaacttgttgatatccgcctttttgtcggtaatttcttttccatctaccacaatgctgcctttggtcggagtttccaataaattgatacagcgcaaaaacgtacttttaccggaaccggagggaccaatcaaactgacaacttctccttgttttacggtcatgtcaatgccttttaatacttccagttttccgtagtacttatgcaaatcagttacctgtacctttgagttttccacggcgcagcctcctttctaccacagcagacaatgctgtaagcaaagataccaaaattaaatagtaaattgccaaaatcaagtatgtgttaaagctttccaagttttgcgccacaatggccttacccacttttgtaagctctgccaaaccaatgacggatagaatggaagaatccttcagagtaataataaactgattaattacggaaggaataacgattctggcagcctgcggcaaaatgactttctgcatggttttcatataaggcaaaccgagagaacgtgctgcttccatctgccccacatccacagcttcaataccgcttcggaagatttcagacaaataggcgcctgcattcaaggtaagcgtaatgatacttgctacctctacaggcatggtaaatccaaacaatttcggaataccgaagtaaatcataaatgcctgtacaattacaggtgtaccgcgaataacccacaaatatactcttgtaatggcatgcagtactttatacttggaaagacgcagcgcacagaacaacagtcccaatacaaccgcaaataccaatgacaccgctgtaatccataaagttacgcctgctgcctgtacaaaacgcggaaaggtagttccaagcagtgtaaagaagttaacaccttcattggattccacatttgccgctgtaccgtcaccggaagaaatgtagctgtctaaaatacgctgatattctccgctggcctttacattttccaagccgtcgttgaacatttgaagcaactctgcgttttgtcctttttttacaccaaggccgtaagaagaacctgcttctttttcacccaccaactttagtccgatgtcttggctgattgcataacccaacacagggtaatcttcaaaacaagccgcagtattgccaagctttacatcttcatacatattggcggaatcatcgaacgtaacaacggaaaaaccgtattgttcggacagtttatttgctaaagtggcaccttccgtaccgacttttaccgctactttttttcctcttaaatcttcataactttgtatggaatcgttttccttacttactgccatggagattcccgaatcaaagtaaggggtggaaaaatccatcttcttttggcgctcttccgtaatggaacagcctgccaaaatgccgtctgcttgtcccgattctaccgcttgcaatgctgcgtcaaatccaatggcacgcgcttcatactcaaagccttggtcttttgcaattgcttccagtaattctacatcaatacccacacggttgccctgactgtcttcaaattcaaacggagcaaacgttgtatccattgctatgatatatttttttcccgtaccgttgctctgttcttcgttctcgcttgcagcggcagcgctaaagcaggaaaaaaccgttatcagcatcaacaacagcgccgccaaagaaaacacttgttttgttctgtttttctttttttgcatgcccactcatcactccctaacaaaatgaaatactttctatggtaaccaaacatattccctcagatgtttggaaaacaaaaaacgttatattccgtttaacacaacaaaagaccgggacaactcccgatctttttacatatacacggaaaatctcaatttattataccgaatcaccggttttctgtcaattaaaaatatatttgtcctattctttgacaaaacagttttgattgatatctgaaattgtcagcagacaaagcggctcacgggcaaagcgaatgcgattctgatataaaacgtacaacgggaaatgaaacagcgctgatatctatccgcaaagaaggtttcatacaacacaaaaactccctaccaagcctgttttgaactgtcaattttccttttggaattattctgccttttcctgtaacaaccgtcatatttcaaaaatcaccatacaataatttgacatatcccctccgcactctcggttgctgccgcagacaagataagcgctaacgtcttgcttgcaaaatacactgagctcaaatacaaaatgttccaaactctgtttggatgtatcaaaaagaaacctgcaatcagcaccgtaaattctctcacaaaaacaaaaagagtccgaacgcaaagtgcattcgaactcaatttggtgctggtagccagacttgaactggcacggtattgctaccgagggattttaagtcccttgtgtctgccgattccaccataccagcgtggaacgtttgttattatatcataagtaaattacaaaagcaagcattttattttgtaatttttatttttctttcggacaaaagtacatgggatatggtacattcatatgtattatcacatgttcgttttcacgcctcaatcgttgatgcccggaatacgaatattgtatttgcggtaatattcctttgtttcgtcaaccctgtaaacttcacttttatgcttctcccacagcatggtgagaggataaagattaatccaaatttcgttgctgctctctttttgagattcatcaaaaataagctgcatacccaaatgtaaatgcggaacctcaatattattggcattctcttttgtactgtaacctgtgtgtccaacatatccgatgacatcgcccgcttttaccactttgccttcttcaatgccttccgcataaggacgattttgacgcaaatgtgcgtaataatagtatctggtaccgtccaaactgcgtattcccaaacgccagcctccgtattgattccagccgaccgcttccacaatacccgattcaatcgcaatgacgggcgtgcctgtttgcgccatcaaatcatgccccaaatgctgccttttgtagccgtaagtacgttgagcaccaaaatcatcataatgctcaaagggataatttttagcaatgggtgaataagcaatcaaaccgtatttgtcctgccaaaccgtttctccgttttctgatgttgtttctatttgataatcacctaccattccacccagtaccgcagtgtatgctttgctgtaataggcataatactgcattccttctgagagagattccattgtttctcccgactgaagtttatctactaatgtatccatgtcagagctttgatattttgaaaaatctccgccgtatttggctcccaaatatgccagtaaatcaatccagctgattttcacttccgcgttttcttcatggctcttaatgtcaatttgcagcgctttttccagagccgcgtatgtgacattaaattccacatacttgataaactctttcttttcctctgtctgtgattctgtggtctgtgattgcacagattcctcaacattggattccccggccgactcctgtatggactctgccgaggtactctgtgataacgattccgtttgcatatcggacactgtgtattgtcccgtacaatagatacctgcaacagttccgccaatggcgccgcacaccccgatacaaacaacggaagcgatgataattgttttacgtttgaagttgaataccatgtaataatcccccgctttgttcattcttatgaagcagcgggggaaaatatttctttatttacaaatcatctgcatcttgtacgggagcttcatcgtcataggtcattcccgtataactgcccagcacgtcggaataaatgggaccttctgtgttggaaaatgcttgtgtatggtcacatttcccaccgtggcttgttccgctttgcgtctgatgcagcgttgccgcaatatttttaattcgtttcattttcaaagatgtttttccatgttcgccgcgtctgtaatgtctcacctttcatacctccgcacaccaatcaaaataggcaaaaaaattgctccctccttattataagtaggagcaaagcaattattactgttctattgatttttcggccaatattgccctgataaatctttgatgacttccgatgccaatatcaagcccgctacaggcggtacaaaagatacgctgccgggtgtttgacgttttgaggaatcttgttccacttcggcatcttcttcccgctttacgggaacttctttggaaaacaccacttttagcttcggaatgtctcgttttttcagctccctgcgcatcactcggcacagcggacagactgatgttcgataaatatccgcaatttcaaattgtgtggggtccaatttatttcccgttcccatactgctgatgataggaatctttttttcatgggctgtttgcaccaatgccagttttgcggaaatcgtatcaatggcgtccacaatataatcgcaatcattgagaaaagcagtatcggaatctgccaaaaaaaattctgttttgaccgctacatccgcttgaggattgatgctcaaaatccgctctttcatcacatctgttttatattttcccaccgtctgcatcgttgcaatgatttgtctgtttaaattggtaagcgaaatggtatcatggtctatcaagcaaaatgctcccacaccgcttcttgccaatgcttccaccacaaatccgcctacgccgcctatgccaaaaactgcaatcttcttttgttttaattgtttcactcctgcttttcccattaaaagttcggaacgagaaaattgattgagcatactgtaactcctatcacttggtagtattgtactactcactgtaatggttcttttttattttgtcaagaattctgcgaaataaacacagcgtaattcaaataaaacgcagaacataaaatatttccaacattggaataattccgtactgaaaatgctcaacttctgtctttttatcgaaaatcatagattataattataaaatacgcggataaaaattacatacgcaactatctgtctttttaagagataacgtggtatactaatcgaagataaaaatgaggtgtatgaacatgtactatttgggaattgaccttggcggcaccaacattgctgccggcgttgtaaatgaacaatatcaaatcatcggacgcagcaaaacaaaaactcacgtcccttgcagtgaagaagaaatgtgcagtcagcttgcctttgccgcactttctgctttggaagatgcaaacattgctataaacgaaattgaatggattggtattggcagccccggttccattgaccgtaccaacggcatgattaccttttccagcaatctgcactttcaccaatttccgctggagcgactactcagtgaaaaactttgcaaaaaagtcatcattgaaaatgacgccaaggcagccgcttacggtgaatttttggcaggcgccttaaagaatgcaaacaatgccctcgccattacattgggaacaggtgttggatgcggcattattatcaacaaacaaatttacaggggttcaaatgcttcttcgggagaaatgggccatatggtaatagaacacaacggccgtccatgcaaatgcggcagaaacggctgctgggagcaatatgcatcggcaaacggattaaagcaaaccacaagagaaatgatagaaaatcagcccgaacatgccgcacatttgctggaactgattggtcatgatttgaataacatcagcggacgtactccattccaagccatgcgagacggtgatatgctaggtacaaaaatatgcaatgcgtatattgaaatgctgggctgcggattgattaatgctgttaacatctttcagccggacattgtatgtttgggtggaggcgtatgcaacgaaggagaagcgctgctggaacctttgcgtaaattaattgaaaaagaacgatatcctgtagagcaatcgcatccctttacgctttgcaaagcacaactgggaaacgatgctggtattattggcgctgcattgttggggttagagacgtacgataaataacaattataaaaataattcgttttcttttcttttcgcaaatagaggtttcattttttcagaaaccgcactcagcatttgttcattaagatgccttgctttgcttgggcaaacttgaatacacctcatacatgaaatacattgttcctccttcgtttgatttggcgcgtcaaatggaattgcatgtaccggacatagttttgcacataagccgcacattgtgcacaaatcagatgctgtaggatgaaatggcacttcttttaattctttataaggatgattacctttcacttgtacttctgttaaaatcgaagcatctattttttcttttacttcttttgcaaatctttttaattggttcatgtcatccatatcaggtctgccggaggcaaattgatgcataatggaatgttctgcaattgcagcaacaccaccaatacaggtaaatccctgtgattttacaacatcaaataattctatgagtgtatcatcgtaatctctatttccataggataccaccaaaatagcggatgcaccatttcccttgaaaccattgatacgctctacagccgtacgaggaacccgtcccccgtaagatggcactcctatcaaacaaatgtcattttctgaaaaaactctctccggaattgggtcagtatactcacacaaatcaatctcttgatagattcctattccttgagctaacgtatttgtaatattttttgttccctgtgttggactaaaataaatagaatagatactcattgtttcatgcactccttgcttactttattacatagcattaacatcggttctgcttgttgccaaaattcaattaccggctttaccgttgtgcttttaaaatcaatataataataatttttcgttccctctctccgtctggaaatgatacctgcatctaacatgatttttaaatggtgtgaaactgcagagcgagatatatgtcccattttttgaatatctcccacccgaattcctcctcttccgccggtttgaattaatattaaaaatatttcttgacgaacttcatcccccaatacagtcataatcgggcaagcctttttgtaattttccaaaaatcgtttccgcaattgttcaaactcttgattcaatgaaatacctccaacgactcatttctgtaaaccattataattattcaagaaataaatacaagttcggtcctgaaaatcgagttcattcggcagacaataacatatggtctgtttttctcaaaacaaccattttaatgatttgataaaacaaaaaagacaggttctcttttacagaaaacctgtctttttatttatgattattcagcttttttctttcttgcaaaaagaacagtgactgccatagcacctgctgccaatacagcaacagcaatccacattacggtattgctgctgtctcctgtttgaggagaatccatttgttgaccttgagaaggtgtttgctgagaagaagcgcccaaagctgaaattacagtgtcttccaatgtaatctcttgtgtaagtgcttcatctttgaaatatttgccgcaagctgcgcaataccaatactcaatattgcccgcttcggtttcggttgccggttttgcttctactttttcagcttgatgtcccgcttttactacggtatctcccgaagtaatttctgttgtcaatgctgcatcgctgaagtagctgccacagtcagggcaataccagtattcgatattaccgtcttctgtgcaggttgcagctttggcttgtacatgtactgcctgatgtgtatgtactaccaaatttccgttttcatcggtatccaactgaatattttcggagttgttttccacagtaggagcgtcattatccggattggaagcttcaggaacaattaaaattttgtcagctgtactgctgttatcagtaaatgttaaagttgcgccctctgcaaaaacaagagtggcatttccgtttttattatccaagttcataccgtaccaagaattgtctcctgttacaacagagaagtttccgcttacagtgacatcggagccgtttacaacaagcggagcgcctgattgtgcattctcatgattcaatgttacattgtttaactgcacattttgagaaccataaacatctaaagtgtgtttatttgctgtagttgcaactaagtttacgtcgtttaatgttacattgtctgcttcaattttcatcaattgaatttgacctgatgtgttcattttaaaaccatctgcagcagtgatggtatgaccgtttccgttgatggtaacgttgtcaattccgttgatgtaaacttcttcgcttacctcaatatcgctcatcaattcaattgttgtgccgggtttcagcttatccatgatttgttttacaaattctgttttgttgtctactttaatggtaaagccgtttaatacaacattgtcgccggaaataccaggagcccaagcataaccgtttacatcatcgtggtatcctgcatattcattgttggtaaagtcttgtaccacattgtttgcggttacggtacctgttgtaacagcacgagcgttaatccaagaatacaaagttacattttccaaaacagtgttgcctgcatctgctacattaatataaatggaaccactgttttgtgttccgtcatccttggccaaggcaagacattctacattgcgcaaagtcaaatttttgccattgccaatcaactcaagcaccttattgcagccctcatagtaggaattataattgccttttaagtttacattttcaatggtaacgtcagaaccaccgactgtaattagattttgaccgttccagttgcctgtatttgggtcataagtactggtaatggtaacatcacccatacctttaattgtgatgttgtttgcatgaattggaaaaataaatcctttttccacgccgtttatgttagcaacatgttccaaacaaccattgcccacatcataggttcctgcagcaagttcccatgtttgtccgtctttttggttgttaatggcatcaatcaattcctgtgaatttgtaatttttacgacgtccccttcttctgccgccaatgcaacagcaggaatcatacaaaataccattgcaattgccacaaacaatgacaataacttgtatttttttgttttgtgtttcaaaacaaaaccctcctcctttatatggcagatgtgcttttctcatattctgcctatcgtattcttgccttttgtcatacacaaggtaaagcaactttccattttcaaagcaaaagacaccttttaaaaatataactttataaacaaattgtgccgatactgtttggtgttacaatatcggcccaaatcgtataaaaattccctctccttccatttataatttgtttaagtgtacttttacaaatttggaaatataaagaatataccttccataaagtaccataaactattgaaaaataaggaaatttatactataattataaatcaaggagagtatcataccttttcacaaaagtacactttaagagattttcatctttgtaaaagtacacttttctgaagtgttttaaattcgaattcggtatacgataaacattctttaataaaaacctgtttcattcttttcaattttcaccgcttttgcataaaaggttccaaccggcatttcacaggcatttgctgcatgctgaagtgtcatttttttattgcgccaatcttgatgtacctgattaaaattatccggcagcggacgttccggtctgccaaattttactcctctgtttttggctgccgcaattccttccgcctgccgctttcggatattttctctttcactgtgcgctacgaaggacaaaatctgcaataccaaatctgctataaaagtcccgattaaatctttgccgttgcgcgtatccagcagcggcatatcaattacacatatatcaatctccttttcttttgttaaaatacgccattgctcttgaatctctttgtaatttcgtccaagtctgtcaatacttaaaatgtacagcaaatcccccggttttagttttttgactaactttttgtagttcggccgttcaaagtcttttcccgactgcttatctatatataagttttttgccggaatttgtttttcgtgcatagccaaaagctgtctgttttcattttggtctatactggatactctgatataaccataaatcgccccagtcatatcaatgtatcatcccccttttttgcttgatttttactttctgttgattcctatttgtaagcagcggcaacatgttctattatctatgaaatattctcacaaaagtattttttgtgtaaaaaattgacacgaaaaaataaaagaaaaaggacaagcagaattgactgcttgtcctttttaagaattattccatatatgacatgaaaggaatgtcacatataattggaagtatcatctatcaatttaaaatttatttattcaatcggataacttcttttacggcggaaacaatgtcctttgccgtcatatgatattcctcttttaggaaaggcatttttcccacttggccgaatctatccttaacgcccacagctctgagcggaacaggatattcttccatcaatacctcacagacagcggaagtcaaaccgccaatcacattgtgattttctgcaacaaccactgcgcctgttttctttgcggaagctaccacagcgtcgcggtcgattggttttatggtgtgaatgttgataatttcagcatcaatgccctcttgtttcaaaatttcgtttgctttcatggtttcctgtaccataatgccgctgcagaaaatggtaactgcagtaccttcctgaatacagtctgctccaaacaaatcaaatttgtaattggcgtcggtaaacacatcatcaatggttttacggaacatacggatatatacaggtccttcataagcaacaatttggggcagcgcctgtttgaactgggcaacgtccacaggctcgtaaatcaccaattcgggaatggagcgaagtacaccgatgtcttccatactcatgtgagtaccgccgttaaactctgcggaaatacccgggtcactgccgatgatttttacgttttgctttgcataggcaatggaaattgcaatttggtcgcaaattctgcgggaagcaaacggagtaaaggaagtaataaacggaataaaaccgtaactgctcatacccgcggcaacacttgccatattttgctctgcaataccaacatcaattgcacgttccggatatttttttctcagagggaacgtaccgtttggttttgcaaggtcggcgtcaatgacaacaatattttcgttttctgccatcatttcatctaaacattcacataaagcttgacgcatttccatactcttattcccccctgatttctgcaattgcagcttccatttgttcttttgtcataggaatactgtgatttccaaagcccatttcttcgatgaactttacaccttttccttttaccgtgttcaaaataatcatacttggcttgtctgcttgttttgcctctgtaatggcagcgtcaatggctgcaaggtcatgaccgtcttccagctctatggtatgccagccgaatgcacgccactttgcgccaaggtcggcaatatcgcaaatatcgctgacatcgccgtcaatttgcatgttgttataatcggtaaacgcaatcacattgctcaatttttgttgtgcaccaaacatggcagcttcccaaatttgtccttcctgactttcaccatcgccaataatagtgtagatggtagcgccgtccttacggattttggaagccagtgcaatacccattgcgcaggaaaagccttgtcccaaggaacctgtggtcatatcaataccgggtgtacggttcatatcgcagtggcttggcaaattggtgccggattggttcaatgtcagcagccagcttttgtcaaaatatcctttacgggcaagcattgcatatactgcagggccgctgtgtccttttgaaacaatcagacggtctctgccttccatttttggatttttagggtcaatgttcatgtgtttttcgtaaagcaccaccagcaaatccacaatggataaactgcccccaatatgccctacgcccaaagttccgatggttgtaacaacgtcagcacgaacatcggcgcaaatttgttttaaatcttccatttttacctcccgtaaacaatgacatatcttaaaacagatatgtcttttcttttccatcacttttcttgttgttcatgtggattcctacatgtttcttatttttattatactgtatccctattggaaaatcaaaccgaaggcatgactaaaatattgtatctgtaccgttattttatcatcatttctaccaaatcatactagaaatgtctgtaaaaacaaatcgtgtcacaaatgggataccgtataaacacttcatttatgcgtttgcaaattgactgtgatacagttttgcataaaaaccgttgcgtgaaagcagggtttggtgattgccctgttcaataattttgccttgttccatgaccaaaatggtggtggcattctgtatggtggacaaacggtgcgctacaataaagctggttctgccctccatgatgttttggaatgccgcctgcacttttaattctgttctggtatcaatgctgctggttgcttcatctaaaatcagcatcggcggattgaccaacatcacccttgcaatacaaagcagctgtttttgcccctgcgaaaggttgccgccgtcttctgctatgacggtatcgtaaccgtttggcatttgcataataaagctgtctgcaaatgctgcctttgccgccgcaatcacttcttcgtctgttgcattgggcttgccgtacgcgatattgtcccgtatggttccgtggtacaaccaggtatcttgcagcaccataccgaattgacttcttaaactgtcctttgtcatggcggttgtgggaataccgtcaatggaaatcgttcctgaatttgcatcataaaaccgcatgagcaaattgataaaggtggtttttccgcatcccgtaggacctacaatggcaactctgtcacccggatggacgtgcagattaaaatcttctatcagcttggtatcgggcgaataggaaaaggataaatgagaaatatccacttctcctttgcagtgactgaacgcaatggcgtccggcgcatctgccggttccgatgtttcgtccaatacttcaaacagacgctcggcagaagcgaatgcggtttgaatctgggtaatcacgcccgttacttcgttaaacggttttgtgtattggttggcatacgttaaaaacgaggtaataccgccgatggatatggaaacgggaacgcctgtgatagcacaaacggaacccacgactacaacggcggcatacacaagattgtttacaaaccgtgtggacggattggacaaagcggaataaaactgtgccttttgtccatagatgcgcagctgttcgttgatttcccgaaaatcacggaacgcgcggtcttcataatggaaagttttgaccagtttttgatttcccaccaattcttccacatgaccgctgagctgtccttgaattgcctgctgtttgacgaacattttatgggacagctttgcgataaaggctgcaacaaaaatggacaacggtgtaatcagtaccacaaccaaggtaatcagcggactgatggtcagcataaatataatggtgcccacaatggtaacaatacccgtaaaaaactgagtaaaaccttgaagcaaaccgtcggctacctggtccacatcgttcaccaaacggctgatgatgtctccatgggcatgaccgtccaaatatttcagcggcatggtattcaatttttgatacgtttgtacacgcatatcctgtgtcgtaagatacgtcaatttatgaatgcagtatgccataatccattgaaagaccgtagaaaccacaatggttgcggacaaaatacaaatggtctgtaaaatggcaatatggtcaacattgcggtaaccaatcatgtaatctacagcctgacccacgagaatcggcccgtacagcgtcagtgagatttgaatgactgcactgacaatagccgcaatgaaaaagcgattgtacggtttgcaatagctcattacccgctttaagatagaaaacttcatactctgcaccccctttgatatggtttcattccagttcatcctcacgcatttgagataagcaaatctctttatagatgggacatgtgtttaaaagctcccgatgggtgccgattcccatcacatgcccttggtccaatacaataattttatctgcattgcgaatgctgtttgccctttgtgatacgataatcaccgtcatattctgtgtttctcttgcaattgccatacgcaattttgcatctgtggcgtagtccaacgcactggcactatcgtccaaaatcaaaatcttcggctgtcccaccaatgcgcgggcaatggtcagacgctgtctttgtccgccggaaaaattggctccgccttgacttacttctgtttgcaaaccttttggcagcctgctgacaaattcctccgcctgtgcaatgcgcagcgcctgttccatttgttctttggtagcatgttcgtttccccattttaaattactttcaatggttcccgtaaacaaaacagcacgctgcggcactacgccgatttgctctcttaattgttcaaaggagtattgtttgatatcaataccgtccatgtaaatcgtaccctgcgttgggtcgtaaaagcgtggaatcaaagcggcaacagtggattttcctgaacctgtaccgccgatgattcccaccgtttcacccggataaatttctgcggacaagtcgtacaatgcgctttgatgcgcctgcatatcgtaggcaaatgatacatggtcaaacaaaattttcggcgttttgccgtctgtttttacttctattttttgtgtggtttgctccgtcaccgcaggttgggtatccaaaatctcgttaactctggaagcggatgccgccgcttttgtaaaagtaaccaccaaatttgccaccacgatgagtgcaagcaatgtttgcgtcatatagttcacaagggctatgacattgccctgactgacgcctccgttgtctacacggtatccgccaaaccataaaatggccacaacagccagattcataacggcatatgtcaacggattgagcaacgccgttaatttacccacaccaattgccgtttccgtttgctctgaagcagcttgttcaaatcgtttttgctcctcttcctgcttggaaaaagcacgaatgacacgaacgcctgacagtccttctctggataccaaagaaattcggtccagctttttttgcgcctttttataaaacggtacggaacgagacatgaccatgtacaaaatcagcgcaatgacaggcgttgccaccagcaaaatcagccccaatttccagtcgattaacatggcggcaatgacagcgccgattgccaaaaatggtgctcggatgaccaaacgaatgagcagcgccaccgcctgctgtaactgattcacatcattggtaatacgtgtgattaaagacggtgtaccaaagcggtcaatttccgcatgagaaaaggtattgattttttcatacatttgattgcgtaccgcagtgccaaagcccaacgaagcgatggaggcgaatttttgacaaatcaatgcactgcctaaaccaaccgcacctaaaccaattaatacgccgcccatatgccagacatacgttaaatcgccctgccgcacgcctttatctatgattaaggatgtaacaatgggaacaatcaattcaaatacagcttctatcagtttaaaaatgggtcccagaatcacataaatacgatatttttttaaatatggaagaaaacggaacatatcaccattcctttatacgcagtcttttctgtttagtataccatattttatcctttatcactagataatatcatattgatatcgtttgattttatatggtaaaaacaaacagaccttgttttgaaaacaaggtctgtatttctttatgagaattattcagctgcaagctgacctttgggcaacacacatgcagttgtgctgtacaatctggccactgtaaacagataggtggacaaaccgcccaccaccgcgcatacaataccttttaggataatggcgcctgtaaaactcattggcgtgaaaccgattcccgaaaccaatcccacaaaaaacgcaggaacaatgcatgtcaaagccaatgtcacaacggtcagcaagacccatttattttttggaagaaccctgcctatgctgtgatggaatccattgcaagacagtgcgggagcatttccttttttcacagctcttgcaatggtgggatatgcaatggcagccatgcacaacaccaaaataaaggtggtcagtgcaaaatcaaaatataacgaacttgagaaaaaagcaccttcgtgtttcatattcagcaagtagaaaattcccgcattgattgcgccattaatcataccgtttccaatgatgcattttgataggatatagcgtttcattgtaagtggtctgtgtgtttttttcatgataactcctcttttcttccgtttatttcaccataaaaatatggtgtttgggaattttccctttgtaccatacaagctcaccatagattttcatcaaaaaaacaatgtctaaaattgaattcactgtatggcaaacaacagtgctgctgtatttcttaattcgagtatatcacaggaatacaaattgtcaatcataaataaaaaatagacaaagtttgttattttttatacaatatgcatagcaccagtaatattcttctagtgtattccaaaatattgcaaatggtttctatttgcaatatttgacaaaaacaagtcaaagtttgtgataattatcacaattgtccgggtactattcttcccaaatttagacatatcacatttttgatttctcacataaaaacattggcatatccgcaaaaaatgtagtataatgtaaaaacgaaaaagaaggtgtatacatatgattttttccgtagaaacggaactggagtttttattaagaatcgtgttgtctattatttgcggtgccggcattggttttgaacgggaaacacggctgaaaaccgcgggtatccgcacacatattattgtatctttgggttctgctctcatgatgattatttcaaaatacggatttggagacgttctgcagtcaagtaacattggactggacccttctcgtattgcggcaggcattgtaacggcagtcggttttattggtgcaggcgttatctttgtccgcaaccaaactatctcaggcgtaaccactgcagcaggtatttgggcaacggttggaatcggcatggcaatcggaagcggaatgtacattattggtattgttacaacggttttattggtgattcttcaactgttgctgcaccgcaacagcagggtattaaaaccgtttgtttccattcatgtcacattgtccgtaaaatccaatcaagatccgatggaattgattcataccctcttcccggacaaacgggtaaaaattatggatattgaagcccataaaacagatgctgaatgtgaggaatccgatgtaaaattgacgattttagtaccaaattcttattcttcctccgatattatgaagatttatcaagctaccccctatgtcaagcatattgatttttaacggaacatcgaatataaaaacgcatccactgccgctttaaaccatggatgcgtttttttctgcacggaacatgttaacgctcataaaaacaaattttattatttgcagtcttattgattcatacaatttcccttctctgtctattagagtaaggaactaaatctacactgcgtgtattgtcagcgcattcgtgatgatatatcgttagaaaaacaaaaaacggataaagttttgtcatttataattcagaatcagatgaaatagttttgttgaaactgaagtcttttgatttgagctgaagggtacagttatataggtaaatcactccaatgataacagcgttaggaaagacaataaaaaaccgagtttaatttgaaatatatgttgtcaatctgtaacagatagagcgaaacaaaatcatctaagatagttgggaaagcgtttattatataaatagatgatagagataaagtaacccactttacatacaaaaaagccaatcgagtgtatgctcgattggctttttatttaatatataggatgaggttttatgagaaagtacgagaagtaatgaggggttataagggaaataaaaaggataaaaaacttattttatatcttctttttgagattttttgcgttttttcgtaactataattccaaatagagcagtaagagaacccaaggctccggcagtatataatccggtatttgtcaggtcacctgtctttggagtgttctgtaatgattggggattaccattgttgtcactcatagaattacctacaccatttgaaattggttcgttctcttgcgctacgatgatttgaactttaagaatttctttgcttccttcaggatatgtaatctccagagtacctgtatactcaccaggggtgttcgtatcaacagttccatctggtgttatatctttaatgatggttccatttggaagttcatccggatttgtaacattgtcagataaatccggtttttctcccggtttaataatttccggaatggtttcaggttgatatttttctgcatccgtacgagggtctatcacatttacctttacttccacttcatctttgcttccgtcaggataagtgacaataactgttcctgttgtttctccaggagtgctggtgtctacaggagttttccagtcatatgttgtgccttgcggcaagtcatttttgttctggatacctgcttctgcattcggctgacttcctttattgactggaatttcctgtcctatcgggttgtatacgtcagatgcatctccgtaagttactgttaccgttactgtatctgttgtgccgtctgcataggtgactgtcacagctacaggttgattttttccttgtgtggggatatttcccgcaactgcaatagactgtactttatcttgcggcgcatctgttgttactgctgctgtaatttcgtttgcagttgcagtttggccatatggcttattcacagtgccgccttgtgctgtatatttctcggtatctgtacgagcatctatcacatttacttttacttccacttcatctttggttccgtcaggataagtaactacaacggttcctgtggtttctcccggtgtgctggtgtctacaggagttttccagtcatatgttgtgccttgcggcaagtcatttttgttctggatacctgcttctgcatttggttgacttcctttattgacagatacctcttgacctaccggtgcatatttgtcttttgcttctccgtaggaaatggtaactgtggcttcttctttgcttccatctgcataggtgacttctactgttactgtttggtccgaaccgtccgcacttggctcaggaatggttcctttgattgccttctgctgtattttgtctgcagaaacaggaacttcctgaccacctttggtttccgtcacagtaactgcatctaggatatcttgttccttggctttggtgccgtaatcttggttgacggtgcccccgtttgcattgtatttatctttatcaggtacgctaaaagaaagcggatcacccataacggcatgcttcccatttggactataggaaaccaaaactacttttgttccgtcaggtattgtatttgcaccaacattaatagagaaattaccggtgacgaggtcggcaaacggaatggtcgctgtaccatacgtggtatctgtataggaattggaagcttcatcatatgcctgcagtttcaccgtcacgttgcctgcggcagcatccgtaatttgaagcagtttacttgtatcggaaggatctgcaatcaaaggcttagaaacagtacctgtaacagttacatcctttgacccatcataagccgtaacatctgtgagcggcttggacggaagataatccgaggcgtcatttggcaatgtgttatcatccaaaaattcctgaccgtcaggtacgccgtctccgtccgtatccacgtctgtactgtctgtttttatctgccattccacaaaatcaaacagaccgtctttatctgtatcattggtatccaaatatgcattggaataactgcctgttaattgttttggaggtgcaccgtggtccggtttatgaagaatctgttgattggattcattaagataatctgcttccatccaatgatcaaacaaaactctggcctgctgtttctgaacataatcgttcatagctttggcaaaatcagctacactcacaccgtcttttaattgataggatatggtgtaatttctgctttgacccaaggtaccccaaaatatatcgtttgtattgtctcttgcagtgctcagctgatcctttgtatcacggccaacaatactcagttcaggagtattgcttgtatcaacacgtccattatcatccatcgaaactgtgaatgtttttctgcctgaattgagtttacccgataaatcggaattgtatatggtaatattgtctctgtcaatatactgcaaaagctctgtaggaatttgttcttttacataaataacccaaccataatcggattgtatatagttctcattgggcttaaaagtatgtacagatttcagagacatggaattaatatcaaacattaccttttgggtcatttgacctgctgtaaaaccggcttccttttcgtttttgatattcggattgttctccagaatatatccgttactaatactttcactggcaatagtaccgtcattctgaatccaaacactgccaaaggataccgccttatcgtccaaccctaaatctgttaatgtttttccgtctttcagcgttattgtaatatcatggttggtaaccacgccaatcagtgcatacttcggaattttggcgatgggcaccatccaaagagctccttcatctttctgttccaacgctacaccatcaatggtgatactttctatttctttataaaaggtatcatgtgaaaaatataataaatactttcctgcaaattcattatttttattggttgcccagccagtagaaccatctgcccattttgtcatggtcagcataatttttcctgtagcatctactttgttatacacggtagaagcatatcttaaagaagaatccagaacaccggtagccgtaaaatgcgacgaagtatccagctctttcactcctgcattcgctgtacccacatcgctcacagcaaatatttctgcagcaccgacagcagggacagtaggaatcataacggcaaatccaagcaagaccgaacacattccaacactaagttttcgaagagcccaacgctgcctcctgtgttcaggcatgacatgcccgtgtgtgtttttgttcatttcatcaatctccttccacattacatagcatgactctattaacgggatacatacttcatgtaagcagtaaatcccgtatggtcgtttttttcaatttagtgtctatcagttcctgtaaatccacatagaaacatcgtatccggcataatgcagcagcttgacgattacaatggttgtcatcttcaagacatctgttaattttcatggttgtttcagttgcttccatgacgtcaaacagcataatatgttcaggtctttttaaaagctcaaaaccaccgtctactccggaacacgatttgaccagtcctgctttttgtaaagccctgagaactttaaatacataactttgtggaatattcaaattttttgaaagttctcttgatgaggccaaatattttctatcagacaaatagacaataattcgaatggcataatctgtggacatagtcaaatgcatagcatatatgtttcctcctcttatctggacaaacacaggtaacaattcaacctgaagtcatcctaaattttgaaccaaacatattgaaaacttaacctgtaatatcttagttcttccataggataactgaaaatagaaacaaagtctcgtaaatggagaaaatagaacgtatattacattgaataaaaaatttttacataaaattatattcattagacatatgtaaaatattaggtgaaaataagagaaaaattgtacaaattagatattttatgtaatatttattcttttttgagaaaagaaaacacagttttacatttcatataggaaagcatggtattctaataaaaattgtaatatgagctatttcaatatggaacatatggatactattggagttaaggtagtgaaaacaaaatgaaactgacagacaaagatttcaaaaaagtaaaagcattgcatgtaacgacaaaaattcccgtatatatatcagatttaaagttcaaccgtatcagaacctactgttctgatacgcaatatcatttttcatacgatttttcacatcatcaaataccggaaacctacgtatggttcgattacggcctgtttcatgaaatctttatatcgtttcggtataaagataatatcgttactatgggaccttttcttactggccgtattttaaaatcacagtttgaatcctttttgaaccgtcccggaatgatacgtaaatcccattcagagaaaaaagaatatctaaaatattatcaatctcttcccatctattccctgggagacatccgtgattttattgttttgctcagttctgtatttgacattgattttgaacagctgtattcggcaaacctgcataagcaagtataccaaaacgaactaaaactaaaggatggatatcttaatattgattacaattatctgccgcctgaaaaatattccttttattatgaaaatcaaattttaaaccttgttatcagcggagacatcaccgctttaaagcaagggatagcagatatagggtgcagcgttatccccagttctacgggggataacacccgtgcggaaaaaaactataccattgtcattctagaaaaactgtcctctttggcaattcatgcgggaaaagatattctggatgccattcggctgagagatttttacataaaaaaactggaaatacaaacgacacttatagaagtacttgcaattcgagattgtgccatcatacattttacaaaagaactgcacggtctttccgacaaaaaatattctccattaatcatatccgtaatccagtatatcaatttaaagatatatgattcttttaaaattcctgaactggccaaacatttttttatgtccgaaagcgcacttcgacgcagatttaagagtgaagtgggaattaatattacagaatatgtaaacaagagaaaaataacaattgcgaaagtatttttaggaacagaaatgcctatttctgaaatttcaaaaaaattaggttttttcgacgcatcgcattttcacagaatattcaaaagttttgaaggcatcacaccaaaacaatttcaaacacgttccaaagatatcattcatgataaaacagaacatcaaaaataatctaaaactatcatgttatcccacccaactcccaatcccctactcaagacaagatactgaacagaaacctctttctcgcggattattttccttaaccttttatgcttccttttttgaaaagagtgctaaaagatgtgaaatcacacagaaaatcggatactgttaccctttcaaaatataaaaaagacccaatacaaagcaaaaaagctgcattgagtctattttgacaataaaatatgtttgaaatgtcttattccgttttgaaacccaaaagtctacaaaatagatgcaaacaataacaaccgcagaaattttgctgcctgctgtcaatgaaaaacattttctgtcgtactgcgcatttcataaacattctatactttgttccgcaaattgtaactaaaaccttagaatatttaaaacctccatgaaaaactaacatgcgcatttctgcgttttgaaaaaacaaaaagactcataacacagcccaaaaactttgttatgagtccttttcataaactgcatttcttctgccccagacatcctacgattcttttttgtaactatttcaagttttctttgtaaccttaaaaagatagtagaaaaaatattgatggaaaagaagaagaaatgaatacgctttcacctaagtgatgtgatgtcaaatagaaaaccattgaaacggttcgtcttaaaaaaacggaaactatgacggctattaatcaagttcattgtactccaatactatgaaagatgagttttgggaaagataattcccacattttaaatagagtctgggtcaatatgcttcaaaaaaacatacgttgtttcatctgaccgttgcggagaaaaacgataaccaagccgttcaaaagcttgtaaatctttgatatcatttatctgtttttcagccatgtaccgtaccatttcaccgcgcagcattttgcatttcgtacctttttcaaccactttatcctcttgcagttcgccgaaaatacaggttagaaactttacatgcttcggtagatagttagaaatgcatcgactatattcttttgatgccaaattcacaatcgtatcggtttcggaaaacaaagattgcgcaatgatatccttccagaactcgtagagattatgacatccattaacagataactttgcctgcatctccagtcgatacggtgttaccccatcaaatggacgcagtataccataaaagccggacagaatgcgaagattttgctccagataagcaagttccttatccgtaagtacagagggtgccatataacgatactgaattccttcgtaagacataattgcaggtgttagattccgatgtaaatccatcttttgcaatcgttcgtaattgagtgttgcaatttggtcattacagcaccacaaacgctttaattctgtataagacatgcggcacaactgttgatagagttgctctgtttgatgcaataactgcggcaattcatggcactcaaagctgtctgcatcttgtttcattttctttgccggagaaataatgattttcataaacgattgactcctttcgcgattcctgtttacataggccagaatttttgctgaaagagaacgagtaaattaagaagtaacgcaacttccaaagcatgatatggaaagaaatcaagaatggagacaatttatctttgagcacttctcaaacatattttcagtcatgataacacatgatataagcaatgcacaacaggaacataaagtatcagtttatcttaggaaataaactccaaatttgtaccaacacaatcatcaaccattccttttgtcttcttcttttcttaagagttgtctgaagactgtttccattgcaaaagcatatctgtcctaatttctacaaataagaatctctcaaatcattcccttttctctcttttttccatgctccaccatacttttttattcttttccgaatattgaagcatcagtttggaacaacaaactttttaacaacatcatatttgttttcatcaaacaaaaataccgcgcagaatagctaaaacagctaaactacgcggttttttggtggagataagcgggatcgaaccgctgacctcttgaatgccattcacacatttatctgtttagcacttttttcaaatgatcaacattgctgtgggcatatctttcacgcagcattcttagattgctccatcctcctgccattccaagtgataataaatccacgccttcctgccaccatagcgttgctctggtatgtctcagttcatgcggtgttaatgcaggtatatccggatattgggcagtcaaattatccataaagggattaaaacatcttttgacccagttgttcggatccatcgccgtacctttttgattggatattacaaatcggtcattaatctgttgggaagtaagaccttttctctttccaaaaaataaaacactctgatactgtaattttaaacgattacatactatttgtgaaaaaggaatatcccgttccctatacttatttttcaaacctcctgtatgaaggtaatattttttgctgacaggatcctgcagaataaccgttccatctcgtatttttacacaacctttatcccaaaaaatatttttccatcgaattcccaaaagttcactgcggctgatggcagtatccatcaccaacaaaggccccaatccatatggatgggttaaagcgaactgatatgcacaattaaaatgttccttactccatacccgtttttcgataggaggtacatcactctttaatctgattcttttatttacaggattggtagaaataatattatcatctactgccacagataatatattgtacaaacaaaatttaagtttctttaaagtttctaaggcatacttttttccttgaagatttaaaaattcctgtatcatggaaggttttatatccgatattttaaaattcccaaaatacggaatcaagttataatatgtttgatgataatacgttcccatataagtattgtttttcacaaaaccaagcatatagtgctctaaccaaaaatccgcaaaatctttaaatgaactgttttttgttaatttcatctttcttcctcctctgaaataagtaagattttagatatatttatattaccacagtggtgcatccttttcatgaaatatctgccaaatgtatatttttatgtcttatatgtttaaaatattgccatttaccgctttatctgtaaaaaacaaggaataattcttcatttattcaccaaagagaaaacatatttgatgttttctcttttttattttaaccatgaaaaagaaaggaagaattcactatgattatttcagtagcaaaccaaaaaggcggagttggaaaaacaactaccgtattaaatataggcgcaggacttgccaaggtcggtaagaaagtattactgattgacgcagatccacaaaaccatttaagccgatggctggattttacacccgatgaaaagcccacgttaagtgatatgatttatcaaaacgtttccggcgtacaaataaatgccgtgcaggattttatacggacaaacaaaaaattaaatgtagattatattccagcaagccccattatgtcaggtgctgttacaatattaggattggacggagacagccaaaatgtattaagccgtatctttaaacaaccgtatttttcagagaattacgattatattatattcgactgccagccttctttggatttgctggtctccaattctttaaaagcgtgcgataagctgcttatccccgtacaggcagatccccttgcctatgaaggagtaagcgatatgctgcttaagcttcaacaaagtaaacagactcaagcaatccagccttatctgctgggtatgctgctaaccatgtatcaaaaaaatacacaagtcagcaatgcggtaaaagatgctttacataacagctacggaaatctggtattcggttctgaaattgactaccgtaccgaagcgaaaaaaagcagcgttacacacaactgcttggttacagatgaaaagtcaaggataggacagcaatacgcttatatcgtacaggaaattttaagacgctgcaagtaattgggacgtacgtcccaatcagaaaggagatgccattgtggcaatagaattaaaaacacagagaattcccacgccggaagaagcctttcaggggattattctcggctcatcccaaccgaatgatatggttcaaaaaattgatatttctttgctggatgaaattgagaatcaaccgtttaaaatcaatcccaaaaaggtggaaaattatgcagccagtattgaggaatgtggtttattggaacctattcaagtacgtgctaaagatagtagcagatatgaaatattggccggacggcacagggtaagagcatgtaaacttttgggttgtcatgaaatagattgtatcgttaaaaaaacttccgatacaagcgcaagattgattctattaaaaacgaatactgacagagaagatgatttttctcccagcgaacttggatttgcctatacagaagaagatcagcttttaaagtcattgcgggacgtacgtcccagaacagaagaacagcgtaaaaaaatatatcgatataagcgaatcactcatttagttgaatcactccgacaaatggtagatgaagaccgtatcaagctttctgtaggggctgagctgtcctttttgacccatacgggacaaatcgtacttgcagaatatctgcttgcaaaaaaacaaaaaatatccgaaaagcaagcgaaaaacttaagagatttggaaaatgaaacttgtcttagtgaaactgttttggatgaattttttcatccgaaagcgaaaaagaaacaggtcaaagaagtaaagctgcaaataaaagatatttctgattacatccctttgcatatattggaaaatggtggtgcgcaggactatatcttggaagcattgtctttctatcaaaattataacaaataacgaaattagaaaatatgaaaaagagagaaaagcaaggacaatatgaatacagaaataagaaataccaacagaagagcaacaaatatagctaagaacaaggagaaaatatcatgatactaaactttatatggactattgccattagcagtgtgttcccaatgttaattctattaggtatgatacttggtatagaatttgctaatcaattatattatgacaataatagccgtacatttgatttttgcctccggataattatgtatctaatagcttttgttcttatggttggtttttgggcattatttataaatgaattcatgacagtagaaatgaaagaggcatttcccaatttccctatgaatttttttattatattgtcttcgttaatagtatgtggtaccatatgctgtatattataccgtatacaggagaagtatcaaataaagatgaaaaaattacttgcaaaaatacggaatcattatataaaatatgcaatgattttttttgcaactaccggtgcagttgtaacagctgttgcatatataacgtcttttgtgactatcaatacttacaatctatcatctgaactaataatgcccaatattggaaaatctatttatagcattatatgtggtattttatttttaacgcttatcataggatgtcccttagctttactgataggtaaaactaaaaaacactttttaccaataaaatccaaaatagggcgttttattggtgaagggagcattatgctgattgtgttaatgtgtattttatgtaccgtatatgtaatggcatccaaaccgtttcatatattcagtgaaaactgtatgtttattttaacaacaatcttcctatctatctgtttagtctcagctatactattgtatattttgggatataaggattctatacagcataaagcatttcaaaaaaaattgaaaaatattttattatgttgctgc

SEQ ID NO: 193 - DNA, 6893 bp, Unknown
  16S sequences of unknown bacteria
tagagctccacggccactggaaggacgcctcgataatgctcgagggcaaggcggcatggagcatgaccctgatgttcctgacaatgtggcaggtgacgaccggcgaggaagaggacatggagcagtactacccgtggaaggacgccccctgcacggttccctccgacggcttcgtacagccctacgccgacacgccgatggacacggacaacgtcggcgagcacgtctatctacagctcatcaataacgcgaaaagatatgtctatataacgacgccgtatctgataatcgacgacagcatgatctccgctctgtccctcgcggcgaagagcggcgtcgacgtgcgcctgatcacaccgcacatctgggacaagcgcttcgtccacgagaccacccgctcctattacccggagctgatctccgccggcgtgcggatatacgagtacagcccgggcttcatccactcgaagaccttcgtctcggacgacagggtcgcgacggtcgggacggcgaacctcgatttccgcagtctctatatgcactacgagtgcggcgcgcgcttctacggctcggaggcggtcgcgaaggtcagggatgattttctcgatacacttgaaaagtgcgccgagatacgcgggaaggactgccgcgtgtcgcttccggagcggctgacgcaggatcttctgcgccttatcgctccgctgatgtaagccacgccggataatttgcccgccgcgcagaaagcccgcccgtcagcgggcttttttgccgtataaatcaactgaaatcaatgtctcctcttgacaaaatataacaagtggtgtataatatatgttgtacaacaaaagcaatccatgaaggagaaaatacaaatgccgccgaaaaacagattcacgaaagacgagatgatagacgccgcgctcgatattgtccgtgagaagggcatcgacgccctgacctcgcgggagctcggggcgcggatgggaagctcgacccgcccgatgttcacgtatttttcgaccgtgaacgagctgaaggaagccgtgcgcgtgcgcgccgcggaaagataccgcgacttcatgcgggaggggctgaacgataaaattcccttcctcggcgtcggcagaagacagataaagttcgccgcggaggagccgcggctctacagactgctcttcctgacgccggtcgggaacggtccggacggtgagcttccgggaataccggagctgaaacgtgaggtcgtcacgtcgataacagagatataccgcgtcgacgtgaagacggcggatcaatattatgaaaatatgtggcttgtcggaaacagcatcgcggtgcggaccgtgaccggttcgggacatttcaagccggaggacatagagcggatattcgggcagttcagcctcgcgctgttcaaggcgtaccgtgagctcccgggcttcattgacatgtcgctcgacaaggactcggaattcagtcggctgatcgggggaaacgacaatgaaaataactgagacggagatcggcggcgcgcctgccgtgctttacggcgacggttcggaaaaggcttatcttttcgttcacgggctgttcgggaacaagtatgaggcggagcgctttgcgcgcgtcgtgtcgggcgccgggtatgacgtgctcgccgtcgacctgccggagcacggcggaagagacgacgggaagaaactcgtcccgtgggaggtcgtgccgcagatacgcgcggcgctcggctggcttgatgaaagatacgccggggtgtcgctcagaacgacgagcgtcgggacatacttttccctgctcgcggctggagccggagatgtcgtcgtcgaaaaatgcctcgcggtgtcgccgcttgtcgacatggtgacaatgataaacggcgtgacggcggcaaacggcgtcgacgatgacagactcgagcgcgagcgcgtgattgaggtccccggcggacagccgctgtcgtgggaataccttacatacgcgaaggaacaccccgtgacagccgcttttcctgttcatattctgtacggagaaaaggacgaggtggttccgttcgagacggtcaagagattcgccgaggagaatagcgcggatatcacagtgattccgggggcgaagcattggatacatctggatgatgaggtcgcggagatggagaaatgggaacgtggaatggcgtagtcaagccgcgcgaagaaccgaatcgatatagtgacataatatttttcttttttttcgaaaaaccccttgacaaacgccgtgaaatgtggtagaatatatgtgttgcagacgtgagcgtcgatcggatagtatatccggttcggttcggagggatgtccgagcggtttaaggagccggtcttgaaaaccggtgactctcgtgagggagccgtgagttcgaatctcactccctccgccatttttcccgcctgcggcacaattgaatatccggttcggtttcgacatggagaagtactcaagttggccgaagaggcgcccctgctaagggtgtaggccggggattcccggcgcgagagttcaaatctctccttctccgccagaacccctcacgtatgtgaggggttttctctttgtctgccggacttttccatttttcataaagaattttcccgtttttttcacgaatgctattgctaatcctcagaaagagtggtacaatataagtatcaatcttataaggagcatcccatgaaactcaactacaaacgcacgctagccgtcggattcgcgtttttccttatctgcgcgttctggcaggcttatgacaacatcatccctaagatcctgaccgacaagttcggcatggctcacgtctggtccggcgcggtcatggcgcttgacaatgtcctcgccgtgtttcttctgccgctgttcggcgcgatatcggacaggcatatggggaagctcgggcgcaggacgccgttcattctcgtaggcacgatcgcggcggcgatagggctcgtcatcctctcggtcgctgacgatatgcagctctcaaagctcgacggctccgacccatgggaggtcacgaaggcaaatccgatgatactcgtgatcttcatgctgatccttctcttcgtgcttgtctcaatggcgatattccgctcgcccgcggtcgcgctgatgccggacgtcacaccgaagccgctccgctccaaggcgaacgcaatcatcaacctcaccggcacggcgggcggcatgatcgtcctcgcgctcggaatcgtcttcggcaccggaaagccggagaacgcgaggatgagctacaccggcttcttcgcggtaatcgccgggataatgctcgtttccctgctcgtcttcatgctcacggtcaaggagaagaaatgggcggcggaagcggagaaaatcaacgacgcgctcgacgctgagacaaaggaaaagttacccgaagccaaagcatccgcgaattctctcaccaccggtgagagaaaatcgctcatcctcatcctagcgtcggtcgtcctctggttcatgggctacaacgcggtgacgagcaaatactcggtctacgccggagacgtgctcgggctcgactacaacctgacgctgataatcgctcaggcggcggcgatagtctcctacatcccggtcggaatcgtgtcctcaaaaatcgggcggaagaagactatcctcgcgggcgtcgtgatgctctgcgcggcgttcacaggagcggcgttcattggcagggggacgagcatactcgtcatgaacatcttcttcgccctcgccgggataggctgggcgtcgataaacgtcaacagctacccgatggtcgtcgagctcgcgaagagcggcgatgtcggaaaatacaccggatattactatacggcgagcatgtcggcgcagataatcacgccgatactcagcggcgcgttcctgacatggggcggtatgcggacgctgttcccctacgccgcgatattcgtcgcgggagcgttcttcacgatgctcgcggtgaagcacggcgactcggtcggggagaccaagaaggacctcctcgagcaccttgacgtcggagacgattaacggaggaaatatggtctttctaatcattcttatcgttctgatactacttcttctctttctcgtaaagcccggacacagaccgctcccggacacggtaaatcgcgacttcgctcaccgcgggctccatacctgcgccggtcagaatgagatgccgccggtcgatcacatgaacggctacccgcctgaaaattccctctccgcgttcgcgaaagccgccgacgccagttatgggatcgagctcgacgtgcagctctcgagcgacggcgaggtctatgtattccacgattattccctcgcgcggatgaccgggcgggacgcgaagctctccgatctcacatcagctgagctcgaaactctccgtctcgcgggaactgacgagaagataccgaagctcaccgaggtgcttgaaacggtcggcgggcgcgttcctctgctcgtcgagctgaaaggcgagagcaccgacacatccgtctgcccgaagaccgacgcgatactgtcggcgtatcacggcgactgcatcgtcgagtccttcaacccgcttctgctctgttggtacagaaaaaatcgcccggaggttctccgcgggcagttatatacaaatgtcgtgaaatcaaacggcttttccccgctgaaccttcttctcacagggatgctcttcaacttcctcgtgaagccggacttcatcgcgtatgacgagaaaaagccgggcgctctcccggtgcggctcgcctgcgggctgttcggctgcgcgcgcttcacgtggactgtcagaagccctgaggactgggcaaaaaagggcggcgcttccgcgatattcgagggctttttcccggaaaaataaacatgaaaagcgtctccggacgctttttgtgtttcatgtctattgacttttccccgtcttcgcggtataatatatcagataaagattttgaaagaagataaatcaatgcaaaaggaaaaatcaaagattctgacgctgttcctcaccttcctgaagatcggcgcgttcaccttcggcggagggtacgccatgataccgctgattcagcgcgagatagtgctccgccggcggtggataaccgacgacgacatactcgagataaccgccatcgccgagtcgacgcccggaccgatagcggtgaattccgcgacttttgtcggataccgtgtcggcggtctccccggcgcggctttgtctacagtaggagttgtcctgccgtcatttgtcatcataacggcgatatcatatgtcctgcggcagtttgagtcactggcggcggtcaggtacgcgttcttcggcatacgcgccggggttctcgcgctgcttgtcacggcgctcgtctcgatggcgcggaagctcgggaaaaacatactgaatatcatcatcgcgctcgcggcgtttgtattcaccggcatattcggttttgacgtgatcccggtgcttatagcctgcgcggtcgtcgggctgacaggctctctcgccgccgcgaagagggcggaaaagaaggcggacgggagggacggcaaatgatataccttgagcttttcatcacgttcttcaagataggtctctttaccttcggcggagggtatgcgatgctgccgctcatcgagcaggaggttctgagccacggctggctgaccgccgaggagatcgtcaacttcatcgccgtcagcgagtcgactcccggaccgttcgcgattaacatttctacctacgtcggcgttgagacggcgggcatacccggagcgttcacagcgaccctcggggttgtccttccgtccttcgccgtgatactcatcgtcgcgcggatatacgattccttcaggaagaaccggatagtcagcgggtgtatgtcggggctgaagcctgcggtcgtcgggctcatcggcgcggcgttgatctcggtcggatcagcggtgttcttcccggatggtgtgtccgcgagcgtgtttacaagcccggcgttctacatttctctcggcattttcgcggtctcggcgctgatggctgtgaagaagcttcatccgataatcataatcgccttctcggcggttgtcggtataattatcggctttactgtcccggggctgatctgactccgcgtctgaaaggagcattatgtacagaattctgatagtcgaggacgacccggtcatcgccggagccgtcgcggacaaggcgtcccgctgggggcttgagacgcgcgctgtcgaggatttctcgcgcgtcatgagcgacttcgcggagttctccccgcacatcgtcctgctcgatatttccctcccgcgcttcgacggatatcactggtgccgcgagatacgcgccgtgtcgaagacgcctgtcatcttcatctcctcagcgtccgacaacatgaacataataatggcgatgaacctgggcgcggacgacttcatatcgaagccgttcgacaccgacgtgctgatagctaaaatacaggcgatgctccgccgcacctatgatttcggtatgtcgaccggcgtctttgagcaccgcggcgcgattctctcgaccggcgacggcacgctcacctacaacggcgtaaaaattccgctgaccaagaacgaataccgcgtcctgctctccctcttcgagaacaaaggaaagatcgtcagccgcgagaagataatggagacaatctggcagacagacagcttcatcgacgagaacacgctgaacgtcaacatcaaccgtctgcggaagaagctctccgccgccggtctcgacggtttcataacaacgagagtcggctcggggtacatgatatcatgaaaggacacagggtgcttaga

SEQ ID NO: 194 - DNA, 20788 bp, Unknown
  16S sequences of unknown bacteria
gttatttctattttataccgtctcggaggtttacacaatatctaaagaagtctctctgttaccgattacctacctgaattatggtcgattgggtttcgcttgtttacaaagcaagtgtattttcaccgaaagttgtgctgttaccttataagccgagtttttatgtgattatattacagacgaaaattttctgttgacaatggaaaaaagtggcttataattaaaataaacaatcaataatcggaggaaaagacaagtgaaatgttgtgaattctgcggagaaataatgggctgtaatgaaaagtattgccgcaactgcaaccgtatgacaaaaagtaataatactgcaccttcggacgaagctgcaaaagaaattgcaaaagaggttaaagaagaaattgcagaagaaccggtgaaaaccgaagaatccgttcccgaaaacaataatgcgaaaatttgctcgctatgcggagcaaaactgcctgacgaagcaaaagtctgttctactcctgaatattatcaaagtaaacggcaacagaactgaccgatacattatattaagaggtgataattatgaacgtttattacatataccgtatgacatacgataccggaaatgcaccgtgcgtgacggatatcaacggcaacaaaacagggattttgtctctggcatgctgtaaaggaggtcagatacgtcattacgcggacggcagaacggcctatgtgaatacgggacttcgtaagacggtaggagaaaactttatttccgaaaaaaagaaaaaagccggggaaaaacagtttgtcatcggtattaaaggaaacagagtaatatatttggcggaaataaccgaggtactcgagatgaagggctatttcgacaactgcaaatatcaaaacagaagggactgcatatacgaaccggcagaaaatcggaatccgggaaatgaaggattcgaaagcagcctgaaaaggcgcaaagatttcaacaaatattttcacggtgactcaacggaatgcggatgtgacaggcaggcaaaagaacagcatatccgtgacgagctcgggaagtatgttctgctttcggataacttcagttatttcggcggagataaagagagaattatcagcagcgcgataatgaggtatatgccgaaaaggcaggaaacgaaaacataccgatcgggaatcgacggatacgaagaaatatcggattgttttgataagtttatcaaacaaaagtttgtgtctgatacgtccacggacaatcttgacaggaataactgcgcgtcaaagggatgccaaaaataaaattcgttccttcatacgcccgtaggcgtatttcatatttgcgaagcaaatctcacacggctgaaagccgatacctcacttcttcactattcactcttactttttacttccgaaaaatcctcacggaagggaaacggcaagtgaagagtgaagaggtaataagtaaaaaatcctcattcttacgaatgaggattttttggtggacccggagggattcgaacccttgacctctcggatgcgaaccgaacgctctcccaactgagctacgggcccttatgttattgcgggactctccgtctgccgcaaaatgccgatctgcttcggcggtgcaggacgatctacgggaaatccgcttaccgatttcattatatcaccccatgcgggaaaaatcaagattttttgcggatttttgtcccggacttcggtgagtgctcggcttggcgcgagagcgccgccggagacggctcccgatcaaatgcaaactctccctttcgggggatagctttaacgtatcgctgaagagtatccgaagtttggctgcggcactgcccgccgggaacggctcccgatcaaatgcaaactctccctctcgggggatagctttaatgtaccgctgaggaatatccgaagtttgggagcgggcactgcccgccggaaagcgaaatataatttgttcctcatgcgccgcagcgtatttcatatttgcgaagcaaatctcacccggctgaaagccgccagatcacctcttcactattcactattacttcttacttcccaaaaatcctcattaaagggaaacgacaagtgaaaagtgaagaggtaataagtaaaaaatcctcattcttacgaatgaggattttttggcgcagggagtgggattcgaacccacgtgacgttgccgtcaaacggttttcaagaccgcctcgttatgaccgcttcgatatccctgcgtattcggctttgccgtgcgcggcttttcgcgcaatcggcttcggaaagcggcggcgcggtacgcccgatccggcactttcgtaactcaaagtatatcacagattccgtgcgttgtcaaggattttttccccgcccgcgcactgccgccgctgcggcagttttcgcttcccgattgagcggatgggagatttccgtgaagcctgcgcggggcgggtgagacatacgcgagagggaagccggcgccgcacgggcgtttgcctgcgcacggcagagcggtcggtttctgcgctcccgtgccggctcacgcgctcgccgtgccgcacgtttttcatatttgagccccggcgccccgccttgaatggcgcttcatttttccaataaaaattttttttgggggggattttttgttttcgtgcaacctgcggcgaaaaaatccgtctatataggtgaagggagatatatcccgcctgcgttaaatttaccgttcggcgcgcgggcggcggatcggacatttgccgggcggcaaaagatacattatttattcggcgtgtgccggatacacgaaaggagaactcaaatgaaaaagatcacagcaattctcacggcggcgattctgcttgcggcaatgcttgccgcgtgcgcagacccgtcaaaggcgggagcgaagagcgccggagcggttacggatacgcagaccgagaccgcggcggagaccggactcgggagcgacaccgagcccctcgagattccgacgcagaccgaagcagcgccggacagcactacggcgaagcagccggaaactcccccggaggagccggaggacacgaccccggtaccggtacgcggcgtaacactcaacaccgaccttctgagtgagtacaagatgacatatgccgagctgacggcgaagcacggtaagctggtcgatttttctacatatgaaggcggggctttttacaaattcgaaaacggctacggttactattggttttactatcccggatggcatttgggcgaaagcaggatcgatcctgagggaggattcgagtactttgttatggatgatgaaacaaaaagactgtgccggggtcttgtgtgcagcgatccccgcaatatgtttatcggagactatgagacgttgggtatagaggagatttcgaagcttgagggcgttcactatcaggaaacattggagacgtttggtgcattgggtctgccggcataccattcggtttttacttacgacggatgggacaatgaaaatgtgaagattcatttatatcatgacaagaggaatatgatcgatctcacatcgagatgcaaattctccattcatatgaattacattgaagaggaagaaggaatttcacgttaatcacctgcgtggaagcggtagtatagtagtataaaaaacagagtgcgaaaggagaactcaaatgaaaaagatcacagcaattctcacggcggcgattctgcttgcggcaatgcttgccgcgtgcgcagacccgtcaaaggcgggagcgaaaagcgccggagcggtcacggatacacagaccgagaccggactcgggagcgacaccgtgcctctcgagattccgacgcagagcgaggcagcgccggacagcaccacagcggcgcagccggaaactcccccggaggagccggaggacacgaccccggtgccggagcgcggcgtaacgctcaacaccgaccttctgagtgaatacaagatgacatatgccgagctgacagcgaagcacggtaagatgaccgggtttgctgcctttgaaggcgggtctcattacaaatttgaaaacggttatgggtattattggatttactatcccgaatggccttcaagcgagagtaagattgattcggagggaggatttgagtactacattatagatgatgagacaaaaagactatgccggggtatttcccgtatttcacccgaaaaaatgtttatcggagactacgagacgttgagcatagaagagatctcgaagcttgatgggattcactatctggaaacggggaaagacggcatagttactccgagggcatactgttcaatttttacttacgatgggtggaacaatgataatgtgaagatttatatataccatgaaaaaaagaatatgatcgatcttacatcggaatgcgaaatttctattttactgtatcaagttgaagaagaagaaggtcgtccacattaactacctgcacggaagcggctgcttcttctcatcaccacggagctctttatactttcgacgacgaaacaatgatgatatacggggtatacgacggcaacagggtggaatacctgatatccgacatcgaaacattttccggagacggtgcgcgggtgttttcggatgatcgggagatattcgaaggcagaatagaggagggcatgacggtacaggtgtatcattcgggagagctgttcggaacatataccgtggcgcggatgcttgagagaacgcagagctccgagccgtcgaatatttcggacattacttctccggatactccggatgccggaatactcggtgtaagccccgcttcaaactcttacggattcattttgccgatacaggcgcaccgcgaatgccttgagttttcctcacagcgttcggtatgtcgtatatcttagtgacaaagtaaagcatgaaatgtccgaaccggaatttcatgttacgcaaaattgtcggaattgatcggatttaggaggtttttcgatgaaaaaaataattatcttatttctgtcgacagtgttgatattgacttctttttcgtcatgtgcttcgttatttgattacttcggtgtccttgaaaatgccgggaccgaatacagcaaggaaagtgaagtgccgacatcttcaaatgattatacgttcaaaatggatattgaatcatatctgcagtattttgtgagttattttcatgagccgtatcagcgcggtgacgatgtttcggaaaacaatattttgtacctgagtcttctcttttgcttctgcaataaagataaattggatttcgtcaaaacagatgaggaaaagctttttatgagaattccgggaaaagagcttgaacgtatcgccggaaatctgctcccgaatcccggtgatctttcgccgtaccgttcatcaatggaaggcggagctgatttctattccgcggaaaccgacacgtacattgtcagctatgctcggggttactggaacggggatttgtattatcttgacttcgatgaaaatgaaaaagtaaaaaagccgcaaatcagcgaaaccgatacggaattaattgcaacggtagaaacatactacgggcccgacttgggcgcacatgaaaatatcagaaaaatggagtacagattcgacaaggtgattgacgacgagttcttattctaccgcctgtcgggtataaaggaaatatcatgaaaaagatcctttgcacttttctgttgcttttgtttatactaacttcctgcaacagtttgtacatgagcaacggctctgcggaaatcgacaattcagccgaaacttctgataacttgacgacagcaccgggtgaaacatctcctgtaagcggcgaaacaactacgcaaatcaaaattgaattttatccgaatccgcggacagtttcggcatattcaacactcaatgaagatcagaaaatggcgtatgacgctatcggagacgcactttgcaggacgttggacggctcattttcggtcggtgaaacatataatcttgagcgaaggatatcgtggtatgattttatgcttgcttacaaaataattgcgggaaattatactgccttggaagaaatactgacgaatttcttttcgcgggacagtttaggaacgcaggaatatacagacgggattttctttttcgacgacagttttgtaaacggttttgtcaatgagggatatcccgagctgtgcaaagctgcggacggtattttaaacgacctcacatatgacggaaccgagagcggaaaggcatttgcgattgcaaaatggtttgttgacaatgtgatatctccgtctgactataaagaccggagttcggacagttggcttgtaagcgccgccggaccgattttgaagaaagaggctgtttgtgacggttattcaaaagcatatgactttttatgcaagaaagccgggcttgaaacgatttatgtcacctcatttgagcagatgcatgcctggaacatgatctgcatcgacaatgcatggtatcacattgataccacatggatgagcagtaaggattaccgtgagttttttatgatgtgtgacaaagagtgttacatggagcacggtgaagccgaatactattatatccccggaacattggaaaatataatcccggaagcaacgcattgctcttcatacgggtgtttgagcttcgatactgccgacggcgcgtttgactatctttcaaaaaacaaaccgcctgacagaaccaagttttacttttcgtctgccgatgaaaaaaacaaattcatgacatatgacaagaggtatatccgtttttctgacagctatctttcggtcagtcctttttgtgaaaatattctttccgtgtcctataaatgatgactgtaaaccccgcccgccgttttgaaacggcgggctcttcgttttggtgaaaaaatcccgtcgggcatgataaaaattcacaaaaaccgttgacaaattcacagttttcgtgttaaaattatgtgaatttaacagaacggagggacgcacttgactaaactgcgccgggaagcgataagagagcttctcaaaatcaaaccgtttctgtcttacgaagagcttggtgcgcttttccccgatgtctccgaaatgacgctgcgccgcgatatcgaatacttcgagaattcgggcgaggcgataaaggtacgcggcggggcgcgctccgcgaggttcatcacctcatcgaccgacgaggcgatgagcgcgcgcatgaattcgaacgtgctcccgaaggagcgcatcgcgcagtgcgcggcacagcttctcgagaccgaccgatcgatattcctcgattcgggttcgaccgtgcagagtatggcgtccttcgttcccgcgggacgcttcaccttcaccacgacgaatccggcgcttgcgctcgagctgtgccgcagcggtcagagcaccgtgaacatcgtcggcggacgtctcgaccgcgattatcagtcggtttcggggcttcaggcgatgaggtatcttgccgatgtgaacatcgatgccgcgttcctgtcgccgtcggggctgtcggcgcgatccggcttcaccggagggaattacgcggaatgcgagctgaagcgttatgtggcggagaaggcgagccgggtcatcatgctgatggattcatcgaagatagagcgcagtctgccgtacaccttctgcacgcttgcgggggtgagcgtactcatcaccgaccgtccgctttcggcggagctcggcgagcaggcgcagtctcacggcgtgcgcgtgatatgcacggatgtgcggtaagcggtaaaacggtttataaataatccgaaaggaagagaataaatggcaacagcagtaataatgccccgtcagggacaaagcgttgaaaactgtatcattacctcctggaacaagaagaagggggatcgggtcgaggcgggagagattcttttctcctacgagaccgacaagtcggcatttgacgagccgtctccggtatcgggaacggtgctcgagataatgtacggcgagggagacgtcgtggactgccttgagaatgtatgcgtgatcggcgaggagggagaggatatttcctccgtcgtcggaggcgcatcatcgacggcagccgcagaggcgaagcccgagaccgccgaggcggtcggagaaaaggctgaggcgaaggcggtcgtcggaacggaagccgcacggagcggaaaccgcgtattcatttcgccgagggcgaagaatcttgcgctttccaccggagccgacatgtcgaaggtcacggcgagcggacctcacggacgcataatcgagcgcgacatcgaccgcgttctcgacgcgggcgagcgtgcgggaacggcggctgtagaggcattcctgcgcggcgaggagctgctccgcacggaggcagccgaggcatcaccgaaggcgacggaggcaccggctgtgtcggcggctgcggcggaatacacggataagccgctgtcgggagtgcgccgcgcgatctcaagaacgatgcacgcatcgctgtcggagatggctcagctcacgctgaacgcatcgttcgacgcgaccgagatgatgagctggcgcgcgtcgctgaaggcgaacggcgaggctctcgggctcggaaagataacgataaacgatattgtactgttcgcggtatcccgtgtgctcatgcagcatccggaggtaaactcggcgatgatcggtgattcgatccgcacatacgctcatgcgaatatcggtcacgcggtcgataccgagcgcggacttctcgtgccgacgctgttcggtgcggataagatgacgcttgccgagctttcggcagcggcaaaggcagcggcggcgaaggcgcgcgagggtgcgctcacgccggatgagatgtcgggcggctcgttcaccgtgacgaatctcggttctctcggaatcgaaagcttcacgcccgttatcaatcctccgcaggttgcgatcctcggcgtatgcgcggcggtgaaccgtctccgcgacgacggaagcgtatatcccgcgatggggctgtcgctcacgttcgatcaccgcgcgctcgacggcgcgccggcggcgcgtttcctgcacgatctgtgcacggcgcttgaaaacttcggacttcttcttgcgaaatagcgggcagtgcccgcagccagtctgtgaagcacagcggaatttcacggtctgtcttccgggagaaggaattccaaaatccccttcagtttgaaaggttttggaggtttaaggaaccttttctcaaaaggttccttagtccgttcccatgcccgttccatgcccgttccccgtaccacaaataaagaaaggatgccttatccaaggcacggtacaacatatgaaatacgatcttgccgtaatcggcggaggtcccggcggatacaatgccgccgagcgcgccgcccacggcggaatgaaagtgatcctcttcgaggagcgcgctctcggaggcgtttgcctgaacgagggctgcattcccacgaaaactcttctcaattccgcgaagctttacctcggcgcgctccattcggaggcgttcggtgtaaccgtatccggcgcgtcgatcgaccatgcaaaggtcgttgaccgcaaggacaaagtcgtgcgcacgctcgtttcgggtgtcgccgcgaagatgaagggcgcgggtgttacggtcgtttccgcgcgcgcgtcgatcgccggaaagagcgccgacggatattccgtcaccgcgctcggcgagacctacaccgcggaaaagcttctcatctgcacgggaagcgaagcggtgatcccgccggtggcggggctgcgcgaggcttacgaaaacggactttgcgtgaccaaccgcgaggttctcgagctgcgcgaggttccgaaaaagcttgtcgtaatcggcggcggcgttatcggacttgagaccgcatcgtattttgcggcagtcggcagcgatgtcaccgttgtcgagatgctcccgaagatcgcgggaccgacggatgcggacatttcgcgcatccttcagaggaatctcgagaaggcgggaatcaaattccttctctcggcgaaggtcacatcggtatccggaaagaaaaacggcggaagcgtcacggtggacgtcggcggaaagagcgagactctggcggcggatacggtgcttgtgagcacgggacgccgcgcgcgcaccgaggggctcggacttgagaacgtcggaattcacacggagcgcggagctgtcgttaccgacgaatcgtgccgcacgaacgtgcccggaatctgggcggcgggcgacgtgaacggcaggctgatgcttgcgcacaccgcgtaccgcgagggcgaggtcgccgtgaacgtcatgataggaaagcccgaccgtgtcgattaccgttcgatcccgtccgtgatctacacgaagcccgaggtcgcgtccgtcggtgagagcgtcgagagcgccgcgaagcaggggatcaaggcaagcgagcacacagttacgctgaagtacagcggacgctatatcgccgagacagagggcggcgacggcatagtgaagatcgttatcgacgatgctcaccgcacgatcctcggagtacacatgatcggctcgtatgcgtcggagatcatctacggcgccgcgggatatgtcgcggagagaaagcgcgtcgaggacgtgagaaagatcgtgttcccgcatccgacggtgtgcgaggtcatccgcgaaggcatgttcatgatctgaacgcaaagccccgcgcagccgggggtgcacataaagaataaataattataaggagataaagcaatgccgaaaagtcagtatgtagatcccgggaaggtctttgagcgcggattcgccgaattcactccgatcccgctttgtcagtacaacaagaccctcaaggaagagaaagcaatttacaccaaggaggatttcctccgcatttaccgcgatatgcgcatcatccgcgaattcgagacgatgctcaatgagatcaaggtaaagagcgtctacaacggcgtcgagtaccacaaccccggtcccgctcacctttcgatcggtcaggaggcgtccgcggtcggtcaggcgtactgcctcgatatcaacgatttcacgttcggctcccaccgcagccacggcgaaattctcgcaaagggtctttcctcgatcgagaagctcgacgacggagagctttacgacataatgaaggaattccttgacggcgtgacgcttcgcgcggtcgagggaagtgaggataagaagggcgacgtgaaggatcttgcgatcaacttccttctctacggcgcacttgcggagatcttcgcacgcaccacgggcttcaaccgcggtctcggcggatcgatgcacgcattctttatcccgttcggaatcctgccgaacaacgcgatcgtcggcggcgcggctcccgttgcgctcggtgcggctctctacaagagaagctgccacaagaagggcatagttattgcaaactccggggacggcgcgctcggacgcggccccgtcatggaatcgatgaacttcgcatcgatggagcagatcagaaagctttggggcatggacggcaagtacgacgattccggcatgccgatcctcttcaacgtattcaacaacttctacggaatgggcggtcagactcagggcgaaacgatgggcttcggtatccccgcacgcctcggtgccggcttcaacaccgagcagatgcacgcggagcgcgtgaacggctacgatccgcttgccgtgatcgacgcgaccgagagaaagaagaagatcctcgttgacggcgacggccccgcgctcctcgaggtcatgacgtaccgcgtgagcggacattccccgtccgattcctccacctaccgcacgcaggaggagatcgatgcatggaaggaagcgtgcccgatcgccgcttacagagcgaagatggtaaagggcaagatcgcctccgaggcggagttcgacgctatcgatgaagagatcgtaaagcgcatgacccgcatctgccgcatggcgaccgacgattcgatctcgccccgcatggatctctccaaggagcccgacatcatctcatcgatcatgttctcgaatcagcatgtaaggagcatggacgagagccgcgagcccgaggttctcatgccgaaggaggagaatccccgcctgaagcagcttgcagcgaagagccgcttcgcattcgacgagaacggcaaggagatcccgaagatcaaggttctcggactccgcgacgcgctctttgagtcgatactcgataaattctatgaggatcccacgctcatcgcctacggcgaggacaaccgcgattggggcggcgcgttcgccgtttaccgcggacttaccgaggctctgccgtatcaccgcttcttcaacgcgcccatttccgaatccgcgatcgtcggctcgtccgtaggatatgccgtcgcgggcggacgtgcgatcgtcgagcttatgtacgccgacttcatcggctgcgcgggagacgagatattcaatcagctttccaagtggcaggcgatgtccgcaggcatacttaagatgcccgttatcgtccgcgtatccgtcggctccaagtacggcgcacagcattcgcaggactggaccgcgctctgcgcgcacatccccggactgaaggtgttcttcccggctactccctacgatgcgaagggtctcatgaacgcggcgctcaacggcaccgaccccgttatcttcttcgagagccagagaatctacgatatcggagagaaattccacgagggcggcgttcccacggaatactacgaggtaacgcccggcgagcccgacatcaagcgtgaaggctcggatgtcacgatccttacgatcggcgcggtgctctaccgtgcgcttgacgcggcaaagacgctttccgagaaatacggcatcgaggctgaggtcatcgacgcgcgctcgatcgttccgttcaactacgaaaaggttctcgagagcgtaaagaagaccggaaggatcatcatcgtcggagacgcggtggaccgcaactccgtaatgcgcgatatggcatcgaacatcgccgaaatggcgttcgattacctcgacgcgccgccggtcgtattcggttcgcgcaactggatcactcccgcatatgagtttgaaaaatacttcttcccgcaggcagacggcataatcgacgttatatccgagaagcttctcccgatcgagggacgtgtctgcgagatcaacgagaccgagcttgagcacatcgagcgctcaaaggcgggactctgataggataattccgaagatgaaccgtcttcggtaaacgctgcgcgggctgcctccgaaggggcagcccgcgttgagtaaagaaaggaggggcggcggtgaaagacgaaacgaaacgctccgccggcgcggacggtgcggacggcgcggacgaaaaagaaaaatccgacggcagggacggcggaatcggcagggacggcggaacggacggcggtgagcttttgtcagcccgtgcaagggtgatcgcggcgaccgagggcgaaacggcgaccgaggagaccgaagccccgcgccggcgccttcgcgattttctgtacagacaccgcgcgctgttcatcatatgcacggctgccgtgctgcttgtgctgctttcgctgaagatattcttctcgggcggcgcgctcgccgatgtcagcatgatatacgcgggtcccgtcccgctttactccgacacgggcggcgcgatagtctccgcgatccgttcggttcacaacggagaggacgcggaggagatatacctcgcggatgtgctgtggtattcgccggaggacgaggaggctctcggagatgcgtattcggtggatgcggcggagaacgcgcgcgcgctgatggaatttcgcgaggagatgacctcgggagaatgcgtgctcatgcttctcagcccgcagctctaccgcgaggtcggagaagggcttcttccgctgtcggaggtgttcggcgcggacgcggcgcggatctcggcggacggctattcggtaaggctcggcgacacggatttttattcgtacttcacggcggcgaaggtgctgcccgaggatactctcatatgcatgagggatgtgtcgaagatgaagatctacggcgagggcaagggcgcggaggcggacgaaaaatgccgcagcgtgttccgggacatcgtgaatttcgtcgatccgacgccgaccgacgccacgtcggcagacgacacggcggactgagcgcggacgcgaaaatgcgggatgcggcgtccggcggacgcggggcaccgatgctcggacggactctgccggggatatcgccggatcgttgggcgcgcgtgatttgggaaaaactacggcgggtgtgatttctaaaaaacgtgccggtcgtgcgtatcggaaagcggcggtcgcttacgctgcgatgcgccgatgacagccgtcggtattgaaaaatgaagagggggaacgctccgaagggcgttccccctgtttgtattatgcggaagtttgagcggctgccgcccgtgctcccggtgcgacttgatactctttctgccgcggcgccggtcgcgcggcgcacaattcggcgctgacgatatatacctatatgcggcggcgcgcctctgccgagtctcgctgcccggggtgggggtatatttgcgttttgaaaaataaattacgttgtttttccaacggaatttaaggttgaacggcagctaagcgcagcgcggggctgattttgggattttcgcatccgaattacgttgttaaaacaacggaattcgatttgcagatttcgaaaataccccatttccgcgcggaagcaccgcggacgggggcggaaagccccagattcacggtcgcgccggatgcgggttccgtttcggtggttattttccgttatgttcggtcggatacgccgtgcaggcggggcaccgttcgcagttatccgtgtggacgcggaatttgtccgagtgaaggttctgcgccgccggtattcatactttttcggcatttcgccgcgcccgcatccgaattccgttgttaaaacaacgtaattcgatttgcggatttcgaaaataccccattcccgcgcggatgcaccgtgcgggcgggtgcggaaagtcccaaattcacggtcgcgccggatgcggattccgttttaggcagttattttccgatttgtttggtcgggcggctgccgccgcgcgatctgtggaagagtttgcggcaatccggagaatctgcggaatttggagagcccgcagaattgggaggaatcgcggagtcgagaaaacacggcatccgcagcacctgcgccgtgtccccgaaacgcccggtattcccgctgtgtcactgtgtcgctgcggtgcgccttattttcgctgcgttccgctgctctcacgccttttgaagcctaattttcgcctcgttcctgcctcgcagactttgctccgaccgccttccgcggcatctttgccttattcctatatttcgacggtgccttcgaataccgttctgactccgccggtcagcagcacatgatctctgtcgaagctcaccgtgaggtcgccgccgcgcaccttcaccgtgatatccgcggattttttcacatatccgagccgcgcggcgactgccgccgctgcgcaggctcccgtgccgcaggcgagagtttcgccgtttccgcgttcccagacgcgcattttcagcgtggtttcattgacgacgcggacgaactcgacattcgtcctttcggggaagaacggcgcgttttcaacgagcgggccgagtctgccgacatcggcgctatccgctccgtccgtgaagatcaccgcgtgcggatttcccaccgatacgcagcttatccttacgctctcgccgccgatctccgtctcgcgctcgagaatttcctctccgtcgagtgtcaccggaagagatttcggtgaaaaatcggcgcatcccatatcgaccgttaccgaggatgcctttcctgacgagatataaagcttcagcgatttcactccggaatccgtttcgacggttagattttcgctttccgcgccgcagcggtcgtacaggaattttccgacgcagcgcaccgcgttgcccgccatccgtccgagcgtgccgtcgcggttgtatatcttcattgaagcgtctgctttgtcggagcgtccgatcagcacgatcccgtctgcgccgattccgcggtggcggtcgcacagtccgacgcagagcgactgcgccccgaccgcgctgacggagccgtcgcggtcgtcgaagtagaggtagtcgttcgctgccgcctccattttgacaaacggaagcttcagacgcttcgttctcatgcggtttatgttgacaagctcggtattctcctcggtgaagcgcgacagaagaatatcgcacagggcgttcgccgtgtcgagcgacgttatcgagcagaccgacagacgaagcgcgtggcggtggagcagcgcgaaatcgccgatcgtcgaatcgacgagcgcgcccgtgtaaacgacatagcttatctttccgctttccatgagggatacggcgtccgatgccttttcgatttcggataccggaatcccgagggaggcgatctcggcggcggtgtcgggcgtcgcccaaatgttcaccccggcgtcgccgagcttcttcgcaagggtgacgacctcgggcaggttgtggttatcgacggacacgagcattccgaccggggagctttccgtgggaattctcatatcgtatcccgcggcgcgaagccccttgaacatcgtctcggcatacgtttttccgacgccgagaacctcgcccgttgacttcatctcgggtccgaggatcgaatttgcatcggtcagcttgccgaacgagaacacgggcaccttgaccgcaaaatacggcggcgcggggtggagtccggtgccgcatccgatgtcggcgagcttttcgccgagcatgacgcgcgatgcgatatcgaccatcggcacgccggtgaccttgctgatgtacggcaccgtacgcgacgcgcgcgggtttacctcgatgacgtaaagatcgccgcggtagatgaggtactgtatgttgacgagcccgcgcgtgccgagcgcaagcgcaagctttgtcgaggaatcgacgacggttttctgcatccggtcggtcaggttgaacggcggatacacggcgatcgaatcgccgctgtgcacgcccgcgcgctcgacgtgctccatgattccggggatcagcacgttctccccgtcggaaatcacgtcgacctcaagctcgcatccgggcatgtatttatcgatcagcacgggattttcgacgctgccggaaagtataagctccatataacggcgcacgtcgccgctgtcatgcgcgatcaccatattctgaccgccgataacgtatgaagggcggagcagcacgggatatccgagccgctcggcggcaccgagcgcttcgtccatggtgaggacgccctcgcccttcgggcggcgtatcgagaaccgttcgagaagcgcgtcgaatttcgctctgtcctcggctgtgtcgattgactccgccgaggtgccgaatatcctgatcccggcgcggtcgaggaacgatgtgaggcggatcgcggtctgaccgccgaaggcgacgacgaccccgacgggatgctccgcctcgatgacgttcatcacgttctcctcgcagaggggctcgaaatagaggcggtcggcggtgtcgtagtctgtcgatacggtttcgggattgttgttgaccgttacgacctcgtatccgaggctgcgcagcgtgcggacgcagcggacgcaggagtagtcgaattcaatgccctggccgatccgtatcggacctgagccgagcaccatgatgaccttttttccgctcttcggcgtgccgcggctttcgcagacggtgtcgcaggaggaatagaagtacggcgtctgcgcttcgaattcggcggcgcaggtatcgaccgttttataggatactgtgagcttttccggcaggggatgggcgctcaggcgctcaagcgcgccgtccgtgtagcccatgcgccgcgcggctctgtattcctcggcattcagcgcgcgtccggcggcgcagcgctcaaaatccgcaagcttttttattttatcgatgaagaatcggtcgatccttgttttttcgtgtatgattccgaccgtctctccttcaagcagagccgcgaacacgcggaacaggcggcggtcgtcgcagatcgaaagatcgtcgggggaagaatagacattttctttcgtatagcggagggtatccgtgccgcattccgcgccgcggacggctttcatcagcgcttcctcgaagctctgaccgatcgccatgacctcgccggtcgctttcatctgcgtgccgagcgtgcgctctgccgtgcggaatttatcgaacggccatttcgggaatttgacgacgacgtaatcgagtgcgggctcgaagcaggcgcaggtcttgcccgtgacgtcgttctttatctcgtcgagcgtgtagccgagcgcgatcttcgtcgatacctttgcgatctggtatccggtcgccttggaggcgagcgcggaggaacgcgacacgcgcggattcacctcgatcaccgcgtattcgaaggaatccgggttgagcgcgaattggcagttgcagccgccgacgatgccgagctccgatatgatatcgagcgacgcggagcgaagcatctgaaattccttatccgaaagagtgaggcacggcgagacaacgacggaatcgcccgtgtgtactccgacgggatcgacgttctccatcgagcagaccgcgaccgcgttcccggcgctgtcgcgcagtgtctcgaattcgatctccttccagccgaagatgtatttttcgacgaggatctgcgtgataggggacatgtccagcccgagctgcgcgcgttcgcgcatttcgccggcgctgcgggcgacgccgcctccggctccgccgagcgtgaacgcggggcggattatcacggggtatccgatcttctccgctgcggcgagcgcgccgtcaacgtcggttgcgatttcggaggggacggtcggctgaccgagctttctcatcgtgtcgcggaacatttcgcggtcctcggcgcggtcgatcgcagcggcatcggtaccgaggaggcgcactcccgcgcggtcgaggaatccgcttgaggaaagcctcatcgcaagcgtaagcccggtctgcccgccgagccccgcaagaagcgaatcgggcttttccttttcgattatccgttcgagcgttttttccgtgagcggctcgaggtatatttcgtccgcgctttcgcggtcggtcataatcgtcgcgggatttgagttcacgaggaccgtctcgatcccctcgtcgcggagaacgcggcacgcctgcgcgcccgcgtagtcgaactcggcggcttgtcctatcacgatcggaccggagccgatcacgagaaccttctttatatttttatcgagaggcacactcagccctccttcataagatcggtgaatctgtcgaaaagaaacgacatatcgtggggccccgcgcacgcctccgggtgaaactgcacggtgaatgcgcgcagctcggggtagtcgatcccctcgcagcttccgtcgtttgcgtttacgaagcggagcttcgccgacgggggaagggaagacgatacgacggcgtagccgtggttctggcttgtgacgcgggtgcgcccgtcggcaaggtcgcgcaccggctgatttgcgccgcggtgcccgaatttcagcttctcggtcgttccgcccgcggcgatcgcggtgagctgatgcccgaggcagatcccgaacaggggtattttcccgagcagctttgcgatctgcgcgatctcaaacgtgttgtcggcggggtcgccgggaccgttcgacagcattacgccgtcaaagcccccggcgaggatatcctcggcgcgggtcgtatgggggaatacggtgacggacgcaccgcgcgcggtgagcgaacggaggatgttccgctttgcgccgaagtcgagcagcgcgacgcggtatttttcgcattcggcggggaagagggcgatctcgcggcagcccacctcgtcaacggtatccgagacgcggtaggaggagagagcctgatgcgttaccgccgagggatcggacacgatcgcggcgtttaccgtgccctcggagcggatgatccgcgtgagctcgcgcgtatcgacgccgcagatcccggggatgtcgttttcgcgcaggaaggtgtcgagatcctcctgagaacggaaattcgacggtgtatcgcacagctcgcgcacgacgtagccgcggcaggcgcatttgccctcgaagtcctcggggatgacaccgtaatttccgatgagggggaaggtctgcattattatctgaccggcgtagctcggatcggtcagcgtttcgagatatccgacggagcctgtcgtgaatacaagctcgccgacggagtcgcgctccgcgccgatgcgctcgccttcgaatacggctccgccgcacagcacaagataagctttcatgatattacctttcacaggggatgacgagaaacacgcgggacctttttgaaaaaaggtcccgcacccccaaaaacttttgaactgaggggcatttcggagctctttctcccgaattaaactcggaagacagcttgcagattccgctgcgctttacaggcacaggttttacgtcg

SEQ ID NO: 195 - DNA, 8785 bp, Unknown
  16S sequences of unknown bacteria
catatcttggttgaaacttctcttcttattggttcatatcattttaacacatacaaattaacttaaaatttacaattttccgctgttgtaattttaacttaaatgttatataataatatgatagtaatttgcggaggacagaaaaatcaatggagttacaaaacaccgcaacagagttgtttttaggaatagacataggctctaccacggcaaaaatagttttgagaaacggggacaagatactgcttgaacgctacgagcgccatttttcgcaggtgcgcgaaaaaacggcggagcttttgcgccttgtaaaagaaattgcaggcgataaagcggtaaaggcggcaatatcgggctcggcaggcttagggcttgcagaggcggctcacataccctttgtgcaggaggttttcgccacggcgcaggtggtaaagctgcgcgagcccgatacctcgtgcgttatagagctgggcggcgaggacgcgaagataatctttttcaagggcggaatagacgagcgtatgaacggcagctgcgcgggcggcacgggtgcgtttattgatcaaatggcaacgctgctcaacataacggttgacgagcttgataaactaagtcttaacgcgggcaggctttaccccatcgcctcgcgctgcggcgtttttgcaaagacggatattcagcccctcttaaatcagggcgcgcgcaaggaggacgttgcggcaagcatttatcaagcggtggtaaaccagactattgcgggcttggctcagggcagaaaaattgacggcaaggtgttatttttaggcggcccgctttattattgcaagggcttggggcaaaggtttaaggaaacccttgaattggacgatgagcacgcggtattccctgaatacgcgcggtttgcggtggcgctcggcgcttcttactatgcagagcagcagcccgaagtatttactgccgataagcttttaagccttgttgaaaacgcggcaagcgtgtcatcgggcaaggggcggttaaagccgcttttcagaaatgaagatgaatacaacgagtttaaacagcgccatgccgaatcatcggttaaaaacgcggatattgaaaaatacatcggcaaagcatacctcggtatagactgcggctctaccaccacaaagctgtgcctgcttaacgaaaataacgaaatactctattcatactacgcttcaaaccaaggcaaccccgttgaaattgtgcgcgagcagctgaccgaaatttacgaaaaatgcggcgaccgcgtaactattgcgggctcggcagtaacgggctacggcgaggagcttataaagcatgccttttcagttgatttggggcttgttgaaaccatagcgcactacaccgccgcaaagtattttgagccggatgtcggctttatactcgatatcggcgggcaggatattaagtgctttaaaatacgcaacggcgcgattgacagcataatgttaaatgaggcgtgttcctcgggctgcggctcgtttcttgaaacctttgcaaaggctatgggctacacaatagccgattttgcagcaaagggattagagggaaaagcaccggttgacctcggcagccgctgcacggtgtttatgaattcatcggttaagcaatcgcaaaaggacggcgcaacggttgaagatatatcggcagggctttcgataagtgttgttaaaaacgcgctttacaaggttattcgcgcctcctctgcttcggaactcggtgaaaaaatagttgttcagggcggcacgttttataatgacgcggttttgcgcgcctttgaaagagaaataggacataacgttatccgcccctcaatagcggggcttatgggcgcatacggcgcggcgctttattctaaaaaatgtgaaaaatcgggtattatttcgcccgaggctttaaaaagctttacccacacggcaaagtcggcagtatgtcagggctgcacaaatcattgcaggctgaccgtgaactccttcggcgacggcaagaaatttatttccggcaaccagtgtgaaaagggactggggaaagcgactgccggcgagcagctgccgaacctttatgaatttaagcggaattaccttacaagtcttaaatcggaagaaggcacgcgaggtacggtgggtatgccgctggctcttggtatgtacgagcttttaccgctttggcacgcggtgtttacaaagctcggctttaatgtgaaagtatcgcccatgtcaacccgccgcatttacgaaaaggggcagttttctattccctcggatacggcgtgctaccccgcaaaaataatgcacgggcatattgaaacgctgatatccgacggtgtcgacgcgatattctacccctgccttacctataatatggacgaaaaaatgaccgataatcactacaactgccccgttgtagcctattattccgagcttttaaacggcaatgttgaggagctgaaaagggttaaatttttatacccctaccttaatataaacagtaaaaaggagcttgcaaaggagctttataattacctcggaaaattttatgagggaattacaaaatccgaagttagggcggcagtcgaatacggtcttgaaagatacgccgaatatatgaacgccgtaagagaagagggtgcgcgggcgcttaaattcgcgcgggaaaacaacaggcgcattatgattttggcgggcagaccctaccatatagacgcggaaataggtcacggaattgataagcttgccaataccctcgggtttgttgtggtgagcgaggacagcgtattcggtttggcagagccttttaccgtaaaggtgctaaaccagtggacctaccacgcacggctttaccgcgcggcgcgctacgccgcagagcatgaggataccgagcttgtgcagctagtgtccttcgggtgcggggtggacgccattaccaccgatgaggtgcgtgaaattttagaaagccgcggcaaattttacacccaaattaaaattgacgagataaccaacctcggcgcggtaaaaataaggctgcgctcgcttataggcgcgcttaacgaaaggagtgacggcagtggaagagcgtaagtacataccatttacagaggaaatgcgcaaggattacacaatacttgtgcccaatatgctgccgcgccactttaaaatatttttaaagatatttgaagactacggctacaaaatggagctgcttgaaacctcgggacaccgaattatagaaacagggcttaaatatgtgcataacgacacctgttaccccgcaattttggttatcggtcagtttatagacgcgctcaattccggcaaatacgacccgcacaaaaccgcgctcatacttttccaaacgggcggcggctgccgtgcttcaaactatattttccttttaagaaaagcgcttgagcgcgcgggctacggctatatacccgttatatcattaaatcttgccgggcttgaaagccaccccggctttaagcttaccctgcctatgctgcataggcttttctacggtataatttacggcgatatgcttttaagccttgtaaaccagtgcaagccgtatgagaaaaacaaggggcagactgaaagcttagcgaacgagctgacggcgctgcttgcaaacaaaatgcagacagagggtatatcctttaaaaaggttaagcaaaactgcaaaatgatactctcgcgctttgcggaaataccgcgcgaaaacgaggaaaaggtaaaagtcggcgtagttggggaaatatatgtaaaatattcccctctcggcaacaataaccttgagcagtttttaattgacgagggcgcagaggtcgtagtgccggggcttttggatttctttatgtactgcatagtttcaaatatttcggacattgagctttacggattacataagatcagaaagcctatgcttaatttcgtattcggttatctgcaaaagcagcagaatgaaataatcgagctgatgaaaacggacggcaatttcaccccgccgactcccattgcgcatacaatgaatctgataaaggattttatgggcttcggcacaaaaatgggcgagggctggctgctgcctgccgaaatgctggaattaaacgacgagggcgtgcacaatatagtgtgcacccagcccttcggctgcctgccgaaccacatatgcggcaagggcatgatgaagccgcttaaggagaaaaaccccgatatgaatattgtggctattgactacgattcgggcgcttcaaaggtaaaccaagaaaaccgaataaagcttatgcttgcaaacgcgcgggcggatctggccgagaaaaaccgcgaaaataatattaagacggaggaaaaagcatatgccgaggcttaatattgttatggtggagcccgaaataccgcaaaatacgggcaacgtggcgcgcacctgcgccgctacgggggcaaggctgcaccttgtaggacctatggggtttacaatagatgataaaaagcttaagcgcgcggggcttgattactggaaatatcttgacatcacctattatgacagtcttgcggatttttttgaaaagaatgacggcacttatttttatttcaccacgaagggcagacaaactcattcggatgtaaattaccccgacaactgctaccttttattcggcaaggagacaaagggtctgcccgaggagctgcttataaaaaatcccgaaaggtgcgtgcgaatacccatgcagggcgaaatacgcagccttaacctttcaaactcggttgcaatcgcggtttacgaggcgctgcggcagtggaattacccggagctcagtaatttcggtcagctgcacaattataaatgggaagatctcggctaaattttacggtgcgggataaaataaatattgaaaaatcagaaaaatgtggtaaaataaaattataatgttttacacatatttgaaaggatgtttttgaatgaacgctcttaacaaaaaaaccgttgacgacattaacgtaaagggtcaaaaggttcttgttcgctgcgattttaatgtaccgcttaaaaacggcgttattaccgacgaaaaccgcataatcgcggcgctccccacaatcaaaaagcttattgccgacggcggcagggttattctctgctcacacctcggtaagccgaagggcgagcccaagcctgagctttctctcgctcccgttgcaaagcgcttatcggagctgctcggcaaagaggttgttttcgccgctgatgataatgtcgtaggtgaaaatgccaaggctgcggttgccgctatgaatgacggcgatgtagttctgcttcagaacacacgctaccgcgcggaagagaccaagaacggcgaagagttctcaaaggagctcggttccttggctgatatttttgttaacgacgcattcggcaccgctcacagagcgcactgctcaaccgtcggcgttgtttcctatgtgaaggaggctgttgccggttatcttatcggcaaggagcttaaatacctcggagacgcggttgaaaacccggttcgtccgtttgttaccattctcggcggcgcaaaggttgccgataagctttcggttattgaaaacctgctcaataaggctgatacccttattatcggcggtggtatggcttacaccttcttagctgctaagggctacggcgttggtaagtcgctgctcgataccgagaagatcgactactgccgcgatatgctcaaaaaggctgacgagaagggcgttaagattcttctgccggttgactgcaatatagccgatcatttcccggatcctatagacgcaccgatcgaggttaaaacggttgacgccgacaagattcccgctgattacgagggtcttgatataggaccgaagacttcggagcttttcgcaaacgaagtgaagaatgcaaagaccgttgtttggaacggacctatgggcgtatttgagaacccgaccttggcagcaggcactattgcagttgcaaagagccttgccgataccgacgccgtaaccattataggcggcggcgactctgcagcagccgttaacacactcggctacggtgataagatgacccatatttccacaggcggcggcgcttctcttgaattccttgagggtaaggagcttcccggcattgccgcacttaatgataaataattaactttctttcaaggcttgcccggtgcaagccttgaagtgtgtaatataaaaggagattttaaaatggataaagcaaaaagagccgcggttatcgccggcaactggaaaatgaacaaaacaccggcggagaccaccgcgcttataaacgagatgaaaccgcttgtagccggcgctgactgcaaggtagtgctttgcgtacctttcgttgatattgccgcagctgttgccgcagccgagggctcaaacattgaaataggcgccgaaaatgttcactttaaggaaagcggagcttacacgggcgaggtttcggctaaaatgctgacggactgcggcgttaaatacgttgtagtaggtcatagcgagagaaggcagtatttcggcgagaccgatcagactgtaaatcttcgtacacttgcagccgtaaacgcaggtcttaccgcaatcgtttgcgtgggcgagacccttgagcagagagagctcggctacaccgaaacgctgcttaaattccaaaccaagatggcgcttaccaatatttcaaaggagcagcttaagaatataattatcgcatacgagcctgtttgggctataggcaccggcgttacagctaccgcagagcaggcagacgagggtaacggctatgtccgcgccgctattgctgaggcttacggcgaagaggctgcaaactctgttaccattcagtacggcggctctatgaacgccaaaaactgcgacgagctggttgccaagacgaatgttgacggcggactcatcggcggcgcttccttaaaggcagaggatttttcggtaatcgttaaagcggcaagcaaataattttttaggagcaaagcaaatgaaaaaacccgttgttttaaccataatggacggattcggcataaaccccgagacaaagggcaacgccattaaagccgccaaaacccctcggcttgataaaattttcgccgagtggcccaccacgcagataggtgcttccggtatggatgtaggtctgccggacggtcagatgggcaacagcgaagtaggtcacaccaatatcggtgcgggcagaatcgtttatcaggagctgacccgcattacaaaatcgattaaggacggcgacttttttgaaaacagggcgtttttagacgcgattgagaactgcaaaaagaacgacagcgcactgcacctaatggggcttttatccgacggcggcgttcacagccatattgagcacctttacgggcttttggagcttgcaaagaaaaacggtcttaaccgtgtttatgttcatgccctgcttgacggccgcgatgtgccgcccgcaagcgctgcggattacattgacaccttaaacgctaaattaaaggaaataggcgtaggcaagcttgccacggtcatgggcagattttacggaatggatcgcgataaccgctgggaacgcgtaggcaaagcatatgccgcgctggtttacggagagggcattcaggctgacgacgcggccgcggctgttcgtaaatcctacaccgaaattgacgaagagggcaagcacattacagatgaatttgtgctcccgaccgtaatttcgggtacagaaagaataaaaagcggcgacagcgttatattcttcaatttccgccccgacagggcaagagaaattacccgcacctttgtggatgatgattttgcgggctttgagcgcaagggcggcagacaaaaggtattttatgtttgtatgacccagtatgacgcttccatgccgaacgttgaggttgcgtttaagcctgaggagcttaataacaccttaggcgagtttttggcaaacaacggtatgacccagctgcgcattgccgaaaccgaaaagtatgcgcatgtaaccttcttcttcaacggcggcagagaggttaagtttgagggtgaggacaggatactggttgcctcccccaaggttgcaacctacgatttacagcccgaaatgagcgcaaacgaggtttgcgataaggtttgcgccgctattgaatcgggtaaatacgacgttgtaatactcaactttgcaaactgcgatatggtaggtcacaccggtgtgttcgaggcggctgaaaaggcggttgaaacggttgatacctgcgttggcagagtagaggacagcacccttaaaatgggcggcgtaatgctgcttacagccgaccacggcaatgccgaccgtatgctggcagaggacggcactccatttaccgcacacacaacaaatcccgttccgtttgcggtaatcggtaagcagtgcgagctgcgtgagggcggcagactctgcgatatttcaccgacgatcattaagcttttgggtcttacccagcctaaagaaatgaccggagaatccatagtcaaataatcttccggaatatgcgttatcctcgtcagatttttaaggaatccggcggggatttttttacattcggcagtgaagatactctaaaataatgtctactgaataattgcattagcaaatgcaattatataaaatcgagttaaaatctcgattttatgggtcaaaacctttgttttgaccgtcagtttccattgattgtcgc

SEQ ID NO: 196 - DNA, 32759 bp, Unknown
  16S sequences of unknown bacteria
atacgggtaacggccagtatgttgtggactatgagtataacggaggaatcaaccaacaatggcagttgataccggcgtaatttgtttgagtgaatagcaggttgatttctaaatattcaaatgaatatgattctaaggaataaacacagtttgcttatattatagtaaaaggatttcgatgcaaatgtatcgaaatcttttttattttttcatattttatcatgacaattaatatgaaaacgtttgaatgtatacggccggtttattagaggtttaatctgagtatattattaatgggaaatcgtattggttataaagtgcaaagtcagataatttttaagttatagcaaccctataacagtggaaaaacaaatatagaaaggaatatatttccatatttaaaattttggtggttaagaaaacgttttaacatttatacggtagaaattgcgaagcaatttcttttatgttataacaaccccataacagtgacaaaattaaaaattttgactgccatgagaacgttttagcttttatcggtaaaaaattgcaaagcaatttttttaatgctataataattcagataaactgttattagaatttatgtattaacaaggagagaattatatggctgcgaatattcaagcaccaaaaggaaccaaagatattttgccaaaaaacagtggtacgtggcagctggtagaagatgtcatgcgtgatgaggcgtctattcatggctttgaggaaattcgcactcctgtatttgaacgtacggaactttttgagcgttctgttggagatacaacggacgttgttcagaaagagatgtatactttcttggacaagggcaatcgttccatcagtctccgcccggaaggaactgcaggagtggtacgtgctttgctggaacatgcgttgattaacgaaggtgttcctcaaaaattttattatttaatttcttgttatcgctacgaaaatacacaagaaggcagacaacgtgaatttcaccaatttggttgtgaagcattcggcgctgcagctcctgtggcagatgctgaattaatcgctttggcgcatggtatttttgaacgtttgggtattcggaatctttccttggagattaattccattggctgtccggattgccgtgcaaaatatcatgcagctttaaaagcgtttttggaggcttcaaagtcagagttatgtaatacttgcttagaacgtctggataaaaatccaatgcgtatcttagattgtaaaacaccatcatgcggagaaattaccaaaaatgctcctgttatgaaggattatctgtgtcaggaatgtgcggagcactttgcagcagtacaagaatatttggatgcagcagaaattgaatatacggtaaatccacgtattgtccgtggcttggattactacacacgcactgtttttgaatttatttccaacgatttaggtgcgcagagcacagtgtgcggcggcggtcgttatgatggtttggtaaagcaaatggggggggcgcaaacaccggcattaggctttgctatgggtatggaacgtttgttgctgattatgcaggcgcaaggaattcaacttcctgagtctcctgtttgtgaattatatattgctcctttggggaaacaagcgcaaataaaggcttttgcttttacaaatatgctgcatcaagcttctataaaggcagaatgtgatatgtgcgaccgaagtttaaaagcacagatgaaatatgcggataaaattggtgctctgtttacgttggttttaggtgatgatgaactgaagcataatcaagctgagttaaaaaatatgaaaacgggagaaaagacgcctatttctttgggagatacctttttaaccgagtttgttgccgccgcaacgcaggcagaggatatgatatccttcaatatggatgaattgtccattgatttagaaagttttaaacaatttgagaaagaatagtggaaaatcggaggctaatttatggcagagtttatgacaggtttcacgcgtacccattattgtggagaattgcgtttgtcagatgtgggaaaagaagtaaccgtgtgcggttgggtacagcgtcaacgtgatttgggacaactgatttttatagatttgagagacagaaccggtatcttacagcttgcatttgatgacagcactgaccgtactatttttgagaaagcgtttacagctcgtgcagaatttgtattggcagcaaaaggaattgtaaaagagcgttctgcaaagaatatggaactgcctacaggtgaagtagaaattgctgttacggaattacgtgttttggcaaaaagtgaaacaccgccgtttgaaattgtagaaaattccaatgtaaaagaagaacttcgtctaaaacatcgttacttggatttgcgccgtcctgatgttcaggaaaaaattattggtcgtcataaaattgtgaaagtagcacgtgactactttgatgaaaacggttttatcgagatagagacaccgaatctaataaaatctacaccggaaggtgcaagagattatttggttccctctcgtgttttcccgggaaatttttttgcactgccgcagtctccccagttatataaacaattgctgatgctttcaggatttgaccgttatatgcaggttgcccgttgttttcgtgacgaagatttacgtgcagatcgtcagccggaatttacacagattgacttggaaatgtcatttgtagatgaagataccgttatggcaatcggtgagggatttatcaaagaggtatatcaaaaggtactgaacattgatattcctactccatttcgtcgaatgacatggcatgaagcaatggaacgatttggttctgataaacctgaccttcgttttggcttggaactggtagatttaagcaaggctttggaaggaacagagtttagagtatttggtggagcgctttccgcaggcggcagcgtgcgaggaattaatttaaagggacatgccgaccaattaagtcgaaaagaaattgataaattgaccgaatggattaaagcatacggtgccatgggtcttgcttggacaagactaacggagcaaggagaaacttccagctacgagaaattcttagctccggatgaggtaactgctgtccgtgatgcattgggagcggaaacgggagatgtgctgttattggtagcaagtccaaaatccaaagttgtgtttgattccttgggagcattgcgctgtgagcttgcagcacgttttgatttgattgatacttcagcaccaaatcttctttgggtaacagattttcctctatttgagtttgatgaagaagaaaatcgttatgttgcaatgcaccatccatttacggcgccaaaagaagatggattagaaatgttggaaactgacccaagtaaagtatgtgcaagagcatacgatatggttctaaacggcaatgaagtaggcggcggttctattcgtatcagcaatccggagttgcagcagcgtatgttcaaagcattgggctttacggaacaagatgcacaggaacgtttcggatttttgattgatgctttccgttatggcgcacctcctcacggtggtatggcatttggtcttgaccgtttggtaatgctgatgcttggcggagaaagcattcgcgatgtaattgcattcccaaaagtcgcaaattccagtgaattgatgaccagttctccttccactgtagatgaaaagcaattggttgagttaggaattgcagtttgtaaacaagagcagagtggggaaaccatagattaaataaaaaataccttccatatttatatggagggtatttttcatttttctgtattgtgatagataaagttatgatacaataaagaaaacaggagggatttcatgattacaatagagactttaaaacaggaagatatgccgcagctaattgaactttacaaagaactggtaccacctcatatagagtttaatgcttctctggagcgttgtttaaaaacatacgaaacaatggagaaagatgaccgcagttttttggcagtagcaaaagaaaagggagaaatcgtaggctctgcattaggaatttgttgccagtgtttggtaaatccgtttttggtggtagaagatgtcattgtacgaagtgatcagcggggaaaaggcgttggaagaatgctgatggaagctctcgatcaatttgcgcaggaaaagggctgcgcttattcgtttttggtatcttcagactttagaaccggcgcacatagtttttatgagagtatgggttatacagatggtgtagtagggtttcgcaagatatataataaataaagataaaagcttttcaataaaaatttttaagtttcatggtgtcttaacatactgtatttattatattttttcaagattgtaaccatagaagttatataaatctattactttccaaactgcaatatatagagaaaaacataccattcaagcgataaaagatacttatgaatcattgtttcagaaaaaattttacagacaacattctgtttgttaggaatagtttgttttccagcggtttggtgatagtgtaggaaggagaagccaaagtatgtggattctattcgcatttggttctgctttatttgcagggattacttcagttttggcaaagtgtggaattcaaaaaacggattcaactgtagcaacagcaattcgtacgatggttgtccttatattttcttggattatggtatttatcataggctcacaatcgcaaattacaatgattgactataaaatatggatttttttagttttatcaggattagcaaccggcgcgtcgtggctatgttattttaaagcattgcagcttggtaatattaataaagttgttcctattgataaatccagcatcattcttactatgttattggcattcatttttttgcaggaaaaaatcaatttgtggggtatgattggtattgttttaataacggtcggtacttttatgatgatagaaaaaaaggacataaaagaagaacagaatgttaaaggaaatcgttggttgctatatgcaatcggatccgctgtatttgcaagctttacttccattcttggaaaaattggtatttccggagtagaatccaatttaggcactgcgattagaacgggtgtcgtattaatcatggcatggattatggtaatgattacgggaaaaatgcacacaataaaagagacatcaaaaaaagaactggcatttattgttctttcagggctggccaccggcagttcttggctttgttattataaagctttgcaagatggaccagcaagtgttgtagtccctattgataagctgagtattcttgtaacggttatattttcttatgtaatatttcacgaaaaactttcgttaaaagcaggtactggactttttttcattgtgataggtacgctggttatgttaattccataaaactctgatatagcgaggcatgatactggtatcagagttaaagatttttatgaactatcaaagagagtaaataaaaggtttcgttattttataggctcctatttttatcagagaagcaaaatatattgtttatctgtttcccaaaatgatattcttttcaattacctaaaacatttttagaagagtaaggggagcaaacaagaaaaattatgaagatttaagaaataatgaaagagctggttttaaattttttgtttgaagggacagaaaatctaggtacatttctccataaaagttacatatagtttattttgatatcattcggaataacatatactggtcaaaatgctcgagtaatctctatttttagagtaatcagatggatataaattttctctgacaagtataaagggtatttttccaaaataaaagaaataaaaataataaaacaggcatctaaatttaagatgcctgttttatttgatggtaacttaatataaaaatcctgcaggtgttgctttaaccatttattatgttttagttttgaagtaaggctgtttctaaatcttgcagcatcaaatccaatgcggtgattccaccttctgcggtataccatacagccggatgtttaagataaacaatatgtccgtttttataagcgtccgtaccttttaccagctcgttttccataatttcctgagcaagttttgcaccgtcagttccgattgcggcatcacggtccataacaaaaatataatcagggtttttctctacaatatattcaaaagaagcttcgttgccgtgtgtagaagtttgatttttagcgtctactccaacgttattgaatccaatttcacggccgataatagagcagcgaccgtcatttcctaatacattgaagcttccgcttgtacacatacctacaatggctgttttgtcttttgcaaaatcagcaagtttttgaatgcgtccatcaaaatcagccattaatccgtctactttatcttcaagaccaaacataggggcaacggtatttgcatttttctttacactttctaccacacctgctttagaatctgttgccagatataccacaggagcaatttcacttaaagcatcataagatttggacagtcggccaccgataaaaataacgtccggctcacaagccattacagcttccatatcggcttctttaatggttcccaaatttgtaacttctgcgttggttacatagctctgcaagtaatccagtgaagtattggcagaacctactacacggtcaccaactcccaaagcatccaaaatatctaaagatgccatatccaaaattgcaatgcgctgcggattatatggaactactaaatcaacttcctcgccgtttgcgttcaaacttttaatggtcactgtttcaggctgactgctttgattggaaccagcagtttctgaagaacttgaggtactgctggaacaagctactaaactcattgccatgactactgcaattgcaagagcaaaaaattttttcatatgtctcatgttcatactcctttttatatagttattcatatatttaataataaatggataaaggttttccctctatttccaggatttcaaaatctactttgtatatctctgacaatgtttcctttgtcatcacctcctttacagttccaaatttggctacttttccatctacaaacgcgcagatatagtctgaataaaatgcagcgtagttgatttcatgcagtaccaatatgatggttttttccaattcgtcacaaagacgacgtacaattttcatcatgttggttgcatggtaaatatccagattattggtgggttcatcaagtaaaatataatctgtatcctgcgcaattaccattgcaattaatgcacgctgacgctgtccaccggataattcatcaatgaatctgtctcgaaacgcttcaagttccatataagcaatggcttgctcaatgatttcttcatcttctttggtagttctgtttcccgagtaaggaaaacgtccaaaggctaccaattcccgaacggttaatttcatttgtatgttgttgctttgagttaaaattgccagacgctttgaaagttctttacttttccatttttcaagctctgtaccgtcaaaagagaccaacccgctgtctttggcaattaatcgcgatataattcccataactgtagatttacccgcaccgttgggaccaatgaaagaaattacttttccctttggaatttccaagtttaccgcatctacaaccggtttaccattatatttttttgttacatcttttatttgcattatcatacactccttctcgttaacagaagatacaggaagtaaatgcctcctcctactgttataaagacactgatgggaactgaatacgtgaaaacctgttctacaatcaattgtcctccaacaagtacaatgattccaaataaagcagaacccaacattaagaagctgtgtttatatgtttttaacaactgtcttgaaaggttggcaagaatcaatccaaggaaagaaattggtcctaccatggcagtagcaacagcaataaataaggtaacgcctaaaagaagacgacgtacacttctgtcataatttacaccaaggttaattgcctgatttttccccaaggtaagaacatttaaaacagataaatcctttcctaaaaaagcaatgactacgcctaatacaatcactgaaaaaataataatttctgtgttaatattgctgaaactggctacaagtgtatttaataaattatcatattcatttgggtccattactcttgtcaaggttgtttgaatactggaaaataaagaagtaagtacagtgcctatcagcaatacatacaatacattgtgctttgtctttttaaaaaagtaactatatattaatgttgcggttacacccataatgattaagtccgcggcaaacgaaaggttggcatttgccgcaaggatgctgctagacccggcgaaaaagacgacagcagtatgaattaaggtatacagggagttcatccccagcaaacaaggggttacaatacgattgttaattacagattggaaaacaatagaggcgcctccaatggcaaaagcagtaagtatcataacaattagtttaggtgtgcgaattttcattgcatataaaaacagtttttcattggcaaagttcacatctgtcagcatataagcagtggctgcggcaagggctaatactgataaaatgataatttttgttaggtttgaacggaatacggcttgattcatgtttggctacctccatccaagtgggagctggaattgccgcagcttgtggttccggaacctgtaagtctgattgcttttctcccattttttaaacgatataacaataaaccgatgaaaaggatacttcccaaaatacctacaatcaattcaatcggcaattcatacggagcaattaccactctgcctatcatatcgcagaccagtacaaatattgctccaaacaaggcggtatctactaaggtaccgcgtattttatcacctttaaacatggctaccacatttggcacaattaggccgatatatgaaatagaccctaccaccaccactacagatgcggtaattacggcggcaatggtaagccctataaataaaatcagattataatttacgcctaagtttttagaaaaatcttttcctaggccaacaatattaaaatgattggcaaaaataaatgcaatgattacaagcggcacaaccaaataaacaatttcgtatctcccttttatcacaagagaaaaatgacccactaaccaagaggataatgcctgtgtcatttcaaatttataggctaaaaagttggtaacgccgccaataacgttgccgaacataataccaaccagaggaaccataacaacgtctttaaattttactctttgaataaaccacacaaatagccatgtaccaagaatcgctgtggcaaatgcaaataaagctcgtccccataaagtagctcctggcataaacaatagtgccaacaaaataccaaattgggcagatgaaatggttgctcccgtggtaggagaaacaaatttattcatgcaaagctgctgcataatcaaaccggcaacactcatgcccacgccggtacataagattgccaatagtcgaggtaacctagaaacaatgaaaatttcccactgttttgcatcaccggagaatagagaagataaattgatatcaatcacgcctacaaaaagggaaagaacagccaaaaggaataaggtgacggctaaaataatggttaagagtctgcctttcatgattacccccaaaatcgttagtgtgtgctaactcttctatatatgtatcctacttttttcgtgtaagataaaactatatcatattaatactatagaaataatatgataagttagctaaaggtaactcaaaatatagcatagattttttgtattgacaatatataaaagtaaaaaagtgaacaaatagagcaattttgtaaatgtatactaaatttgtgtctaaaatttatagtgaaatatctataaataaaaaaagagtttttgctaacaaagctagcaaaaactctttttgttatctaatagatgattacattccgggttctcttaacaagttacgccattctaaatctccacgttccagaccatgaataagaacttcacctgttgcaatattcgttgcaaatggaatattgtgcgcatcacataagcgtaataaatgcatatcgcttggttcatgcggctttggtgttaaagaatcacggaaaaacagaagcatgtcaatttcattacatgcgatgcgggaagcaatttgctggtcgcctccttgagcaccggataaaaaacgttggattttaagtccggttgcttcggttaccattttgcctgtagtaccggtggcacataaattatggcggctgagtactccacaatacgcaatgcagaattgtaccattaattcctttttcgcgtcatgtgcgattaaagcaatgttcacgattgcccctccttttacgtataaatttgaaacggaagatcattataatctttctaatgggaatagaggaacagattcaccttcaagacgagccgctaaacgctgtaaagccattgttcctggcgaacgcgaatgatttaccacagcttttgccggattggtctgcaaatgaatgtcgtccggcagtacagcaattaaacgaataccggtttcatcgataatcgtatcaatatcttgataatgctgcattttacgaaacgactcaaaactaaaacgattgattaccaaacgctgttggcgtatccctcgttcctctagtaattgacggactttatcactgtcacgaatgcaaatagggtccggtgtacttattaccaaagcccggtctgcagctgctactgcagagataaatcctttaccgatacctgccggacaatcaataatcacatggtcgtaatatctggataaaataggaaccaattgcttcattaagtccggatgtatggtatgtttttctaaagccggtgccggcagcaaaaataggttgtttagccctgtatattcttcacaagaatagattgctttaattggttcgcaattaccgtttacgatgtcagaaatatcaaacaccaattctttatccacgccaagcatggcatctaagctgcgaagacctgcatctccgtcgattaagagaactctttttccgttttttgcaagtgtacagcccaaacctacgctgacagtagatttgcccgctccgcctttaccagatgtaataactgttactaatcccatataaaaacctcatcaatattttaccataattcagtatagcagtcaaaattttttgtatagttttagagatgaaagagataaattaacaaaagattcataaaaactcagaatatcatagtaatagtgctgaaaagttttgaacctttttgaccatttcataaagtgactgcttcatttttcataacctatattatagcacaggtttttataaaacacagctgtttttgtaattttctggaatattttattcgtttgctgtactggaactgtttgtttcttccggcatcaccagatttccgttttcgtccactgttttgccataaaaataagcatcaaaaatatctttggcaacattcatggagtacgtaccgcgagaaccatattccaataccactgcaacggcaatttccgggtcatcatacggtgcataagcgataaatgttacattgtctgagtgtcccgggttttcggcagtacctgtttttgctgcaatcgtaatcccataatcaccaaatacggaatttgccgtaccacctgactgcgttacacctttcatagcttcctgaacagtttttaaattctcttctgaaatatctacttgagcaactacttcaggctctgtttcagaaattacttggtcacgattatagttggttacttgctttaccaaatgtgtttttaaacgagtaccgttattggcaatggtagcacaataagttgcaagctgtagtggggtaaatgcgttgtcagattgtccaatggcagcctgaattacgtcacccggctgccagattcctccattactggtacggtattcaggacttgccaaggtacctgtactttctccaatttccacgccggttgcctgaccgaaaccgaattgttttgcatataaatcgatattatcaatgccgagtaatcgtcctacttcataaaagaaaacattgcaagacactttaattgccttttgcaaatcaacgtcaccgtgccatcccaaacaggttggtatatagcttggagcgtagaatgtataataatggttacattccatatgcgtattggtatcaatgactccttcctgcaatgcagcagctgcaacaagcggtttaaatacagaacctggaacgtagtttccgtcaaaggcacgattgattagtggtttgtttgtttcatctgttgccaatgaagtatagtaattgctgtcttccaaatatttggtcaaatcataacttggataagttgatgcagccaatatggaaaaatcttttacatttaggacaacggcggcacctgccacacaatcttctccgtcatattctgtagaggtagatgcaccggctctttgagccgcctgtacgttatttgcaagggacacattggctactttttgtaaattgctgtccaaagtagtatatacagtatttccagcaacaggttgttcggtaacagtatcggaatttactgttccgtcaggatttgtttccaccactttggtaccgtccgtgcctcttaattcttcttcaaacgcagcttcaataccactttttcctattttgtcattgtaagcatatccttcctcttttaaagtattatattcaccttctgttaaagagcctatggttccaatcaaatgtggagccaatgttccgtcttcatattctcttacagtggtaatttcgatggtgacgcctgccaatttggtagagttttcttgaatgatggaggcagtatcctttgaaatatcttctgcaaatgtataaggattggaaatgctgaacattttacgggtcatattatagcgaacggagcaaatgtctctggtatcttcaggagaatagccttcaatattgtataattccattaattgctgcatgcacatttctgcagtagcataagagttcagattcaaaaagttttttccttttaattcttctatttctgcttcttttccttctacaaactcatattcacctttatcgtttatcacaatcggaagttcgtctacccaaggttcatttctttggtcaagcagatgaattaaattctgaatcacatcgttttggttatcactgtctaagtaagtttggtcaaatgtcacattatagccggttttatttacagccaacggttcgccgttggtgtctacaatttctccgcgagcagcactcaaatttacagtagaaacataggttgcatctgcctgttgcaagtattgttccccgtttatcaattgccagtcgaccagtcggtatacaaatacacccatacaaaccaaaaggataccgcccaatgcagcgtaacgcaatttgatacggtcttttatgggactgcgttttctttttccggatttacgaaatttcaaatgagcggctcctttctttcctgaagtagaatgttactgtaaatatgtttatttttacatagctatatgacggatgggtgaacaaaagagaaaaaatcggtaaagagaatatttttccgcgttacgattgagaacgttcttcgcgtaagatgtaggaaaatccacgattgaaatagtaaaacaaaggaaccaacagaaaagtataagcagcacgaggtaagtaatgacggtagagtacatagccaactgcatcgtagccctttaagatgtataaaaacagccattgaagcagtatgacaataagaatggcagacaatatcataattaggccggtcaaaaagttattatggaatacatcttgtaccaaaaaagagatgataaaacaaatcaaacccaaaatcagggcgtgaaatccaaacgtgcagttggtgccgtagtctaataaaaatccgctgaatacaccgtaaaacagagagcagacagggccctcaaacatagcaatggaacacgcaatcggaattaataatgttggtagaatcccataaacagacggaatgagtccgggagtttgctgtatgataaaaaatacaatgatttcaatggtatatgcaatgtatcttaatactcgaaaacgtttcatgacttaccctccattggaggaagcgttgtttgtatccgtgttgtctgccacttcaccctgaccgttaaagctggtaataataatgacatcgcgcacggttttaatatcgacaaaaggttccactgtcgcatacagagaaacgtcattttcttccggttttacttcaaccgcttttcctatcaataaatcttttggaaattttccgccaatgccgctggtaacaatgatatctccttcttgaacggttgtgcctgcttccaataatcccaatttaatcagtccttggtcagaaagctgtgcattgctgctaatggtaccgctttctcggtttactttgtctgttgcggaaatattggtatccggagacaaaatggttgttacttcgcagtacattgcgctgacttgcgatacccagcctacaacaccttggtcagtgataacgggatcatttacttttaccccggcattgcttccttggtccagtgtaaacgtatagtataagttatttgggtcacggttgataacggatgcagatacaaattgatagtcgggattattttcttttaatcccaaatagtttttcagttgtgcattttcctgtttatactgataaaactctaccagctgttgatttaactcattgacttgttgttttaactgttcattttcagcagccaaatcttcataagaacgagtggcctcagaaagacttgcttgtgcgttgtttgtagccacggcagttactttttgcatgggagagataaccgcgccgaatatattggagatagcccctcctcctgtacaggcggaatagataataacagctaccaaaacacaagtaactgcggcaagtacaataaagtttttactgcgaaaaaaagccttcacaagcagtcctcctttttctgtaagccaaaagaatgattagagtgaaaataagcagagggcacaaaccctccgcttccattttcgttttaaaacgtaatttatttacggcgagatttgtagtattgagtaggaagctcaatttccaaacgtttgccggtaccttccgctacacagtcgattgcattttcagcaacatgaacgggcatacctgtttcttgcgtaattaaacggtctaaaccgcgaatcagggcaccgccgccggttagcataattccattgtctataatgtccgccgctaattcgggcggtgttttttccaatgtatttttaattgcatctacaatataacccaaaggttcttccagagcttcccgtacttcgggacctgtaatggttacgtttttcggaagtccatcggccatgttgcggcctttgatgtccaatgccgaagattcaatttcttcgttgggatatgcagaacccaatgtcattttgattgcttccgcagtgcgctcaccaatgagaagattatatttgcgttttacgtagttaatgattgcttcgtcaaatttatcgccggcaatgcgaacagaacaagatgttacaatatcacccaaagagattaccgcaacttccgtagaaccgccgccgatgtctacaaccatactgccgcaaggttctcctacgggtaatcctgcaccaatagcggcagccattggttcttcaattaagtcaacatgattggcgcctgcctggcgtgcggcatcttcaacagcacggcgttctacttctgtaacgccggaaggaatgcagacaacaatatgcggacgtccaaaagaactggatttggttgcctgacggatgaaatgtttcagcatggtagcagtgatgtcaaaatctgcaatgacaccgtcttttaacggacgtactgctacaatagagccgggtgtacggcctatcatattttttgcttcagaaccgactgcaagtacagtatcggaacgcacatccaccgctacaacagaaggttcgcgcatgacgatacctttgcccttcatatatacaagggtgtttgctgtacccaagtcaattccaatatcttttgaaaacattgattttcccctttcgtccgtctttcagacggtattccgttcaaatatttgaaacaatctatctctatcttatattatggtatagattagaaatttctattccaatttattataaccttttatcaatcaattctcaactaaaaattttgtaaacaaattcaaaacataggtacagtttcagcaaatattctacagcgttggactctctttttcatggttcgattctgctgcagtttttgaagaaccaaaggtgcggagcaagcggctgatttctgcaatgggtaaaccgaccacattgtagaaatctccgtcaattttacgcaccaataaggcacctaagctttggataccgtatccgccggctttgtcaaagggttcgcctgttgcaatatagctttcaatatcctcgtcagataaaggataaaactcaacagaagtacagcttacgccaatttcacagcggctttgctttaagatgcaataaccggtatatacttggtggactcgattggacagcatacgcagcattttttgtgcttgttccttatcctggggttttccaagaatatggttgtccaacgcaacaacggtgtcggctgccaaaacgacatcatccggatgcagttttgcaacagctctcgctttttttaatgcaagattttgtaccaaacatgcaggatcgtcctgagatatcacttcatcaatttcagcaggctctactgtaaaacggaatcctgcaagttttaataaatctctgcggcggggggaagcagaagctaaatataacatggtgttctcctttttctaaactttcaacatttccacaaggaattgaactttacataacttatttgattcctttttcgtacaaaccacgggtataatgccctaaaggtgctttttgatacaaaaattgctgaaaagtttcctcaatttcaacagagttttcaacagtgaatcgtaatattccaaaattcataccggatatatccgagattctatcagacattgttaaaggaactgcatttaaaacttcactgcatccataatcacactgaacaggaaattttatgttttttctgtctgtcagccatgtggtgccgttgcaatttttgcagtttttgccgtcattttttccagggcaattgcggcataacatcaaaggcagtcgtccgtacaataacaaaccgcggggaaggcttcctcctatcttggcactttgcttcagtgtcagttcataacttagctcaaggtccgtcagtcccaattgttcataccactccaaagcggctgtgtttgtcacgttgagagaatatcctccatgaatgttgcagcccaatgtctttgccagagcaacgctgtttacagtacctgcccaaacgtgggaaatatcccattttaggaactgttccagtttggaagcaatggtacgttcggttccgaacatgccgcgcggcatagtaactgccagcggtaaaccacggttttgcagttctttaacaatgtgttctttgatattgatagggatataaatcatttgacatacgtttgcacagtcaggaatatcgtctgcgctgtgcaatctggtgaatacagcccgcaaaggaagtggtttagtgctttgccgtgatgtgtttgcagggaaggagacaggatggaacggaatgaccggagcctgtcctctttgtttgagtaattgttccaacgcctctctgcggagttgattcagaagggaaacggggatggacaaatcagggtctatggagcaggtgacgtttgcgcaataaaatggggttccccctgtcttttttaattgttccaagcagcgcacttcatctattgggcgatgaatggcctgttgtgggatgtccccttctactgttacagtatgttgttcatggtcggaaaccgttacggtaacagggatatctctttttataacaagagagtacctaatggggacagattgccgttctttttgataataactgtgcagctgctgaaatacagcattggtggcactggtaacatcttctttggtacggattccgaacatatcacggcctaatgttccgtcgggatatcctgttgtaaatccggaacgggaaaatactgcttccagattttcggttaaactttgtggaatcacctgttggtctaaggcaaaacggcaagcagctgttgctgccgctacatactcgggacgtttcatacgcccttcaattttaaaggaggtaacgccggcatcggcaagctctcctatgcgttcaatcatagataaatcttttaagctcaggtcatagcctgttccgccttttgcggaaaaaggcagacggcaggtttgtgcacattggcctctgtttccactgcgggaaccaagcaaagagctgaagtagcattgacccgaaacagacatacacaatgcgccgtgtacaaaatgctcgatttcaacatgtgcaaaaccaccgtcttttaatgcccgggaaatttctttgatttctcttaaagataattcgcgagccagtacaacccgtgagacgccttgttccgccagaagttttgcgccttccggagtatgcacggacatttgtgtggaagcatgaatttgcagtgtgggcgcagcttggcgcaaaagatggagcaaaccggtatcctgcacaataacggcatcgacaggaagcgtacacgcaaaggcaacaaaatccagcgccggcgcaatctcatgattcaataagattgtatttactgccaaatgcacctttacgccacgggcatggcaatatgcaactgcttgtttcagcgtatcatggtcaaaattttgcgcgttggcacgggcgctgaacagactgccgcctaaatatacagcatcggcgccgcttcgcacggcagcttccaaagcttcccatgaacccgcaggagataacagttccagtttcggttgtttcatgtaagtatcctttcgatgaatggttttcagtgtgattgaaaaatacactccccgaatcagggagtgcatatgttcattgtgccgctatgtatggattattgtttatcaaaatagccaataaacgtatcgtcagacggcagttcaggttcaattggtgattttggacgtgtgtagctccctgttaataagtccggtacaggatgttctgcacgctgaacaggggaatatggcggtatatgacgcggtccttctttttcagctgctttttgtgccattttttgctgttttttctggtggcggctttgtttactgtgttttgtttgagatttgttcacagcgggaggtacaccttgtagggggttatctacaatttggtctatttcttctgtgtcaatagaattgcggagctcttccaatgtgtgtgcatcttctacggaggcaggtgcaggagtttcatttgtttcctgctcctgtgtctcttccgatgtatttgaagcgtcctcagaagtattattcacatcatgagaactgtttatattttgacccagtgaaagattttgattggctgcatccagtgcgtttgtaaatcccggcattttttccaaatctttgtcttctgttaaaaatgcatgcaatacctgaagttcagagcgcaattgctctgcttcggtttgtgctgtttctgcggcttgttttaaacgttcatattcgtttgctctgtttttatcaagtgtttttaattctgctaattcagcttttgccttggcagattcgtcacaataagtcatggcagtgataatggcggccatagaaagagagatacggtcgtttttctttaaaacggcagaaatggcacggtcaatttcatcgccgatagtacgtacatattcttcattgtcgtcactcgtaatggtacaatctatgtcacaaatacgtaattttactttggtcttgtccatggaatacctccttattgccaaggcgaaatgaataataattattattatagtataaaataggttcttttaaaagaggttttcgcgtattttccgtatttttacatgccgatggcacatatcatttcgttttaaatgtgaaattcttccgcagcagatgaatttcacagattttagaggtattgtacaaaaaaatattctttttccatgaaaatgaaagttcatctttatggaaaaaggatacatctcaaaagctgtaaatatgcggatttggtcattgttgatacatttgatttcaagcgttgcattgtagttgaaaaacagctggttttggtatatactggacataagtataaaatagatatttgtggcccaaaatcaaaaagcaaagcttgttttttatttagttggagggaaaagcatgaactataaacaatctgtcaaaaaaattcaggcgggtattgaagaaaaactcgcgcatcaatttggcgaaaaagcggaagcagcttcagatgtacaatattataaagcggttgctcttatggtaaaggaaatgctgatggagggtcgcagtgagtttttaaatcgtgcgcagaaatccaaaaagatttattatctttgcatggaatttttaatgggacgctctctgaaaaataatctgtttaatctggggatagaggaagatttccgtaaagccctaaaaaatatgggcgttaacctagatagtatttatgagcaagagcctgacgcaggcctgggaaacggcggtttaggtcgcttggcagcatgctttttagatggtttggcaacagacggttaccctgcaatgggatattctttacgctatgaatacggtattttccatcaaaaattggtagacggctggcagacagagctgccggacttatggcttcccggcggaaaaatttggatgacgcctcaacaggataaagcggttgaagtacactttgacggttatattgaggaatcttggaacaatcaatatcatatggtgaatcataaggattataaaaaagtaattgcagtgccatatgatatgtatgttgcgggtatggatgggaaaggtgtcagtgtattgcgcgtttggaaagccaaatctgctgattttgatatgcaattattcaacgacggtgattatctgcgtgcgatggaacaaaatgcacttgcggaagcaatcacaaaggtactgtatccgggtgataatcacgaagagggtaaaagtttgcgtttaacccaacaatatttcttggtttctgctaccatacaggatattatccgccgtcatttgtttacttacagttctttggataacttacctgagttggctgctattcatttaaacgatacacaccctgttttagcggttcccgaaatgatgcgcattatgttggatgaatgcggttacggctgggatgcggcgtggaatattgtaacccgcaccattgcttacaccaaccatacggttatggcggaagcgttggagtgttggggtatcgagttgtttaaaagaagactgcctcgcatttatcaaattatagaggaaattaatcgtcgcttctgtgctcagatgcatgaaaaaggaatagacggctatcaggtaggacgtatggctccgctcaatgacggatttgtaaaaatggcaaatttggcagtggtggcaagccattccgtaaacggtgtttctcaattgcacagtaatattttaaaagaaaccgtatttaaagatttttatcaggtcatgccgcaaaagtttaaaaacgttaccaatggtattgcgcatcgacgctggctgaaccaatccaatccggaactggctgcctttttaaccgagaccattggagacggatatatccatgatgccaatgaattatctaaattcttagcatataaagatgacaaagtaactcttgaaaaattagaaactattaaatatcataacaaacaacgtttggccgagtatatcaaaaaaagcaacaatgttgtggtaaatccaaactctatttttgatgtacaggtcaaacgtatgcacgagtataaacgccagcatttaaatgcactgcatattttggctacttatcaatggctgagagaaaatccaaatgctgactttaccccgcatacgtatatttttggtgcaaaagctgctccgggttactattttgcaaaacaaatgattcgcttcattgtggaactgggcgaagtcatcaacaatgacccaagggtaaacgacaaaatgaaagtggtttatttagaggattaccgtgtgacattggcagaattgatgatacctgcagcggatatcagcgaacaaatttccttggcaggtacggaggcatccggtaccggaaatatgaagtttatgattaacggcgccatcacattaggtacgctggatggagcgaatgttgagatacatgaaaccgtgggtgatgagaatatgctgctgtttggtatgaccacgccggaagcacagtctttatccaaaaacggatatcagtccaaactgttttatgacaacaatcctgtaattaaacatgcaattgaagaaatgcgttcaggtttgaatggatttgaattccatgatattgcaaataatttgatcaatgtagacccttatatggtattggcagattttgattcctacagcaaagtgcatcaaaaagcagaaaaattgtatgccgaccaacagaaatggcagcaaatggcacttgtcaatattgctggagcaggtcgatttgccgcagaccgagccattcacgaatatgcacaaaatatttggggagcaactccggttccggctggagaacaaaaaacagccggaaaaacaacagtgacaacagaagaatccgtgaaaaaaacaactgtaaaatcaacaacagcaaaaagaacgacaaaatcaacaaaaaaaggtaccaattcctaagtcataggaaatatcaagcaagagcaggaagagcataatttgtttcctgctcttttttggagagatgattatgtttcattccagaaatcctatttaccgcaatcccacaggggcggttcaagctcatacaaatatccattttaaattattggttccaagagaattccgatgcagtgcggcacgccttatggttggggaagaatttacaaaacaggtaaaaacacttggcctgttttggtgtggaatgaatggggaggaccatgaatggtgggaatgtgattttacacctgaacagtccggtctttatttctaccgttttgaaattgatacctggagggggactctgggaattacaagccgctttggcggtgaaagcggtatcgatgagttcggcgctcctgaaggagagtgctggcagctgacagtgtttgaatcccagtatcaaataccggattggctaagcggagggattatgtaccagatttttcccgaccgtttttatcgctcaggtactacaaagtataacgtaccccaggaccgttatctgcatcagcggtgggggtcgcaaccggaatggaggcccaatcatcagggagaaatcacaaactctgattattttggcggagatttggaaggtatcattcaaaaattggattatttacaaagcttaggtatcacttgtatctatttgaatcctatttttgaagctcattccaatcatcgttatgatacagcggattatacaaaagtagacccgttgcttggcagcaaagaggattttaaacgtctgtgcaaagaagcaaataaaagagggatacacatcatgctcgatggtgtgtttaaccatacaggcagtgacagcatttattttaatcgtaagggcagataccaaacattaggtgcttatcaatctcaggaatctccttattatgattggtatcaattttaccagtggccggagcaatacgcctgttggtggaattttgaaacgcttccaaacgtgaatgaagccaatgagacgtacaacgcatacattaatggaacagacggagtaatacaaacatggctgaaagcaggggcagacggatggcggctggatgtagcagatgagctgcctgatttatttttagatgatataacaaaagctgcaaaacaggtaaaaccaacttccatgatactgggagaagtatgggaggatgcttccaataaaatggcttacggacagcgcagaagatacttacttggtaagcaattggatagcgtgatgaattatccgtttcgcgaggcaatcataggttttttaacaggaaaaaatcctgcagaaatgatggaactgattatgacagtattggaacactatccacccggtgcgattcacttattaatgaatcatataggaacgcacgatacagaacgcattttgactgtgttgggaggagagccgttaaacggacgagacagagagtggcagagcagaacaaaattgtcgcaggagcagcgcagtagaggattggctttattaaagctagcttcgttaatgcaatacactttgcccggtattccttgcgtttactatggagatgaagcagggatggagggatatcgcgatccgtttaacagaggctgctttccctggggacatgaagatgcagagctggtgaactggtaccgcagtttaggaaaaatacgtcatagctgtgaagtattaaagcaaggaacgttggaaccgtattatgcggatgacgattgttttgtatatgtccgttcagatgaagcggttggtcaaaaattattggtagcagtaaacagaacagcacagcgtaaacaattgtgtatggttcaggaatgggaaactgcgtcagcacttcttggaaaggctgtttggaacggtacattaactttagagccttatggttatgcgttactattttcagggaaataaattttaaaatcatataaatgtgaaacagggcgtctcattttgaggtgtccttttcttttttgagatattcattattacggaaaatatcaaaaaaacaggataaagtttgtgataaaataaaccaatttagttaaaaatataacacatattgttaactttttatttattatttacaaaaatatttttttgttatatgatgtacacatcagtaaaaatgaaccatatatcaaaggaggatgaaacatgagtgagactatgaaagcaatggtatatttaggaccaggtaaaaaagaagtattggaaagaccaaaaccaactccgcaaaacagtaaggcagcggtggtaaaaatgttgaaaaccaccatttgcggtactgaccttcatattttgaaaggggatactccggaggttgaagaaggcagagtgctgggacatgaaggcattggtattgttgagtctgtaggagaaaatgtaagtaactttaaagttggcgataaagtaattatttcttgtgttactgcatgtggaacatgccattattgcaaaaagagtctttatgctcactgtgatgatggcggctggattttaggctacatgattgacggtactcaagcagagtatgtacatattcctcacgctgataacagtttatatcacattccggagtcaattacggatgatgcagctgtaatgctcagtgatattttaccgacaggatttgaaattggcgtattgaatggtcaagtaaaaccgggcgatacagttgcaattgtaggttcaggtccaattggacttgctgctttgttaacagctcagttctattcaccggcacgtattattatgattgacctagatgataatcgtttgaaagaatctttacgttttggtgctacagatactgtaaactccaaagatatggatgctgcaattaagaaaatttatgaaatgacagatggtcttggcgttgatgtcgccattgaagcggttggcattccgcaaacctttgatatttgccaaaaaattattacaaaaggcggtcatgtggcaaacgtaggtgttcatggcaaatccgttgaacttcatttggaggatctttggattaaaaatattacaatcgcaaccggtttggttagcacaaatacaacgcctatgctgttgaaaacagtatcttccggcaaaattaaaccacagcaattggttacgcatcactttaagttcagtgaaattatggatgcttacgatacatttgcaaatgcggcaagagaaaatgcattaaaagtaattattgattttgaataattcaaaaggctgtaaattcccttgtatagggagttacagcttttttattcatatgttttattgattatactgcggtcacttatgatgcagattattttctatgccccataggtaagtgcattttttcgtacagtcatgattattttttatatacggatagatatagtgccgtatatatggaaaaaagctcgtacaaaacaaactgtttgtacgagctttttattgatatttgctgctgtttttgaaataaatactattttttattatgtcataaagaataaatggtttgttttgccttttatctattgcgatttctttttacgaataaaatagacaccattccggacacggacaccactaacataagtacccagataaagttgtttgatgcatcgcctgtattagcagtatgcatattgttatgagaactgtcatcaggtggatatactgttgcagaaacgtgtgtattcgtaacaacaatatttccgttctcatcaatggttatatggtttgtataaccattgggtatatttatttctttcacggtatattctatttctttgctgttttcaaattgaggcaactcagtaaaagtataagtccaagcgttgtcttcatttaagacagtctcatttcccacaggagtgccgttggcatatagctgcactttgatttccgcaggacggataccgtcttggttgttgttatcatcccaaacctttgtcacggatttttctactgttgcaggtgtatgggagttagtcaaagtaaagtttccgtcagtaccaatttcaatgttatcggtataatcttttggaacatcgacttcttttacggaataagcaatttctttgccattctcaaattgaggtaaatcggtaaaagtatgagaccaagcgttgtcttcatttaagacagtctcacttcccacaggagtaccgtcggcatatagctgcactttaatttctgtaggacggataccgtcttggttgttgttatcatcccaaacctttgtcacggatttttctactgttgcaggtgtatgggagttagtcagagtaaagtttccgtctgtaccagtttcaacattatcagtataatcttttggaacatcaacttcttttacggaataaacaatttctgttcctccctcaaactgaggtaaatcagtaaaagtatgagaccaggcattgccttcatttaatacagtctcgtttccaacaggagtgccgttggcatacagctgtactttgatttccgcaggacggataccgtcttggttgttgttatcatcccagacttttgtcacggatttattaaccaatgctctgtaaatacccagattttgatattgtttttgataaatagtgatattatttttctgcatttcgctcagagtaggtagcgtaatatctttaatttctgcggaggttaatatattttcaggagattttattgcgtctgatttcgagttgattgcttcatcagttcccatattcttatcggtcacaatgtaatctgcaaatgaaattggtgttccggaatgatctgtaaatacaactctataggttcctgatggcagtttcgtaaatgaatattcgccatttgcattggtagtagtaatgcagtcgttattgttgatgtcctttgcaatggtttcttgtcctgtaatagcatcagtatgatataaagttacatttaaaccattgagtcgttcttctgcgttaccaattaaaccatcttggtctgcatcaagccatgcaataccagagagagttctttctctaacattaattttagaaataggagtagttagctcatttaatccgtctgctttcatggaagcactattgccatagacattaccaccattattgtttgtaggatgtaaggtaatatccaatacatatcgttcgaatgttggcagtgtgccttttaataataaagcggtaacatcttcgttcaactcatacacatttttatctgccaatgtttgtgttggtacaagttcttggaacaatgtttcatccacggttgaaacgttggttccacgtacatttttgtcggtagatgaatataattttatttctgaaggagctgttaaggtagctgtaatagtataagatccgtcaaatgaagagccattagcatctccgttgtaaggcataacatccaacattttatagtttgtataatccaagctgttagtatttgtaaaagaaattctccattgaatctctccatttatttcagcatcactttggagtgcctgtttagataaatttaatgatttattgactaccaaggtagctgtagcttcggattgatttgggtgggaaggccattgagaactaaatactctgttatcgccttccgcttcaatgtaagctgtgttgtatacagtatgagtagattgttgtaaattgatattctcgaaattcaattctgcattaaatgtaattgcaggcaatactacacctgtgggaacattttcaatagtccagctgactttggtggttccatctgctaacttttcaatagatgctgtaattggttgatcaccataataaaattttgtattgttacttacagttagttgagcaggaagaatatcacttatcgttactcgtctgatggtatctccttctttaccgcttgcaacgtttaagataggttgtaagcggtaaggaataaacgtaacgcctgttgaaaggtcaaatgatttattgtttgcatcaattgatttttcaatgcctgcttccacacctacaattaataatgaagcacctcttgcatagctggccatagaagaactgctgttcacaatttgatgtgcattattatattgtgctttttcatattgattattatcacgaacataagagttaggttgatttaacttatcatagctgtttttgtctaaacgtgtatcatttacagtgatgtttttattggacttatagaaggctgctgtatggactgtttggtacacatttccttctgttgcagtgctcaatatatccacattaaatccaatttggtattgtgttacttcttgcaggtttgtgatatttcttacttcagccaaaacagcaacgcaaacaccatcaggatatgctgcttttaaatcagccatggacgcaaagtacaccaaatcttgctcttttgaagataacatttcagtgtcggatgtccaaccttctccattgggctttgcagcatacaataacgtcacattccccgcaacattcgagcttgtcggaagtccattggatgcagaagcactgggctgcatggcttcatcatctattctcatcaataaattgacggcctttaactcatttttgtcatcaccggcataggaaaaagcaccagctatttgtacagttgaaccctttaatgcgtaagcatctaaccccattcctgccttattactggaaaggttgctgccccaaaaaccattttgttgattttctctgccgatataatggaataatccataactcccatctcggaaaatttcatagtcccttattacggtatcatttgttgtgatggattgtgtcgtgctaaccagagaattgcctaaaccgtcttggtagggtgctttcatgttactgtcggaaatttctaattgatattttttattggtattatcatttttatccagaggagctaccatttgaaaataggctgttgatatataaagatttccttgggagggagtaggactaagtgtagtagcgccatttcccattaaagtcggtgcgaataactctcccttttggttatataaacttgcccctgtaactgtcacatcaatgctcccatctttgttttgcacaaatgtccaggttcctccattgtttactgtaaaactgtttggggaaccggcagaatttgtttggggcagtgcagctgcatatacatcagcgtttccggcaccattagttaagtcgcgtccaccaataccggtagtgccataggtattttctttataatcccataacaaggcttgcaaggaggtgggaacgccgttttcgctgatacttggatgtattgtaaaagttaagttatcagttgtttcgggaacataaaatcctttcattcccttattactgtcaaccgctttcattctcaaacctacgccaaagtccagtaatctgccgtagacactgcctgcatctttgttagaagcggttccgtttcctgttgaaaaatcataggtaccaatggagttcatttttgttggatttaccaattcaatgtcgtacataggtactgcagaaacaatggccttttcatctgttccactcatgacttttgttttccatgaatcagcagatgtatcttttgtcagttttacgttgaaggtaggaataacctcttgggattgattcatgccttttacgttaacaggtatatattttgtttctgaaaaagattgaaaacctgctccaccgccggcactgttatatatggttttacctgttaaggtacaaacaccgtttacatcttcttggacgatatctgtcatccagctttttaaaacatcttcatcaaattccgcgtatttttttgaaacatttaaggtaaacttaaattcaagttctactgcctgtatgttaccgttaatttcacctgagtaagtacattcgtagccaatatcatcaaaagatctgacaattgcattatctttagatgaatcattgccgggatcatcatttgcatcaaaaggtgtagtacctgtgcttacacgcttggctgactgaattttaaaattcctgacttcttcagatgcttctgcatacaatgagatgttttcccccacaatatcggttgtttcttcgtcgttcgtactgctattatcggtcgaattagaactggagttgttttgtgatatgctggtttgggaattcacctgctctgcatataccgagactgcaccgataatacaggaacatagtatagataaagcaagaatgaatgccaaaatctttttccatttttttgttttcatctaaatctccttctttaatttttaattctcttgtaacacaaaagtgtcatctatgtaaaaacaataaacaagttcctcttggaatgcataccctgaaattccctttttcattaagttgtttactgttgattacaaatgaaattattagtgcgtatgcactgcaaatttggttgaaatatcagactttatttattaaatatgttacccttaaaaatatgataaaatgtttaaaaaatcccttagttttgctatttttatacattttatagtctgtgaaataaagtctaccttttgtaacgaaagggtatatttatgtaatcaatcaaatgttggcacaaaacaaaatagaaatattattatttttgtatgtaaaaaagaagaaggctgttatacaacagccttcttctaggtataaaatgtatatttatttttattctgcttgagaattttcttttataatatcttcaattaattgctccagttctgccaaggtagacaaatatcctgctctacgtctgaactctgccgcgccatggattccttttacataccagccaacatgtttacgggcctctttcattccatgttgttctgttttgtggtcgcataaggctaccatatgttttctcataaccagcatgcgttccataatagaaggtgggggaagaatggtgcagttatcagacagatatgcgtttatttgtgaaaaaatccaaggatttcccaacgctccacgacctaccataaccatatcacagcctgtttcttctatcatcttggctgcatcctgcgcagtgttgatatcaccgtttccgattacgggaatagaaacggcttgttttacctgacgaatcatatcccaatcagcaggcggtgcatacatatcctctctggttcttccatgtactgcgattgcgtcagcaccggcttgttcgcaaatacatgctacttctactgcattgatactgtttttgtcccaccctttacggattttcacggttacaggaacagacacggcttttttaacagccgatacaatatctccgcataaatcgggacgtttcatcaaagcacaaccgcctccgctgttactgattttcggagccggacaccccatgttaatatcaatggcttggggttcgaattccattgctttttcagctgctttggccataatttcaggttgatctccaaaaatttgaattgctgcaggacgctctgcgggagacaactccattaattctttgctttttcggtcactgtattgcagccctttggagcttaccatttcagagataacgtatgcagcgc

SEQ ID NO: 197 - DNA, 3915 bp, Unknown
  16S sequences of unknown bacteria
tacactagatcgctcgtcggcagcgtcagatgtgtataagagacaggaggtgcgggggtgtatgctggaggaatttgcttggcgcgtatataacgctatgctgggccgggcggtgcggggcatgcgcggtgtgaaaccaatggacaaaagatggatccagtgtgcggaagaatcccgccgcgcgctgctgaaacgctatcctgcggctggggaagcagagctgcgggagttttgtgccgccgccgggcgctttggccagatcaccggcggggcgatgtttctgcagggctatacgctggctcgtattccaccggaactgctgccggcgctgacgggggagcgcaatgtgtatcgatgcgccggcgccatttacagcgctctggtgacgcagcctggcggcagagagcgctttctgttcctgtgtgaactgcagggggcgcgggtggagtgcttgcaggaactggcgcggatgcaggaggcgatggaacatctggctggtcggctgcgggtcggagaggacgatccgtggctggaggcccttttgcgcatgcatctgcggctatatatccatgcggcccggacgatgtatgaatatggggtgcagttttcgcgattcaatctgtaaaaggacgttttccctgatccggcaagcccctctcttgacaagttttttccgatgtcatacaataagcaggctaccatccattagcaggtataccatttaatatatatgtgaggaatgagaattatggcgaaagatcaaagacaggtggagtccatcacgaatatggacgaggactttacgcaatggtacaccgacgtgtgcaccaaggcggagctgattgattatacttctgtcaagggtatgtttatctaccgcccttatggctacgccatctgggaaaatatccagcatgagctggaccgccgctttaaggaaaccggccatgagaatgtgtatctgcctgtgctgatccctgagagcctgctgcaaaaagagaaggatcacgtggagggctttgcccccgaatgcgcttgggtgaccatgggcggaagcgacaagctggaagatcgcctgtgcgtgcgccccacgtcggaaacgctgttctgtgagcactataagaatattattcactcctggcgcgacctgcccaagctttacaatcagtggtgctctgtattgcgctgggagaagaccagccgtcctttcctgcgccatcgcgagtttttgtggcaggaaggtcataccatgcacgccactgctgaggaagcccgggaggaaacccagcggatgctgaatgtttatgccgatttcctggaaaatatgctggccatgcctgtggtgaaagggcagaagacggacaaggaaaaattcaacggcgccgaggaaacgtacacggtggagtgcatgatgcacgacaaaaaggcgctgcagtccggcaccagccatttcttcggcgacgggtttgccaaagcctttgatatcacattcaccggaaaggacaaccagctccactatcccttccagaccagctggggcgtttccacccggatgatcggcggcatcatcatgacccacggcgacaacaacggactggtgctgccgccccggattgcgcccattcaggtggtggtgatccctgtggctcagcataagccgggcgtgctggatgccgccgcagatctgacggcgcgtctgaaggcggcgggtatccgcgtgaagatggacgcttccgagcagtcccccggctggaaatttgccgaatatgaaatgaagggtgtgccgctgcgcctggagattggacccaaggatatcgaaaaagcgcagtgcgttatcgcccgccgggacaacggcgaaaagacctttgtggcgcttagcgatttggagagcgcagtgcccgcgctgctggatcaggtgcacgatggcttgtatgccaaagcgcgggaaaacctggaaaatcacacctatgcagcggccacgctggaggaggccaaggccattcaggaagaaaagggcggctttgtcaagaccatgtggtgcggcgatctggcctgtgaaatggctatgaaggagaaagcgggcatgaccagccgctgcatcccctttgcccaggagcatttgggggatgtctgcccggtctgcggtaagccggccgtaaagatggtctattggggcgtggcttattaaaaatggaataaaaaattccccgaccaaaatggtcggggaatttttttcggcagtgcgctctgtgagcgttcaaactggggcgaagggcggcagtatactggcgaaagaaggggggcttaatcccagtcggattcccagtctacaatcgcgccggtcaccgcgtcaatctcgaattcgtactccatggcgccgctgtgcagttcgccttcgtacagcgcccggccgtcatccagctccagtttgaactcgctgtagacgccggtggtgccggcagctttctccacgatctgtttggcctttgcttcaccaatgtagtcgctggatgtggcgggagtgcggcgttcagtgtcatagtcgaaactgagaaccttgccgttggctgcgtcgaccttgtaatcgtattccttgtttccggcaaagaactccacgtcatacacccgcatgccgtcatcatagtcctgctcggcagaaaggaaaagggtatccgcagcttttacaccggcatggctgagcgcgatggacttggctttttccgtgccgatgtcggtattggactgctgaacggtatcggcggcataccggtcgatatcatagtcaaaactgaggatcttgccgctggaagcgtcgatttcatagtcatactcctggttgccggcatagaactccacttcgtattccatccggccgtgctcataatcctgctggacgatgatccaggacacctgagaggcgcctatgccggcgtgctgcagggcgatttctttggctttgctctcgccgatggaagaggcggcggagcgctgcgcctggttttgggaagcggctgcgtttgctgccatcgtgggtacgagcagggcgctggtcatcaatacggctgccgtgcaggcggccaggggctttgcaacgattttcttcatcatgtttttatcctccgtcaagttgtttttcagcaattttcagggggtgcttgctgttcattgatataacgcggggcgggggcgttttattgcatcgtgcaaaaaatttttttccttttttcgaaacgccgggcttttccgatcgatcagaatgacagatttttgcagaagatggtctgtccgtgccggctgcggggcagggagggggcgaagggctgcttgctgatcccgaataggcgcggcgttatgacggagacggacggaaatgaaacgcaatgttttgggtaaaataaccacaaaaggcgtgggctggaaaaaatcggcgtttccactgaaaaataagagaaaagattgtaaaataaatcgaaaaattgcttgacatttttttgaaggtcttgtattatagtaaggcgcgcgacggggggatgatacgcccggctgcgctgcaaatgcgatgaagcaggagattgcgggcctggcccggtaacttctgcggagtatgtccgaaaatcgggcggctgagaaaactgtatggcgtagatcgctgcgcatgtcaggaaaccggccggattactgcgccggtttttcttatgacgcagaatgatacgcacggataagcgtacagaacttttctcgccgtacgaagaggtacaaacgcatcacttcgtatgttttatcaaggaggaaaaacaaaaatggcagataccgcaaagaacatgatccgtattcgcctgaaggcttacgatcaccaggtcattgaccagagcgcagagaagatcgtggagactgcaaagcgcaccggcgctaccg

SEQ ID NO: 198 - DNA, 3179 bp, Unknown
  16S sequences of unknown bacteria
ggggggcagagtcggcggcagccatgccgaccgcgctgatcgctgcttttctgggcgcagtgctctgtgagctctgcctgacccatttctggcgcttcccgctgatgcgcacgcatgccgcgcggctgtgtctgtggggcatcatcgccatgatggttccgggcgcagaattggcggcgtttgccggcggtgcgggcgcaggcgcgctctgcagctggatctgccatctgcgcgaacgccgcgatccgcgctttgtccatacgcttgccgcatcgctgctgctggcggccgggatgttcgtgatcgcatggttttgatttacagcgcatgcggaatggatataataaaaggtgacgaaagagaggaagcacgatgaaaagattgaatgtgttgagctgggatgactatttcatgggcctggcgcatctgagcgcgctgcgctccaaggatccttccacgcaggtcggcgcctgcatcgtctcgccagagcgaaaggtcgtcggcatcgggtataatgggttcccgatcggctgcgacgatgacgaatttccatgggggcgcgagggatcgtttctggacacgaaatatccgtttgtcgtccatgcggagctcaatgccatcctgaacagcacccaggatctgcatggctgcagcatctatgtctcgctgtttccctgcaacgaatgcgcgaaggccatcatccagagcgggatccgccgcatcgtgtatgaaagcgataagtatgcggataccgacggggtcatcgccagcaagaagatgctgcaggcggccggggtcgaactggtgcagctgccttatcagatcacgctcagcgtcgaaaaaaaataaatgtactctgtatgtgcgcagagtacatttattttagcgccttcgcggtattggcgaagtgcagcttggccacatgggcgagcgcttcctgaccatgggcctgcacgaattggcggatcgcctgatcgacggccgcgccggcgcccttgggaaaggtgaacgcatagcgctgcgccatctggtcgcacgctttcaggaaggcatagcgcgcgatgacgctggcagccgcgacggcggggtagcggctttccgccttggtctcaaagtggatgccgcggatgatctgcggctgatcgcggagatagcggtaatagcttttttcctgcacgaactgatcgatgatgatcgagccgggcaggccgccggccttgcgctgcaggtgcacgtaagcctgattgtgcagtttgcatttgatcgcgaccatattgtcgtgttcatggacccggttgtaggtgtcgtcgtcgaggatgagcacgctgtatctcagcgcggcggtcagcttcggtgcgcaggcgcggatggcgtcatcgctgagcagcttgctgtcggtcacgcccagctgctgaagcagaggcaggtcttctgccctgaccagggccgcgcagacgaccaccggcccgaaatagtcgccggtgccgacttcatcgcttccggcctgcggaaagcccgctgctgccttgggccgtgcctgggcaaacggcgccgcatacagatcggcgccttcgccctggaagacgaccttcccgctttcataagcggtaatgacacagtcgctgagccggtattgataacgggcatagggcggggtcttgcgtttttcgcatccctgcagctgctcttccagcgcgctgatctgctgcggggacatcgttatggtatgtactgacatcaaatcaccgtccgtattctaccacaggcaaggcgtcaagtacagccgccgtggtgaaatgcgcccatatctgtggtagaataaaggaacgaagagaggtaagcaaatggaaatgaactggattcctttttttgatgtgatattgatcgtctgtctgctcctgtgccttgtccgctcatggcagcgcggctttctgctgcagctggtcgatctgttctcctggctggtcgcggccgtgctggcatggtggatgagcgatgtgatggcagacctgatgccgctcattcaggtggacgtttccgatgtggatatgctcaacgggtttttcagctcgcggatcagcgcggtcgcctggttcgtgatcatcctgttgatcatccgcctgtttacttggatattgcatccatttgccaaggcgctcaaccatgtcccggtcgtcggctggttcaaccatctgctcggggccgtgctcggggcagtcaaggcattcatcgtgacctatgtcctgctgatgatcctgtatctgcccctgatcccgcagggcgcgcagatcgtccagcgatccatcctgcgcttttacgaaccgctgtgtgacgcggtcttcacgcagggcgctcagctcatcgacgggctgaagctggccgatgagctgcagggtctggatgagagcagcgatgcgctgaaggaagagctggaagaatggatcagggaaaacggagaggaggacgcggtttcagcgtggctggaatcgcagcagcaatgaacgaaaactatgaatcggtggagttttccgccgtcaaacgacagatcgcgcagcggtgcgcatttgacgcgggcagagcgctgctcatggcgcagatgccccgttttgacacgttatggatccgtcgggaattgcgccgctgcgcgcaggcttcggcgctgctgcgggtgcatctgcagttccctgatgaggatatcctcgatatctctgctcatctgcagcgggcggataagggcatgacgctgcgtccgggcgagctgtatgccatcgttcgcttcatccgcacctgtgcgcgggtgcggaagttcctcgggcattgcgatgaggagatggaggagctgcgcgaactgcgcgatgcgctgatcgatgagcatcgcctggaaaaagaagtcgcgcggtgcatctcgcaggatggcgatgtgtttgatcatgccagcgcgcagctggcctccctgcgtcagcgccgcggcgagctgagcgcgatgatcagcgaagaggcaaggcggttcatctcagcgcataaggacatcctcatggatacgatcaccgcgatcagaggcgggcgcacttgtgtgctggtgaaggtcagcgagaagaacagcacccgggggatcgtccatggcgagagcgccagcggacaggcggtctacctggagccgggcgcgctcgtttcgctca

SEQ ID NO: 199 - DNA, 14810 bp, Unknown
  16S sequences of unknown bacteria
ccccgccgcgccgctgccctacagggccgcggtccgagaatgatgggggagaggtctgcgccgccgcggctgcggctcaagagggggaagcccccgcgcatgcaggatgcgctgttgataaaagagcgacgaacaggtccgggcaaaagcctgtttttcaagatgctaaataagatggggtaaagaatgagacgtcgcattggccccaattacagggggtgaaaagggaatgaaaagaatcatgagacttatttgtggtcctttgatggaaatgagatactgacgatcaaaaaaggaaaccatggcactgcaatgctttctttatcatgacaaagctacacgcagcatcattcagtatgatatacatataaatgataacttgcacagaggtattgaaagctgcacaaaaaccatctttcctgcaaagagtatgatgggcttgatatatgggcggcacgaagacggcgttatctcaaagagagtgggtccatatgaatggcgagcagcatggaatcgggaattccgttccttgaagatgatagcagctgggaggcctcttcatgaaaaccatacaggcgttagcctttctgatgattccgttgattctcgttacatcgtacgcgcttgccgagtcgccgggatatccaacgattgcagaaatcaataaacttctggaaaacaaccgggaattgttcacccgcactgctgaaatcctgcgaggccatcctgattttttccggcatttgtacgaggagacgggccaatggggaatctcaagtcttgatgaggaatggattccccaatgggatcatgaatgggcttccttctcctttgacgaagcagagatcgagacgattcgttccgtcatgaagctgcaagacctgcgagacctgcaatatgagcactttgcagttccaatgtcgtcatacccgtaccaatgggaaacaagcgcaccggcgatcctgtttacctatcgggtgcaggctgaaaacggaagcagtgatttatatcagctgtgctatgttcgtgctgacgatagcggaacagaagaagagcagcataaggcggtggaagaagaattgggctttttgcagcgcttcggtgcatcgctgctggagcttgatgttaacggatggtatggtattggcggttcccaagtcaaatgatcaggctctgtataaacaattatgatacataacggaaacacccccgtcattccccaacttccggctccccgggccccagcttgccctgcgcccaatgccggcggcagaggctgacatagctttcgctgccgcccagcacaatctgttcgccctcgcgggccaccttgccgtctaccacgcgcgcgttgcagacggcttttttgccgcaccagcagatggtcttgacctcctcgatggtgtcggcccaggccagcagccactgactgccctcgaaaagctcgttgcggaaatcacaccggaggccgtaggcgatcaccggcacgttgtcgatgtccaccacccgcaccagacgctccacctgcgcgcgggtgagaaactgcgcctcgtccacgatcaggcagtcatagtcccgcacgttgaagcggtccaagtcctcaatgaaatggcagtggcagcgaaggccgctgcggctggcgatcatggtttcgccgtcacggttgtccaggcggggcttgagcatcaaaacccgctgcccgcgctccaggtagttgtggcgcaccatgatggcgttggcggttttgctggagcccatcgcgccgtagcgaaagtagagcttggccatggaagaatcagcctccgggaaagaaaatgagattattggatgcccagctgcgccgcgagatcttcggcgcgctgcgccgcgtcgcggtagccggacagggaggaaaagaggttataggcgccctgcagatcgccgcttgcctccagcgcgtcggcctggtcatactcggcgtcgcgcaggtaggtcttgcactccaccgcctgatccgcgctgctgaggtaatcgcccaggagcatgaacaggtcgatggcggtctggtaatcgccctcctgcttgagggcaatggcgcggttgtagatctgcccgcgcagattgtagaggcggtcctcggcgtcgtcgatggtgatggccgcctcataggcaaagagcgcctcgtcatagcgggcgtttgcctcggcgtcgcgccccaggcaatactggctgcgaaggggtgcgtcctcaaagtcaccgatggcttcaaacgcctcggcagcctcggcaaaacggccctcctcggccaggacgtgggcgtggcagtactggtagcgctcctggccatagagaatgtcgagcgactgggcaaagtatggctccgcctcggcgtattggccctgctcatagagcaccagcccgcgggaataggcggcgtaggcgggcgcctgcgcgtaatcgcccaggcgctcgaaggcctcggcggcttcggcgtattcgccggaggcgaaggtgtccagagcgcgattgtaggaacggctgtaatccgtcgagcaggccgacaggcacagaagaacgcctgcgaacacgccaagcagcgctccaaggcgcgcgcggttcatgcatgcacctcccttttggcgggatcaaagtcgcttttcaaaatggcgtacaggtccacatccgaaaagcggcccttgttgtagatgcgctggcgcagcgtgccctcgtgcttcatgccggcgtttcgcatcacgtggccgctggcggggttgtcacactcatgctgggcttcgatgcggttgaggttgaggcgggtgaatccaaattccagcacgcaggtcagcgcctcggtcatgaagccgcggttccagtaggcgcggctgaggctgtagcccacctcggcggagcggttttcggtctggacccacataaagccgatggtgccgatcaccttgcccgtgtcgcgcagggcgatgacaaacgtgcccggcgcacagctgcggtactggcgcagaaggtagcggatataggcgcgcgtctggtggatggagcggtgcgcatcccacaggacgtgacgcgccacttccggatcacgggaatactcgtacaggtcctgcgcgtcgctcatgcgcacggggcgcaggatgagccgccgggtgagcatggtgggcaggcggccaaagacctccagatatgtctgcatggcagggaagccctttctttcaataaacagcggacatcagatcacccggcttccgggctgggcaaagggcggacgggtcacgcccaggacgagcaggtacacccccagcgccagcaatagcagcagcgctgtcatcagcagccagaacgcgggggaacgacgcgaccgggacatataaatcctccttatttcattcgccaattctggaaaagcctgaaaaagtcgggaacctttccggcggatgaatcgttacttttcatgaggcgcaaagcgagcgtcaggcgtgcagcttctgccacgccatcaaaaggcccagcgcggtcttggcgtcgcacagctcgccgctcatcacgcggctgacggcctcggaaagcggcatcttctccacgtgcagaaattcgtccggatcggggtggtcctcatgctggctcagctccgtggccaggtacaggccgatttgctcggtgcaaaagcccggcgtggtcaccacatgcgtgagcttttccatcttcccggcgcgcaggcccgtttcctcctccagctcgcggtgcgcgcaggcgagggggtcctccccgacgtagtccagcttgccggcggggatctccagggtcatcagatccaccaccacgcggtgctggcgcaccaggtacacgttcccctcatcgtccacgggcaccacggccgccgcgcccttgtggcgcaccacctcgcgcagggcggtctggccgttgggcaggcgcacctgcatgtgggttacgtcgataagcacgccgtgaaacatctctttctcggacaggggaacctcacgcaggtcgggatgatcgcacatagcgggtcgcctccaaaatatcgttcccttgtgtattcgccgccagagtgccttcccccttgtggaaagagcaaaaagggcggggaaagaacagcgtattacttgtaaaaactgacccgcaccgacagaaactgccgccccactttccttgacagtcgaaatcaaaccccgtacaatgagagtggccgcgggcgaccagccgcggcccggcaggggaaaacaggcctcagttgcaacgaaggaggataaccatatggcaaagcatattcccggagctttcaggcgcgtgctggcgcttgccaccagcgtgctgctcatcgcggcgcagctggtgctgcccgtggccgctctggcgcaggatatcagcatgctgcccaccgtaacgctgcagtggatagcacctgcggacggaagcgtgcagagcaccaccgtgatggcgagcctctatggcgagcaggtggtctattgggccaccgtgccagaagaggcgctacagaccggcgtgaccatcgccgccatcaccggggcggaggacccctcaatggtgacctatgcgcccgccgccggcacgcccgtgaacggcaattccacggcggtggacggcattccggccgtcaatattgaggtatggcgcaacggcgcatttgagatcgcctatccgctgtacctgtccgtgattcccatgccgccgtatcagccggcggggcccaccagcggtacggtgcatatctcctacagctttgcgggcgccgaggtttacggctttgacgagacggtgccggcggaggggcgcagcttcgccccggacgcatcgctggtaccggccggctacgagcttgtcagcacggacgaagtgcttgtgacgctcaatcccgacggcaccaccagccccaatcccgtggtctttgaggtgcagcagagcgcgccgcaggtcgtcaactcgacggtgacgttccatcatctcgacgaagtgaccggccaacagatcaccggcgacacctgggaggatctggcccccgaaacctacagcgcttccacctatcagcaggcggtggagggatacacctattcatacggcagccccgacccctttaccgtggacggcatgggcacgcccgtcgaggtgacgctgtactatacgcagaatgccccggagccggtgaactcgacggtgacggtccatcatgtggacgcgcagaccagtcagccgatcaccggcgacaccacggcggaagccgacgcaaacatggagacctattcctccgtctaccagcagacggtggaggactacacctactcctatgccgacccggagagctttacgccggacggcatgggcacgcccgtcgaggtgacgctgtactatacgcagaatgcgccggagcaggtcaactcgacggtgacggtccatcatgtggacgcgcagaccagtcagccgatcaccggcgacaccacggcggaagccgacgcaaacatggagacctattcctccgtctaccagcagacggtggaggactacacctactcctatgccgacccggagagctttacgccggacggcatgggcacgcccgtcgaggtgacgctgtactatacgcagaatgcgccggagcaggtcaactcgacggttacgatccatcacagggacgccgccgacacgggcgtttcccttgccgacgacaccacgcagagcctcccggcgggaccgtatgattcgacggcgtacgccatcggcatcgacggctataccttccagagcgcggaccccgtgagctttaacgtagacggggcgggcacgcctgtggaagtgacgctgtactacgcgcagaacgcgccggagccggtcaactcgacggtgacgttccatcacaaggacgccgccaccgatcaggagctgaccagcacgcagcaggagcttgcgcccaacacctacgcctccgcggactacaagacggagatcgagggttatacctacgcctcggccgctcaggagagctttacggtggacggcacgggcgcgcctgttgacgtaacgctgtattacaatcagaatgcccccaccgagcccgtcgtgctggaggagtacaccaaccagtacggcatcaccaccaagggcagcctgaacctgcgctccagcccgaccaccaaggacaacaacaaggtggttcagggtgtgaacaaggatgtcgtcatgcccacgacccagcgggtccagagccttgacaacgacggctacagctggtatcgggtcaactacaacggaacggactgctacgtgcgggacgactgcttccgcctgctcaccgaggaggagatgcagcagtacctgaacgtggaggtacccgtcaaatacgtggatcaggccaccggcgaggcgttctacaccaccaccgcccagtgcatgaagggcggcagcgtgaccgtcgaggtggacctgaatcaggcgcagggctacacgcttgtgagcgaggccagcgtgcaggtatccgcggatgccaacggcacgctgaccccggcggaggttgtgttcaccttcgccaaggagcagcaggcggtgaagggcactgtcagcgccatctatgtggacgaggcgcaaaagcccgtggcggagccgcagacatttgaacgcgaccccggcaactactccgtcaacgaatttgccatcaacacgcccgaaggctatgagcccctgcaggtcaacgtgcaggaggtcatcgtgcatgatgacggcaccgtggagccggaaacggtcgtctttacctacgcggtgaagcagacggagccggtgaattccgtcgtcaccttccaccatctgtgcgacggcgcggccatcaccggcgacacgcagcaggagctggcccccaacacctataacgcggctgattatcaggcggcggtggagggctacacctacgcgggcgcgagccccgagaccttcaccgtggacggcagcggcgcggccattgaggtgacgctgaactatacgaagatcgtgcagcagcttgactcggtggtgaccttccatcatctgtgcgacggcgcggccatcaccggcgacacgcagcagacgcttgcacccaacacctataacgcatccgattatcaggcggcggtggagggctacacctacgcgggcgcgagccccgagaccttcaccgtggacggcagcggcgcggccattgaggtgacgctgaactatacgaaggttgtgcagcagcttgactcggtggtgaccttccaccatctgtgcgacggcgcggccatcaccggcgacacgcagcagacgcttgcgcccaacacctacggttccgccagctatcaggcgacggtggagggctacacctacgcgggagcaaacccggagaccttcaccgtggacggcagcggcgcgcccattgaggtgacgctgacctataccaaaaacgcgccgcaggtggtcaactccatcgtaacgttccaccatgtggacgcaaacggcacgcccattgccgccgatacccagcaggagcttgcgcccaacacctacagcgcttccggctatcaggtggcggtgccgggctacacctacaccagcgccaatcccgaatccttcaccgtggacggcaagggaacgccggttgaggtgacgctcacctataccaaagacctcgtcgcttcgaaggttacgttccatcatgtggacgcggacggcaatcccctgatggcggaccgcaccgtggagatcgcgccttcggctgaggcctaccgctccgaaagctatgccgcggctgcgccggagggctacctctacgccagcgccaacccggagaccttcaccgtggacggcagcggcacgcccatcaccgtggtgtttacctacgcgcaaaagcccgctgtgaccgcccccgtcacctttgaatacgtgtccgagagcggccgcgtggtcgataaccccatgacggtggacctgcccgtgggccccaacgatgtgatggaatactgcaaggtggtggagggctacacctttaagtccgtcagcagccagaccgtcgaggtcagcgcggacggcgtggccacgcctgccaaggtcaccttcacctacaccgagaatcccaccaccgcgaccgttcaggtccactaccgcaacagcatcggcgacgacctgcccggctcgccggtcatcaagcagcttggccccggaacgtataccattcagcctgaaaacgtgccggccggctatatcgtcagcagcagcgcgcagccccagaccgtcaccgtaacaaacgatctggtggccacgcccaacagcatcagctttacctgctatgatgccaacatcaccggcacgctgaccatcaactactacgacgccgccgacctcagcaagcccatcgccaccgagcagcgcccgctcaagcccggcctgcagaccgtggcggcggacgactcggtcgtggccaaggcgggcaactaccagcgcaccgagggctacgccgaccagcaggtgcaggtcaacgaggacggcaccgtggtgcccgcaacgatttccttctactacaagtccgtgcagaacaccagctacgtgggctacgccgtgactacccgccagacggccatgcgcgccagcgccgccgccaacggcgccgtgacgcagacgctgactgtgaacaccctgctgtatatcaacggccagcagcaggtgagcggcgttacctgggacagctctcagaccgtgctgggcggcacctcggcctccggctgggtgaccgacgccgatgtgcgccacatcagcgcctccgaggcgcaggccctcatcgaccagtacaaccagcagcagcaacagcccacgcagagccccggctactatatcaccctgtacaacagcgtgccgctgcgcacctataccaacatctacgccgaggcccgctacctcaagaaggataccgtggtgtacgtgcacagccaggagtacgacggcagccgcaacatctggcacctgaccacctatgacggcgtgaccggctatgtgctcaacggccagctgcgcaagctgaccgacgaggaagagaagaactacctcgtcagcggcaatccctccacgccggagaatccgggcggaaatccctacaaccccaacggcgcgtccagctacggctatatcaccgccaacagcgtcaatttccgcaccgcgcccaacggcagccgcatcaagcagctcaacaagtacgccatggccatgattctgggcacccggcaggtcaacggcgtcacctggtacaatgtcaactacaacggccagatcggctggattcacggcgactacttccatcagatgacgctgaccgagttcaactccttcctcagcagctcgcagtaccaacagggcctggccaacaacgccgtggccacggccacgcccaagcccagcaccggcgggagcacgtcgggcaatacgtccggcaacaagggctcggccacgcagggcagcgtatcctccgtggaggactggaacgtgggcacctggcagaacaccggcgcgaatacgcagaatacctacgcgcccttcaacccctacgccaccccggtggccaccaccacgcccaaggatcagtacatgaccaaggatgcgacggtgaagttctaccagtcgccggacgcggcctccagcagcctgacgctgccggccaacgccaccctcaatgtgctggaaaccgtgacgcagaacaacaagacgtggtacaaggtgcagtacaacggccagaccggctatgtggaggcggaggccgccctgacggaagtgaccgccagcgccagccccacgcccacgagcaccttcgtcatcggtaccatgattccgatcaactacgaggatgagaccatcgagacgcagacctccggcgtgccctggggcctgatcggcggggccgtggtcatcatcggcggcgcgggcggcgcctatgcctacgcgctcaaccagaacaagaagcgcaaggccgccgccgcgcgcgcggctgccagcaggcgcgccgccaccgcggccgggacgactgccgccggagcggcaggggctgccagcccctatgcccgccgcgcagctgccgcgcccatcgcgccgggaaccaagcagaacgacaccaattcgcagaataagccgaccggaggcgcgccctacggcggtgtgaagaatccctacagcagcggaagcattaccggcacgcagaatccctacagccgccccacggccggaccgggcacaagcgccacgacagccggtaaccagggccttcacggcggcgcgccgacgggcacggcccagaacccctatgccagaagcgcgcaggcggggacgggaaccggcgccgccacaatgacgggcacggcccagaacccctacgccagaggcgcgcaggcggggacgggaaccggtgccgccgcaatgacgggcacggcccagaacccctatgccgccaccggcacgcagagcgcttccgcatccgctaagccggcttcggcgcagaccaccggtacaggatccggcgcagcgaagccctacgcggcaggcgcggcctccaggattccctatgcggacggaacgatgcccacagcgggcggattcacgggttccacagacgcatcctccgcaagcggggcctccacggcttccgccggcggcagcgccatgaatccggcgtccggcagcccgatgtcgagcggcctgcacagcgcgggcagcctggagagcagaagcacgtcttcggcttccggtgaaagcgccgctcagactgccaatccctacgcgcgcccgctgggcacggcacccgcttcccagtcttccacgcaggaaagccagggcgcggaaagcgccacccgcaggcggtctacccgcatgcagcgctaccatgcggcaggtggggatgacgagggcagcgatacctgatttctactcacaggggccgcgcggcgaacgccgcgcggccctgcgcgcctcaggataccaaagaaggaggaaacgacatggcagtttacgggacctttgcttccgccacgggtcagacgctggaaagggtgctctggcccatcgaaggaacgcccaggggcgtggtacagctggtgcatggcatggcggagcacatcagccgctatgacgcggcggcgcaggcgctcaacgcggcgggctacgcggtggtggggcatacccatccggggcatggcgaaaaggcgccgctgctggggtactgggaaaacggatgggatgcgctcatcgaggatgtacatgccctgcggctggaaacccagaaggaatacgcaggcgcaccctattttctgctgggacattccatgggcagcttcgttgtgcgcggatattgcctcaagcatgaaaagggcctggcgggcgtggtgctcagcggtacgggtcacttcaccagacccgtggtgacgctggcaaaagccatcgcgagcctgcaatgcgccctgggcggcgaaagaaagccaagccgtctggtggaaaagctcagttcctccggctacaaccggggatatgacgacgttaagaccccctttgactggctcagccgggatcgggagcaggtggcgcggtacatcgcggacccgtactgcggcttcaccttcacggcgggggcgtaccgcgacatgttcgacggcctgagccgcctctacccgcagaagctgggcgcgatggagaaggatgtgcccgtatacctgttttccggcgatatggaccccgtgggtggtcatggggaaggcgtgaagcgggtggcgcaggagctgcgcgacgcgggcgtgcgggatgtgacgctgcgcctgtatcccggcgggcggcacgagatgttcaacgaaaccaaccgcgacgaggtatatgcggacctgatcggctggctgaatgaaaaagccgtcaaagacaataggtgttaaaatttgatttcttaattgttaaattctccgggatgtgttacaatatgcgcatcccggggttttttatgccccaaatggctggaggttggtcgcttgtgacggagaacgccctcagggaaaggctttcccaggtaaagtgctttatgctggacatggacggtaccttctatctgggcgaccgcctgctggacgggtcgctggattttctggatgcgctggagcgtacgggccgtcgcgttttgtttgtaaccaacaattccagcaaatcggcggaccggtatgtggaaaagctcaggggcatgggcgtgagagagccgtttttgaacgtgctcacttcgggccaggcggcggggcactactgtttgcgcacctatccggggcagaaggccttccttctgggaaatgaactcctgcgcgccgaattggagcggatggggctggtcatcgacaacgagcatcccgactatgtgctcatcggctacgataccacccttgattacgaaaaaatgacaaaagtgtgcgacctggtgcgtgcggggctgccctatgtggccacgcacccggatttcaactgccccaccgagacgggcttcgcgccggatatcggggccattatcgcttttatcgaggccagcgcggggcgaaggccggatgtgattctgggaaagccctacgccggaatcgtggaggaggcgctgaagctaaccggcctgacgaaacaagagctcgccatggtgggcgaccgcctctataccgacatcgccaccgggctgaacttcggcatcctgagcattctggtgctgaccggggaggccagcgaggcggacgtcgccgccacgggcgtacagcccgatctgatctttgagcgcctgagcgccatgaacccctatttggaacccggaaaggatacaaaaagatgaaacgaattgctgcctgtctgtcggccctgttgcttgcgctgcttgtggttgcagaggttgcggcctcgcttgccgaggcgcaggtgaccattacgctcagcacgggggagacgattgcccctgtacaatccggaagcgccgaaaccgtggcgcccacggtggccctgacggtggcgcccaccgccgctgcgacggatacgcccgcgcctaccggcacgcctgcgccgactccgtcgccgaccgcggcgccgcccacgctcaaatatggcgatcagggcgaagcggtgagcgagcttcagagccggctgagcgaactgggctattatgtgggccgcatcagcggcaattttctggagggcacgcagaacggcgtcaaacgttttcaggaggactacggcctggaagtgaccggcgagctggaccccgaaagcgccgaactgcttaagaaagccgagtaccgttccctgcgctacggcgacgacggcgatgacgtcaagcgcctgcagacggtgctgcgcgagctgggctatctggacgccaattccaccggcaaataccgcgcggccacgcaggaagccgtagcggattttcagcaggccatgggcgtggaggcgaccggcgaggcggatctggagacgcagcgcctgctctttggcgatacggctctggccaagggcgcgcagcccacgcccacaccggacccgaacgcggatctcggcgatatcaacgacgtggtcatggtcgaggacggcgccagcacacccgacagcctgggcaccaacgaatacggcggccataagctgcaacgcggcgaccagggcgaggaggtcaagcaggtgcagacccgcctgacggagctgggcttcttcaccggccccatcagcggcaactatatgaatcagaccattgcggccatcaaggcgtttcaggagcacaacggcatgttcgtcacgggggatacggacgaggaaacctggaacatgctctttaacagcagcgacgtgctggacatcagcgctaccgcccggcccacgcccgtgcccacgcccgtgccctacgccatcaccgtggacgtgcgcaaccaagtgaccaccgtctatggcctggacgaaaacggagaatacaccgtgcccgtcaagcagatggtgtgctccacgggaatgaaagccacgcccagcgacgtgggcgaatgggtcctcaacggccgcaaggcgcgctggtgctatttccccacctggggcagccatgcgcagtactggacccgcatcaatgaaaacattgccttccacagcgtgatctataacaccgtggacctgaataacatgagtacgaagagctaccggctgctgggctcgcgcgcctcgcacgggtgcatccgccttctggtgagcgacgccaagtggatttacgacaacgtgggcgagggcgtggtggttaccgtcaccgaggatctgcccgacgatgaggagctgcgcaaggccgtggctgccccgccgctcaactccagcaagacgggccccgtcaccacccctgaacccacgcccgcgccggtttatgtatccggcgcaatgccgccccagccctttgaaaagctcaagaagggcgaggagagcgaggccgtgtactggctccagtgccgcctcaaggagctgggctactacaccggcaccatcaccggcggctactacagcggcacccagaaagccgtgaaggcgttccagaaggccaacggcatctatgccaccggcaccgccgacgtggagaccctcgaagccatctatgccgacgtgatggacccgcaggccacaccgcccgtcacgcccacgccggagcccaccccggagcccaccccggagcctaccccggagcctaccccggagcctacccccgagatcacgccggaacccacggtggagcccacgccggaacctatcccggagcctacgcctgcgatcaccccgga

SEQ ID NO: 200 - DNA, 7022 bp, Unknown
  16S sequences of unknown bacteria
ctccgcccgccgaaaccgccccccgctgggggacggtttggcctgcggcccgccctgcccctatccagggcctgtccctctgcgggctcgctccgctcgcccccctgccgccctcctcaggtcaccgaggaaagccgcagactgccgtcctcattggcatagaaggcgaaaagatacccctggcagttctgggtgttcaggtggtcgctgtaaatctcggccttcaccagcgtcctgccgctgccgtcctggtagctgggccatagcagcaggtggggcatgctgcgggccgcccggcccggcaaaatgtacccctcggcaccaagatagctctcatccggggcaaagccggtcagccccatatacttttgggcggcaaccgccacttcctcagcggcaaaggcggtcttgccctcattttcggcatacagcatagtcagggcaaagtcggtggcagtggcgcggtccagccaaaagctgccgttaaatcgcatgccaccctccgcctgcaggaacaataaggccatttcacaggcggggtcatccctgtcctcgctgtaattataggcaatcttttccatcggctcgtagtagcaaatcaccggggtctcctggccctgctcctgctgcacgatgaggagataatcctcctcccccttggcaaaaacgccaaaggcgttttctaccgccatgtgcacccggtaccggccacagccgtcatattcctccagcgtttcggttatttcggcggtgggaatactcatgccgcgccagttctggtaggtttccggggcctcgcccgcgcacgccgcgatggtctcgatgttattttctaccaaggccgccacaaatttttcggcgatggcacgggtttcctcggcggcggctgtggtcaggtcggcttccgccgcagggatgcccacttcggccaggcgccagccttcggctgtcttttgggcggtgcgggtaaggggcagcatttcgccggtgtgcaggttttgcatcgtcacggtgaaggtcagattttcggcagtttcttcggtgatggttacactttcggcatcgtaatcccagtaatagcggctgaaaaccggccggctgcttttatacaggcggccctcccgctccacaaaacgcgggcggccgagggtatccgcattttgcaggagggcggacacacacgcgggcgtgtaggttttttctaccagttgctgtaaatcggcgagggtggcatagccacccgcagggtccacggggaggtactcatcctcggtgagttcgccctgctccggcaggccatcgcagtaccaaaggtagccgacgatataatccctggtgagcagctcctgcagctcctgcagggtggtgaggggctgctggggctggggagaaggctgcccgccgcaggcggagagggccagcagcaaggccagcagcagggcgaaaagggaaaatctgcgtttcattttgggactcctttcgggggattctgggaatattataccacagtttggggcggcggtgtgaacaaaccgtaaaacctggcggagaaaagtccctccactaatacggcaaaaacgacccttttttgcatatgaggggttaataattcactttttttcacgaaaagtttacgaatgagggaaaatatgggtgtagttcaactaaatgctgggctatatttacagcaaaataacaggaaaaaggagcccccgaaggggctcccaaaatgagggggatggcttattttttgcgggtgaggacggccatgccgagtgcggagacggccatgagggccacggccgcggcgacgacatcattggcgccggtggaggggttcttctgatcgtcggtcttgggggtgtcctcggtgcggtcggggatgatgacgatgctgccgctagaggggcgcacggtgccgggcaggtttgcccaatcttcggcattcagcgtgaattccatagtgcccatttcgttgtcatccacaaacagcacgactttattggggacaacatcatctttgggagtccagggggtcagtgcccagtactcgtcagcagtctgggtagcgatgcagcaggtcaggaaaccatagctgccgggatttactccccgcaaggtggcagtggtcagcagggtctcgccgctgtacagctccacccgtacgctggactcaaagttaacattcttcagatcaacagacacagcgtttttcaggattccgttatcatgagtaatgacagcgcgctcgatgctgccgctataggggaacgcagtgccgggcagggctgcccactcatcggcatcaagcgtgaaggtcttcgtaccctcttcgtgtccatcgacaaacaggacagctttgttgggaacaatattatctttgggagtccagggggtcagtgaccagtacttgtcagcagtctgggtagcgatgcagcaggtcaggaaaccatagctgccgggagctactccctgcaaggtggcagtggtcagcagggtcgcatcactgtacagctgcacctgtacgctggactcaaagttaacattcttcagatcaacagacacagcgtttttcaagtagccgccagcatgagtgatggcggcgcgctcgatgctaccgcttgcttcagccgccagcgcagtgattggcagcatgacggccagcattaaaactgccagcgcaaggcttaaaaactttttcattgtataacctctccttttctcttgcctcgcaggtggattcgtgtttgcagacaaacacgaatccacccgtggcgattattttggtaagttaaggttattccattttaaggcaaatgtcaagtatttaatgggaaattaaagtaacttttctaatttaatgggaaattgaagtaaattttttaataatggaacttgatggtagggatattcgacaaaaatcccccggacagtgccgggggatgggggttatacttcctggatgatggggaggatgaccggcttgcggcgggtgcggctggcgatgaaatcgcccagctcatcccggatgcggcccttgatggtggcccaatcgcggaagccgttcagcttgcacttttccagggaattgcgcaccaccacggtggcatcggccatcaggtcctcgttatcccgtacatacacaaagccgcgggagacgagatccgggccggccagtacttcgccggtggcgtcattgatggcgcagaccaccacgatgaggccgtcatcggccagcagcttgcggtcccgcagcaccacgctgcccacatcgccgacgccaagaccatccaccagcacgcggccgctgggcaccatgccggtaatcttcatatccacgccatcggtttccactaccttgccgatatcactgatgatgatatgctcggcggggatgcccatgctggcgccaacgccggcatttttcatcaggtgcttgtattcaccgtgcatcggcataaagaaccggggctgggtgagggagagcagcaggcgggtctcatcctggcaggcgtggccggagacatgcacatcgtacatccgctcgtagatgacatcggcgcccagcttcatcagctcgtttaccaccttgcccacgcttttttcattgccggggatgggggtggcggagatgatgatgcagtcattggggccgatcttgatattgcggtggctgccgatgctcatgcgggtcagggcgctcatgggctcgccctggctgccggtggtgatgaggacgatctcctcatcggtgtagtccttcaggttatcggcatcgatgaggacgccggcgggaatggtgaggtagcccagctcctgcgcgatggccacgacattgaccatgctgcggccgaataccgctaccttgcgcccgaaccggacggcggtatccaccacctgctggatgcggtgcacattgctggcgaaggtggcgatgatgatgcgcttattggctgcacgctcaaagagcttttcaaagctctcgcccacgatgcgctcgctgggggtggagccgggtttttcggcattggtgctatcgctgaggagggccagaacgccctcgctgcccagttcgccaaagcggaccaggtcgatgggctcgccggagatgggggtgaagtccaccttgaaatcgccggtgtggacgatgagccccgccggggtacggatggcaaaggcacaggcatcgggtatggaatggttgacacggacgaactcgacgctcatggtggtgccggccgggatggtatcaccgggcttgacggtattcagcttgcactgattgaggatgccgtgctccttgagcttgccgctgatgagcccgatggtaagggcggtggcgtacaccggggccttgatctgcttgagcaggaagggcagggagccgatgtggtcctcgtgcccgtgggtgatgaagatgccgcggaccttggccgcgtttttctccaaataggtgaaatccgggatgaccagatcgacaccgggcaggtcgtcatccgggaaggcggagccgcaatccacaacaaggatatcctgctcggtctcaaagacagtcaggttcttgccgatctcgcccaggccgcccagggaaatgatcttgagcggggggcggcgggtgccatcggcctttttgccgcggcgggcgctgcggttgggctgctgcgcggcagcggcaggctttttgctgccgcccttggcagcgggctgctttttggcaggctcgcttttggcgggcttgttctgcgccgcgggctgggtctgctttttgggctcattcttcgcggcggccttgggctgctgcttgggcttgccctccgccttgcccttggcggaagaagccttctgctccttttgggcagcgggcttctgttcctcggcgggcttggacttgccggtttggccgccctggcccttttggccgttcttggccttggcctgcgctggcttctgctggggagccttgggctggccgggctttttggccgcggattttacgggccgttctcctgcggagacggtccctgcggcggcttcctcgctgcgcatcacccgttcgatctccgccgcgatctcggcggcggttttggtgctgcggctcttgcggaaatactgcccaaagaccccgtccttctttttacggggtgcttcggcagaagccggtacattattctttttttcagtcactcgtgtacctccaattcaaatttgggttctgtttttattttttggttaatgtatgatgtaagaccgcccattccgttccgacgatcttgtgtcctaattcacgacaaaatattgcatcttgcacaaatattttggttctgtttttattatactgcataaatgtggttctgtcaagggggctggttcggccgcaggccgcccgccgaaggcgggccagcgggcaaagcctgctgaaatcgtccgaaaggacgatttggcctgcggccgaatgtgccccccgcgccgaccggcaaaagaggcagggcacatacctgcctgtgttgtaatcccggcccaagtgagctataatattttatatagattatggcacagaaacggagaacaacaccatgacagaaaaaaaagaggtgcagctttttaccgatggcgcctgttccggcaatcccggtcccggcggctggggggcgatcctgcggtacaaggggcaggaaaaggagctttccggcggggagccgatgaccaccaacaaccgcatggagctgctggccgccatagaggggctgagcgccctgaagcagccctgccgcgttacgctgaccagcgacagcaagtacctggtggatgccgtaacgaagggctgggtgtacggctggcagaaaaaaggctggagaaaaagcgacaacagccccgccctgaatgtggacctgtgggaaaggctgctgccgctgctaaagtatcatgaggtggaatttgtgtgggtgaaggggcacgccggccacccggaaaatgagcgctgcgaccgcctggcggtggcgtggtaccagaattatcaggcggggtgtgccgccaaaatgtcggaataagcctgcgtcatggcccggaagccgtcgctgccgcccgctaactgcacccggcaggcgggtacaaactgcggcaggacaagctcccggaagatccaaatctgcccgtctgcggtcaagccgaggtacagcatcggtgcatcggtatctgcccagtccagccggtacagcacccggaacttggtgccgctgccggtaagggtaaaggcattgatatgcggagtcagctcggtcttttccagcactgcccaaaattcctcggcggcggcgtcctttatcgtggtggcaaatgtccagcctgccgccatggcggaaaaatcacggctgccctcttccgcctcggcaaaggtcgtattgcccttgcgcttgacgctgatgcactttgttttatcgctttgcgggacgatctgcccgatggcggcggaaacggtgggattttccggcgaaacgcgcgccgtgcgggagaccacatcaaggcacagcagcgaaaccagtaaaatcaccagtatggtaaggcgcccctgctttaccttttgggcggagaaccgcccttttttcacattgagccaaatgtaaagattgatgccgattgccgcaagggtgacgaggacgagggcgaccgcccatccgaccctgccatacagcagcatttcccaggtaaggtatgccgttagcaatacctgaaggacaagattgaaaatgtagtttgcggtgcttttgtagtttgtcaaactgttccctccccgttgtcattttgctgtattctgacagtattatagcataaattttatacaaatcgcaaggcgacatcccccacaaattgtaaaaatattgtgaagcctgccgatagcggctgcccttcactataataaacggtttttccgggcaaagtgcaacacatttcggaaaattttgtgcagggggcgggggacgggccgcaggccgtttcggctccgccgaaacacgcaggcgaagcct

SEQ ID NO: 201 - DNA, 11189 bp, Unknown
  16S sequences of unknown bacteria
acaatcccccctgcatggccctgccatgctgtcccccctttgcacaaggggggctgcggcgagccgccacggccaggcggtgctaccgcgctgggtcatgtaatcaagctgagtggatttgtctggccttacaatcccccctgaccgcctgtggcggtctgtcccccctttgcacaaggggggcttttctttgcccaggcaaacacaaccggcttggatgagtgaaaacccaaaaaacctccctttcgggaggttttttgtttaggtttggctgccatccctggcctttttttgcggtgaaatcacccagaatcacgctgataatgaaggccgccacccaggcgatgatcgcaaaggtgttggtcgtggggccgatgggcgctccccgaaaggcccggtcgatgatggggagaaaaaggatgaaataccctgcgtcccgtgtcgggacagccaaaactcgctgaaggctttatgcgttgttggcctgattgctccgggtgtgataaaccatcacccggtaggggccggggtgcaatcttcgcagcgtgccggtggcgagccgccacggccaggcggtgctgccgcgccaggcgatagaacgggggctggttgtgtcccccgcaggcaaagacggctcccttgtgcaaagggagctgtcggcgaacgccgactgagggattgagggcacccggctgacgataatcacacccggcggctggtatcatccaggcggctgactgccatcaatcccccttgcatggcgttgccatgctgtcccccctttgcacaaggggggcttttctttgcctttctgcgtacaaccggcccagcgcgggagcgcaatatgggagcggcggctcgccgctagaggttttcggtcatcatgcggtaaaccacattgaaggcctgctggaagatatccagatgcagcgtttcattgacgccgtggacatccagcataccggtggagataccgccgcactcaaagcccttgccggagaagatgttggaatctccgccgccgccggaaatcacatagtgaggctcgatgccctcggccttcagagctttcaggttcagctgatagaggaagctttccgggttgggcttggccgcgggataatcgtggctcagctccacctcggccttgccgccaaactcctctgctgcctgctggcaggccttctttatcagatccagctggtgctgcaatttctcctcgctgtgggagcgcacttcggcggtgaagaaggcagaatcggacaccacattggtcatgccgccgccttcgatccggcccacattggaggtggtctcctcatcaatgcggccgaacttcaccagggaaatggcccgggccgccatgcacacggcgttgatgccgttctgaggctcgatgcccgcatgggccgctttgccgtggaacacggcacggatgccgtacttggagggggaggaggtggaaacgccgcccacctgaccggcgccgtccagtgcgtacagattgcggcagggcaatttggaaatgtcaaagttcttggcgccgtgcattccctgctcctcgcagatggtgaagagatagtacatctcacgatggggaacatggttctccttgatcacatccagaagctccatgagcatggcaatgcccgacttgtcgtcggcgcccagcacggtgtcaccggcgctagtgagtttgccgtcctgatagacaggctcgatgccacggcccggctctacggtgtcctggtgggcgttgaagcagatggcctcgccctccatggtgccgggaatgtgcaccagcacattgccgccgtcggagccgaatttgctccccgcttcgtcccggtatacttcatagccccggtccttgaaatacttctccaggtaatcggtcatgggtttttcatggaaggacggactgtcgatgcggatcatctccatcagccggtccagcatacgcttttcgttgaactgcatgaatgataccttctctcattattataatgggtttccctggcctcagtatagcagttttcccctcccttttcaaggcggagtgccggtcccgtgtcgggacggccaaaactcgctgaaggctgtatgcgttgctatgctcctgtgctccgggtgtgataaaccatcacccggcaggggccaaggtgcagtccaggccgattgcagaacttaggcccgatcgatgcagtagggcaaagacgccccccttgtgcaaagggggggtggcggcttgcgccgccggggggattggcgacacttggctgacgataaccacacccgggcccagtgcctgggcagtcatattgcgctcccgcacccgatcatacagcctggctaaccggtgcgcccggcttcacaatcccccctgcatggctttgccatgctgtcccccctttacacaaggggggctttttctttgcctgggcggcaaacaaccgaccttggttctattgcccagcgcggcagcgcagtctggccgtcccgccacgggacttgcccagcgcgggagcgcagtctggccgtcccgacacgggaccggctcgccacgacaaattgtgcggcggacagggagtatactgggaaggaaaggaggctgggggatatggtggtctatctggacattctgtttttcctcaacttcggcatcaactacctcctgctgcgatgcgtggggcggctgggcggcaaagcctgctttgtgccccggctgctgctgggcgccgctttgggaggcgtcctctcggctgtgctgttttttgccccggcccagggcctgtggggccttttcatcaaagccctttgctgtctgctgctctgccttaccgcattcaatgtccgctcccctggggaagccctgcggctgagcctgctgcttctctccgtaaccatggccatgggcggcggcgtcatggccctgaccgccctctccggcagccagcggatctgggtgcggggcggcgttccctatgtgcacctgcccatgagcaccctgctgctttcctttggggcggcctatgtgctgctgtccctggccttttccgccagaaggggagagcggagagccgctccggcccgggtaaagatccgggtgggggaccggtgggcggaggtgcacgccctgcgggataccggcaaccttctgcgggaccccatgagccagaaacgggtgatggtggtggaaaaaagctgtcttgtcccgctgctttcctgggaagagcggcaggcgctggaaagcctgcggggggataacgggccggaggtctttgagcgcatccattcccgccgctttctgctgctgccataccaggcggtgggccagagcggcgcactgcttctggccatgaaaccggacaaaatgctggtggatggccgggaggaaaaagaagtgctcatcggtatcgccccggggcggatttccaccccccagggctgccaggcgattttgggatgataaaggaggaatactgcgtgaaactctctttgctgcgggccgctctttccttgaaggggcggaaacttttggaaaagctggggctttgtcagctgccgtccatctattacatcggctcttcccagagtctgcccccgcccctgaccccggaagaggagaaggaatacctggcccactacaccggcaaggagccggaaatccgccaggccctcatcgagcacaatctccgtctggtggtctacatcgcccggaagttcgaaaacaccggcatcggcatcgaggatctgatctccatcggcaccatcgggctgatcaagggggtgaacacctaccggggggacaagaacaccaagctggccacctatgcctcccggtgcatcgaaaacgagatcctgatggtgctgcgcaagcactccggggcccggtcggaggtgtccatcgacgagccgctgagcaccgattgggacggaaacgagctgctgctgtccgacattctgggcactgagcccgattgcgtcatgcgtccggtggaggacgacgccgaccgggaaatgctgcggcattccatcgaccggctgagcgagcgggaaaagaccattatttccatgcgctttggtctgggcggccgggacgagctgacccagaaggaggtggccgatctcctgggcatctcccaatcctatatctcccggctggaaaagaagatcatctcccgactaaaaaaggaaatgaccctctaggcagcgtgacgctggtggcgagccgccacggccatactgcgctcccgcgctgaatcatacagccaggcaaaatgatgcaatcggcttcgcaatccccccttgcatggcgttgccatgctgtccccccctttgcacaaggggggcttttctttggcccagtgcctgggcggtcatactctctttgcctttcttcatacaaccagccttttctgatgcacccggccaggattgcgccttggcccctaccggggttggcttgccagcaccggagcacccaggccaacaacgcatccccaccggagacaggaacggttgcggcgccacgccgcctggtatgagatcttccttttcaggcaatactgtctgtaacaaaaaaagggaggaacaggaatgcagggaaaagtggagatctgcggcgtcaacacatccaaactgcccactctgacgggaaaagaaacccgggagcttctggagcaggccaggggcggagacaagcaggcccgggaaaaactcatcgccgggaatctgcggctggtgctttcggtggtgcagcgtttcggcagcagaggggaagcggccgacgatctgttccaggtgggatgcgtggggctgatcaagtccatcgaccattttgatctcagcctgaatgtgcggttttccacctatgccgtgcccatgatcatcggcgagatccgccggtatctccgggacaacagcccggtgcgggtgagccgctccctgcgggacaatgcctacaaggcccttaccgcccgggaggccttcaccaaggaacaccagcgggagcctaccgtggaggagatcgctcaggccatcggcatgaagcgggaagaggtggtctttgccctggacgccatctccgaccccatttccctttatgagccggtgtaccaggacggaggcgatgccatctgcgtgatggaccaggtgcgggatacgaaaaacaccgacgacagctggatcgagcagatcgccatgaagcaggccatgagcggcctgagcgatcgggagaagcggattctggccctgcggttttacgatggccgtacccagatggaagtggccagggagatcggcatctcccaggcccaggtctcccgcctggaaaagggcgtcatcgaaaagatcaaaaaacaactctagtcccgtggcgggacggccagaactcgctgaaggctttatgcgctgttatgctcctgtgctccggtgctggcgagccagcgccgggaggggccggggcccagtgcctgggctcccatactgtgctcccgcacccggcaggttctatgaagaaggcaaagaaagatatggccgtccggccaccggacctcccttgtgcaaagggagctgtcggcgaacgccgactgagggattgagggcacctggctgaccatgcccacacccggaacctggtatcgtccaggcagctgagtgctgtcaatccccccttgcatggcgttgccatgctgtcccccctttgcacaaggggggctgcagcgtgacgctggacccatactttctttgctgcccaggaaacaaccagctaagttctgtttcccagcgcggcagcgcagtatgactgcccaggcactgggcctgtccggccaccggacctggctcagaagggccacagggtctcgccgccttcgtaggggtccggttcagaagttgcataggccccatactgccgctcctgccgctgccaccgctcccagctttctgcattccgcagagccgctttccagtcctgcataggggtgctgcccaccatccagcccttggcctggtagaaatccagaaacccctgggggtctaccggagaattccgctccaaaacataatcccgcacctctgagagggtgggtgggtgaaagcgccggggcgcaaacccttctgctccggctccttcttctgtttcttctgctttttctgcttctgtttctgtttctgtttctttttcttcttctgtattggcatacccttccccggaccctttatggatgcgtgcagagaccgccttttgcagcagggaatagggcttttccatctgacgcagaagatcggccagaagggaaaacagcgggctttggggcaggtcctggaaaatggtgcaggcttttttctgcacattcacattgtccagcgggtttgtccggagaaaatcggtgagcagtaccatttcttcctcctggtcataggccagcagcccggcttcctccagctcccggaacccttcctctacccgctggggctccattcccagatcggcacagcagtatgcctggggcagggaatacaggcccagcatattccggtggggacagctgaacaggtacaggtacaaaagacggcccgtctcgctcagccctttctgcttcatctgccgccatagaccttggtcgatcttagtatacatattcttttccgtcctttccctcttttttcttgcccccatcgtaccacacctttcccggtctttttcgtgcccagtgcctgggctgtcatactgcgctcccgcgctgggcaatagcacccagagttggttgtgtcaatcaaggcaaagagagtatgcctgcggaggcactccgcttgacaaatgggggagggtggagtatacttcctatgacaagtggacaggggtgctggttttcatgccggctgagagacggaaagaccgtcaaccctcaaacctgatctgggtaatgccagcgtaggaagagatcatcatgggctttgttctgctgccgggtatggcagcggcatcacgccgcctttcatcgcgggcattgttcccgcgattttttgttgccttcgggcagggaaaggatgggtacgatgcagaaaaacaacacaagaagactgaccgaaagcgccattatggtggccctggccgccgtgctggccatggtaaaggtgtgggagatgcccttgggcggctcggtgaccgccgcttgtatggcccccatcatcttcatcgccttgcgctatggggccaaatggggcttgctcaccggattggtctttgccgtcattcagatgatcgagggcttctgggccccgccggttcgcacgctgctgtggttctttctggtggtgatgctggactatgtgctgcccttcggcctgctgggtctggcgcccctggtggcccgtcggttcaaaaatgccgtggtgggcgcaggcgtggctacggtggtggtgtgcgtcatccggtttctgtgccacttcctctcgggcatcatcatctggcacaccggcgatcccgctgtgcccgattgggtctggtctctgacctataacggcacctttatgatccccgaaaccatcatcaacgccctggccgtggccgcgttggtgaagtttgtgaaactgccaaaagccaacggataacgcttcacaatcccccctgactgcctttggcagtctgtcccccctttgcacaaggggggcttttctttgccctttttcatacaaccggcttttctgcggcaatggcctgggactgcatcccggcccctgccggcagagccggagcaccgagggatggcagcgcataaagccttcagcgagttttgggtgcagcgtcacgctggtccggtggccggacggccatatcttctttgctcagcggcacacaaccggccctggttcagtggattggataaacgcaggctgaaacagaaaaaacctccctgatgggaggtttttttgttatgtaatcaacttcgttctgttgcccagcgcggcagcgcagtatgggtgcagcgtcacgctgcctagtcgccgcttttgacagtgagggtgggctcatcggaagcggggaggggagagcggcccatgaccagcttgagcaatacgggggtaatcagggtggtgacaatcaccatggccaccaccgccgggaagagggaggcgtccaccagcccggcctgctcgcccttctgtgccacaatcagggccacctcgccacgggagatcatgcccacgcccaccgccagggcgtcatgggtggagaacttgcacagcttggctcccaggccgcagccgatcaccttggtggcaatggccgtgagggtcagggccacagcaaaggcgaaaagggaaaaagtgaagccatggagatcggtctcgatgcccacgctggcgaaaaacaccggggaaaagagcatataagaggcgatgttgatcttccgggcgatgtagggctgggcctcggcgatgttgcacaggatcagtccggcaaaataagcgccggtgatgtcggcaatgccgaagaagtgctcggccacataggacagaagcaggcagaacaccaggccgtaaatggcgatgcgccggtggttgtaataggccttgcccagcttctggaacagccggtagaccacaaagcccaccagagccagcagcacgaaaaagcccacgatccggcccaccaccatcaggggtttcaccgagggatcggtgaagctggtgagaatggtgagcactacaatgcccagaatgtcgtcgatgacggcagcgcccaggatggcggtgcctaccttgccacgcaagcggcccagctcacgcagggtctccacggtgatggacaccgaagtggccgccagcacaacgcccacaaacaccgcccggagcatggcgtcgccggtggcctgggggaagaacagcttatagcacagcgagccgccgatgaggggcaccaccacgccgcaggcggcgatgaacagggaggtaagcccggtttttttcagctccttcaggtcggtatccagaccggccaggaacatgaggaagatcacgcccagctcggaggtcttgagcaaaaagtcggtttccaccaccatattcaggcaggtgggccccagcagaagccccgccagaagggcgcctaccaccgagggcagctgcacccgctgggagatcaggccgaacaccttggtggacagcagaatgatggccagtgaaagcaaaaaacgataatccatgggaaccatcccttcatcaatatattgaattgaaaaaaagcaagcatgagtatctcatatttttccttccggcgcaagtgcagattgcacaaaattccggcgatgaagggaaaaatgttaggatggagggcaaaaaggggtcgatgcagggcaaaaccgggccgaggactgtcaaaaagataacaaatcggcgcttattttctcgccatcgcccgaaaacagggcaaaggggagaggaaagcacacaaggcgtgcaaaaggtcggacaaagggcgcatccccatggacgaaaggcccctttgacaaggaaaggaagagggattacaattaaatcgtagcagcggcccagtgcctgggcggtcatactgcgctgccgcgctgggcaggttggttgaagaaaggcaaagagggcgcccttgtgtaaagggagctgtcggcgaacgccgactgagggattggcagcgtgacgctgcacccaggcggtgctgccgcacccgatcataaaaccaagcaacatgatgccaccagacctctcaatcccccctgaccacctgcggcggtctgtcccccctttacacaaagggggcttctttgcccaggcaaatacaaccggcaaagaaagtatgcctgggaggtattttgcctacaaattacgatttaatcgttatttttctgcaaaaccaaagccgcaggaaaacctgcggctctggagtgtatcgcaccggcctttctgtggctctctgccaggaatgcaccctggcccctaccgggtgatggtttatcacacccggagcagagaggctcgcaacgcatccccaccggagacaggaacggcagcggcggctcgccgctagcccgggggctgatccactaccgactgggtcaccacctgatgaatggagggggacagccgggtgaggatgccgggggcaaaatagcccggatgatgatctgagctgaaaacatcggggaagtcccgatggatggcgctgttcatatcgtttcacctcacagctattctgtgccgaaagcaggggaaaaaccctggaaaaacaatcccgatacaccacctgcatacaaagaaatggagggaaaaggaaaaatatgaaaaacatcacaatggatcagaaacgaatggatcatctccggcacatcaaccgggagatcatccagcagaaaaaccggctgcaaaagctgcgggccctccagcaggggagggtgcggcaggcgccggggctgccgtccctgtcgccccaggatgcccaggaacgctatgccgcccagctccgggagctggaggaaagcaccgcccggcatctggaaaaatgcctggaggaagctcaggcattgcaggagttcatccagggcgtggaggacagccagacccggcagctgctctccctgcgctatctggagtgcctcacctggcagcaggtggccttccgcatgggctattgcgacgagcagacccctcgcaagcagagccaggcctttttcaaaaggcagcagaaggaggtgaaggccggtgtcgcccagaagtaagcagccgccggaggagcaggcccggaagatcctggtggaggccagtcctctggcggccaggctcctgctggaggcgttgcaggaggaggacacccctcgctcggcccggctggattgcgccaaggaggtgctcaaccgggtttatggccgctcccagcagctgctcccgccccaggaggaacaccggctggaagtggtgctggaagaagaagcggaaaaagacgccaagtgagccagccagcgtgccgctggacccgttcctgtctccggcatcatgcgttgcccggctttctgctccgggtgtgataaaccatcacccggcaggggctttgatgcagtcctggcccagtgctgcagtcgttcctgtctttgccttggttcgttgtatgccgcagggcaaagaaaagccccccttgtgcaaaggggggacagcat

SEQ ID NO: 202 - DNA, 3523 bp, Unknown
  16S sequences of unknown bacteria
cccgcaggcaggacattgagatttattacagctttgtcggcaagattgacttgccagaataaccgcccgacctatccgacacagccctaagtgccggataggaacggcaaaattttttacacttctattacttctttatcgcacataagcaaaggcacaggaattattatgatttcatccgaaatgccagaattgctgggcgtttccgaccggattgttgttatgaaagcaggacatcttgtggcggagttttccaaaaattcggcgacacaggaggagattctcaaatgcgcaatgtaaaaaatatgttgctggcgaatccccgctcagagggccggtggcggacactgaccaataaattagggctgctcattgctgtaatggccctgatggcgtttttttggatacaaaacgcaaacttttgctctccgtataatctgaccaatatcggacggcaggcggttacactgggtttgctggcgttgggcgagacatatgttctggtcggaagcggcgtggatttgtcggtcggcggaatcatgaatttaaccagtgtgacagttgcactggtattgctggagaccaatagtctcgcagcggcaattttggctggactttttgtagggtttttgatgggtgcattgaacggatttattgtgtcctatctgaatgtgcaggcatttgctgcaacgttgggaagtacatccatagccagtggtgcggctttgcttttatgcaatggaaattctgttcgtggattgccggattctctgttggtgattgcaaacgaatcttttctcgggattcctaatcaaatctggatcttaattctcaccatcggaattctccatatattgcttcaatatactgcatttggacagtcttgctatgcagtgggcggaaacacacaggcaagcctgttgtccggaatctctgcaaagcgtgtgaggatggtaacgttcatcataagcggcttgtgtgcggctctttccgcaatcattgcaagctctcgcgttgggtctggcaatccggtgattggtggagatatgcagctccgggcaattgcggccacagttattggcggcgcatcgatgcgcggcggaatgggaagcgtaccaggaacggttatcggagtaatcttcatttctgttttatacagtgggatgaattttatgggaattaccagctatgtgcaggatgttttgattggatgcattattgttgcatctgcatggatcgatgttgcgcgcagaaagaaaaatggataatgggaggaggactatgaaaaaaccggaatatccatatagctatgagcagctgcaaagttcggtcattgataaattacgggaaatcgggcatcctgagcgcatcccaaattggggaatgatcggcggcggcgctgagagcggcggaacgtggcgaaggaattatgaaagctatcaggcaatcggattccggcaaagactgatccacgaagcgtatgacccggacttgtcctgcaaaatgctgggacgtccattggcaatgcccattgccgttgcaccaatggcagcggctgcctatttggcgcatgaagacccatttttggaaattgcaaaagcttgtcatcaatgcggcatcgcagcaggaatcggttttccctccggaaaagtacagggcagggatatgactgcaatctgcaaaaacagctttcgaattatcaaacctcatatgaatgaacagattttgtttgaggagctgcagcagagtcaggctgatggatgtatggcagtcggcatagatttggattcactggctggcttgaaaacaggggatgatgcggggcactttggagattttaccaaggcatacgacaaggaactgctgaaggaagtacgcaaaagcgtgagcgtcccttttatattaaaaggaattatgagtattcaggacgcagaagccgcgatggaaattggtgcggacgcacttgtagtttccacgcatgcagggtatgggcttgattgcggatacagtccgctggaagtgctctccgggatccggaatgtcgttggtcccagcatagagctgtatgtggattccggcatacgacgtggaacagacgtgctcaaagcaattgccatgggcgcgaattgtgttggatcgggcgcctgatgatttgggggcttctcttagatggagccaacggaattgcttggattattcatctgttggagcaagagatggtacggaccatgcggttgattggcgctgcctgctgtacagaattggaccaaacatgccttgtgcctctgaatgatatgggaagcaggatgctgcgcgtataattaaaatggagaggtgtatggaaaagtcaaaaaaatcccctgcacaggagatcttggataagattattgactatattattcaaaacaggctcaagcctggagataagcttccgacggaaaaggagctgacactgatcttatgtgcaagtcggagcctggttcgagaggtactcagcatccttgccaccatgcatatcattcgtgtggtgcaaggcagcggtatatacgttgaatcaccaaaaaacgcagtcatgcaggatttctatcagacctacatgcggttgggatacgcttcaatcgatgaaatgtttgagttttggattcggttggaggctgattctgctgcctttgcagctcgaagaatcaatcatcgcggtatatatgaactagaaacatgcatggaagcaagtaaaaatgccattttttctcagaaaaaattttttgaatcagacattgaattccatacaatcctctcttcgtattgcgaaaacaggctgtttgtaatgaatttgaggagtatttctcccattattacccattatagaagtattactacctactatctggatattcgaaagacggcatatgagtaccatcagagaatctgcgatgcagtgatccatcatgatgcggttttggcaagtatgtatatggaagaacatctgacggaagtaaagcgggcagcagatttttacgagctttttcaaaaatagggaggttgccttttgacaaagctgtgaaagatcaaaaacgcgcagaagtgcagagagaaattggcctgattggagctgtccgccgctacaacagatatagaaagaaggaacatatcatgacacatgaactctttaatttggaaggaaagcatgcatttgttactggtagcggaagtggaattggtttgggaatggcagaaggattgctggaagctggctgcacagttgtacttcatagccgtggggaaagcgcagttgctcaggcccagcggctttccgggatgggatatgcggcaaaagttgttacaggggatttgacagaagaatcctgggtaaagcagatttttacccaggcattagagaagctggatgggcgaattgatattttggttaactgcgcgggtgcgcagtatcgggctccggccatggattttccgcttgaaaagtttgatgaagtaatgaatgtcaacaaccgcagtgtgtttattc

SEQ ID NO: 203 - DNA, 32759 bp, Unknown
  16S sequences of unknown bacteria
agtaattattcttattttactattaaattttatagaaagagagaaatgaatgatgaaagatttaaaaggaaccaaaacagaagctaacctaatggcagcatttgccggagaaagccaagcaagaaacaaatatacatactatgcaagcaaagcaaaaaaagaaggctatgaacaaattgcagcactgttcttagaaacagcaaataatgaaaaagaacacgcaaaaatttggtttaaactgcttcatggcggagaaatgcctgatactatggcaaacctaaaagacgctgcggacggagaaaactatgaatggacagatatgtatgcaaaaatggctgtcgaagcaagagaagaaggctttgaccatattgcattcttatttgaaaaagttggtgaaattgaaaaacaccatgaagaaagatatcgcaagctattatctaacattgaagaaggcattgtattctcaagagacggggataccatttggcaatgcgcaaactgcggtcatattgtaattggtaaaaaagcacctgaggtttgtcctgtatgtgcacatcctcaatccttcttccaaattttagctgagaattattaagcctattttctgtatttacatataaaaggtagacttttgcaaaaacctccattggataaatatccaatggaggtttttctttgtttgtttttatatttcaataaaaagtccatacattataagaacagcagcaaactaattgccataactaccattccggaaattaaaccataaatggacaaatgatgttctccatattctctggcagcaggaagaagttcatcaaatgaaataaataccataatacctgcgactcctgcaaaaataacaccaaatacaacattattcataatcggcattaaaattagccaaccgattaacgcacctacaggttccgccaaacctgataaaaaagaatataaaaaggctttcatcttagagcccgttgcctgataaatgggaacagaaacagcaattccttccggtatattgtgaattgcaatggcaactacaatgggaattgcaacactgggttcctgcatagcagaaacaaatgtagccaatccttccggaaagttatgaatggcgattgcaagtgctgtaaaaacgcccatgcgcatcagtttggaatgttttggaggttttttattttcatcttccaccgattttagctcatgaggattttcttctgaagggattaatttatcaatgattgcaatgaccagcatacctccaaaaaaagaacctactgtaacccagttacctgctatttttccaagttcagatactagggaatcttgtgcttttacaaatatttctatcatcgaaacatatatcataacacctgcagaaaaaccaagactgatggataaaaattttctgttggtatgttttgcaaaaaatgcgatacagctgccgattccggtacttaatcctgcaattaacgtaagggcaaatgcgagaaaaacattgttcatatcgttttcctttctatagagttagcgtatgctaactcatatgtatagaatagcagtcctattcctttttgtcaagaaaaatgccagtctcacgaaccaattgatgagacaacatagagagaaaacaaattttcaacattttattgatacggttaaggcagcatatacatataaactgtatttttattttatcataactgaaattgatatttaatgtttgattccattcattttttacttaaacttcaaaaaaaagagatacagtttaccactgtatctcttttcattcatgcgatatcccatttcacttgaattatattgagttcccatttgatacgatacctcatatgacatatcatctgataaaaatgaattcaatttttatgtactatttaatgacatttgacagtgatattatgacatatgaaaggaagaaaactctgtcatggcgacacatcgatattaattatctgaatgaacataaaatgtaccaaattccctattctttaatcatttgttttctgttttttacatatcgcaatcaatcctcctgaaataataaaaccaaataaacataagtagcctattaaattactgccgtcctctgtttttggagaattgatatctgttgttccactctccttttgaacattagttgctgatattactttttcctctgatttttttatttcagacgtttctgaatttatattcgtttgtggtacagattgattttgatgaatctctttggtttgtctagccccatttttatctgtgtgacctgtattctctccaccattctccttatgaattacggtttcatctaacttagatgtctgtaaagaggaccaatctaattttaataaaactttttgtgttccatgtcccggtgcaattttttccatgattggcacaaacacttctaatgttacggaatcagctttatatgctacagggaattctacagtcttaggatattttgtgccgtctgatgttgtaccccatgctataatatccgaatcattttttaagtttccttcaaagtatgacactttgctgagtgctccttctgaagttccgagttttatcgtattcatattcattcttaatctgtatgttccatcctttgcaatcacagacaaaggttgttccagtccttgatttgccatagatagtttatctgggctattaaagttatatagagcccccttcaatgtatattcaccattttgcaagttgatttcattttttggaatgtccgtacccggctgttccattgggggtatgtcggttgacggttcttccggagttccagctggttttaacccttgcatgccctcttccaatttatcaattaattgctgaagctgagcatttgttaaagtgctccttttactccaatttgcctttccttcgtctatagcagtttttaatactgcatagcttttttctgtataatcttctgcctttttctcctctgctgctacaagtacacgtgtaaaatcatccacttttttaggcacaagataaatctcttttgcagattttaaatattttgctgcactgtcaactgtctcttcagttgcggttacatcttcaagtgccatcagagccttattataaagattcagaaaacttctagagccttcttctttatattctcctgccaaaacctcatcataagttgtcttattttcatcaattactttttttaattctgctttatcggcctgttttaaactttctccttcagccctctttgatgtagtatccaacactaacacagcgggcatttcactgacatcgggtccggccatttttgccccaagcagaacatctatcgttttttctccggatttctgtcttttaatggtaaataccttatcatactcgcctatgccggtactttcctctgccaaaacttctttgccattctctatatgctttactgttaaaatattggctgttattccttgaaatttgtcttttttaaaggatatctggtatacactttcaccctcgttttctattagaagaacatgaggattcataaatgcattggccatagatggagtctcactatcccccgcctgtcctattttggcatttattgtgaatctgttccccgcctgactctgttttaccactgcatttaaggcattttccagtttagactccaaagtctttactttacttttggtatttccgccccgctctgcctcttgtttgacatcagacagaacctgtcgtaactgggcaatactggtttgtgtatactcctgttcattcgcaatgattgtttctgcttgttccatcaaatgtttgtatcgagtccagtcagcgggtgcataagctaaagactccaaagcctctctcagttctgacactgcattataaattgtagtttgatctgctctgttatccttcagaacagacatggccttctcatatttttctaccaactttgccatagaagaagactcatattcatctccgtctttctgttcataaagactccttgcttcgtacacagcttttgctaactcggttttcgctgtcttttctcccgcatttggctcctgttctaattccgtaattaactctaatatcttattgtgaaaatccggcggtgtcgagtcagtaccacccataacaggcatttcacttggcagcggcatatttttaatttctgcgtatgttttcccaacatacttagtcagcccgccctcttctttaaatacttcccatacatttgctgtccaacccggtgcatctgttgttttatctactatgttttctatcatagcaccatagcttgatacatatacgtcaaccttataaattgcgataccagtatttaatgtaatctctcgtttcgtcacaccatctgttatgatatcttcaggctgtacggtcgtagcactgctcatagcatctatttctgcagggtgattcatactggttgcagcagatgctgtggctagaggagtaagcatcaacgacgatattaatacactccccaatatcatttttaaattctttttcatgttcttcctccctaattccattttaatttttaatggaattgttcacgatttatcatcttccaataggttagcatacgctaacttaaagcatatggcaatttttataaattgtcaatagattacatgaaaaatatttttacattttaactatttacttttatatcaattgacatctcttataaaattatatattaaaatatagcaattaatgattatttccaacaaataatatatcagatataaaactgaaatattttctttacaactgttgattgcaacggaataaaaaaagagatacagctgattgctgtatctcttttcgattatttcattaaagtaaccaatactgctttttgtgcatgcaaacgattttcggcttcatcgaaaatctcgtctgcgtgagactcaaatacatccgctgttatttcttctcctctgtgtgcaggtaaacaatgctgtaccatagcatcaggttttgctaatttcatcaactctgcattgatttggtaaccttcaaatgcttttcttctttcggcagcctcaccttcctgacccatggaggcccatacatctgtaaacaacacgtctgcatcttttgcggcagttgcaggagaatccgtcatctcgaagccctcatattgagaagcaaactccaacacttctttatcgggacggtaaccttccggacatgctacactgatagacatacccatcttcaaacatcctacaataatagaatgcatcatattgttgccgtctccaatataacatgctttcagaccttccaaagcaccttttctttcgcgaatagtcatcaggtcagccagcacttgacatggatgagcaaaatctgtcaaagcattgataatcggaatagagccgtattttgccaaatcttctacttgcttttgttcaaaagtacgaatcataattccgtccaaatagcgggataacactcttgcggtatcttcaattggttctccacgtccaatttgcatatcatttgcagataagtacataggatatccacccaattgatacatacctgtttcaaaagaaacacgggttctggtagatgctttggcaaaaatcatacctaaggttttgcctttcaaatggtgatgctcaattccgtgttttaattcatattttaattggtcagccaaattcaggatttcttcaatctcttctgttgttaaatccaacaattttaacaagtgtttcatatccagtctcccttcaatctgttctgttttatcatcattttaagcctgtttgataactttttccaatattgccaagcccttatcaatttcttcaaaggtgatggtaagcggaggcaacagacgtaccagtgtttttgcggtcagcaccagcagaccatgttcaatacatgcagctgctacatctttggctgttcctttttccagcacaattccaatcatcatgccaatgcctcttacttcggcaacaccttccatctcggacagcttttgctgcatatattcacccttagcttttacttcctgtaaaaatgtctcatctgatacacgttccaacacacttaaggcgcctgcacatgcaacagggtttccaccaaaggtagaaccatgcataccgctgttcagtacgtctcccaagcgttcggtacacagacacgcaccaatgggcaatccaccgccaagcgcttttgaagatgtaatcacatctggctcaatgccatattgttcataacaaaacagagtacctgttcttcccataccggtttgtacttcgtctaccataagcagtacgtcatgctttttgcacagcttttccagttcttttacaaaatgaggttctaaaggcataacaccgccttcaccttgaatcatttctataaacacagcgcaggtattttcatccagtaacgattttacactctcgatatcgtttgcctgcgcatatgtaaagccctccgtaaatggattaaaataatgatggaacgtatcctgacctgttgccgccagagttgtaaccgttcttccatggaaagaattcaccaacgtgatgattttagttctgttctcattgtatttatccgtactgtattttcttgctaatttaatagcgcattcatttgcttccgcaccggaattgctgaaaaacactttactgaaaccggataattcacaaagtttttgagccaaattggtctgcgcaggattgtaatacaaattggaaatatgctgtaatgtggaagcctgctttgtaatagcagcaatccattgatcatcacaaaaaccaagggcattgacaccaataccgcttgtaaaatcaatataagattttccttcgctgtcctgtgcaacaacgccttttcctttcacaatcgcaacttcaaagcggccgtaagttggcatcatattcttcttttcttgttctttaatatctaaaaaatgcatggtaatctctcctttgcattcttccaaagatgccgctttgaaagaatggatttaatataacatggttccaataccttcatcggaaaacagttcgattaaaatagagtgtggaattcttccatccaagatatgcgcacgatgcacaccgcggcggactgcctccacacagcaatcaattttaggaatcataccgccgctgataataccgctgcgttgtaatcttggtacttcgctgacattgacaacgggaatcagtgtactttcgtcatctttgtcttttaataatccacgaatatctgtcatgagaatcagctttcgtgctcccaattcggctgcaatgcgggcggcagcgatgtctgcattaatgttatacacttctccgttcacaccaccggcaatggtagcaataatcggcacataaccattgttggttgcgtctgtgataattttagtatttacccttacaatttcacctacataaccaaggtcagcgccgctttccaatttacgcgcctgaatcatagagccgtccaaaccgcaaagcccgatggctttaccactgtgattttccaaatgctgaaccaagtctttatttacttttcctgccaaaaccatttgtgcaatttccatggtttcttcatccgtataacgcaaaccgccaataaatttgctttctttgcccacacggcttaacatggtattaatttcaggaccaccgccgtgtaccaatacgacattgatgccaacagactgcatcaatacaatatcagtcataacagcagatttaatctcctcattaatcatagcgttgccgccatattttactacaatggtttttcccgcatatttttgaatatagggtaaagcctgagctaaaatttgagctctatcgttattggaaatattcatatgacatccttttcctattttacaatattctaaatcagcttctgtaatcgccgttaatttttacataatcataagtcaaatcacaaccatatgcagttgcgcattcgctgccttcatgcaaagttaccgctacaataatgtcgtcctctaaaagaattttcttggcaatatcctcatcaaaaggcaaacctgcaccgtttttgcatacttcaatacgtccttgtttggattcaaatgcaacatccacaccattaatattaatattggcacctgaataaccaattgcgcacagcactcttccccagtttgcatcggcgccaaaaatagcgcatttcagcaaattagaacaaatcacggattttgcaactgttcttgcatcctcttttgtttttgcccctgtgacagcgcattccaataatctggttgcaccttcaccgtcctttgcaattttacgggacaacactgcgcaaacttctgtcaatgcttgtgtaaacaattcataatcatgatttttttctgtaatggtttggttttctgccaaaccggacgccataacggacaccatatcattggtagaggtatctccgtccacacttaccatattgaaagtatcctcaatggctgtgtgcagtgcctcgttcaacagttccggcgtaatagaggcatctgtcgataagaaaccaagcatggttgccatgttcgggtgaatcataccggaaccttttgtaatgccgcctatggttaccgttttaccgtccagttccacctcaagtgcatattctttttctaccgtatctgtcgtcataattgcttttgccgcatcattggaacctgttgcacttaacgcttctgctaatgtttttaccgaatttgcaatcggttcaatgggcagtacctgaccaatcacgcctgtcgatgctacaatcacgtcgcttgcatcaatatgcagttctgctgcaatcaaatcacacattttctgtgctttttcttctccgtccgcattgcaggtattggcattgccgctgttacaaatcacagctcgtgccataccgtctgcaatgttgcgtttggtaaccgcaatgggagcgccttttactaagttttgtgtatacacagctgccgctgcacagggcacatcactgtaaatcaaagcaaggtctgctttgctgcgatttttgcggataccacaatgaattcccgaagcctgaaatccttttgctgctgtaacgccgccttctatgatatgaaatgtcatatgctgcctccatcatatattctttataggacataaatccccgctgcggcatcgcaacagggttatgcttgtatgataaattacaattaaaatgccggtggaattaatgtaagacctgttttttcttccaagcccaataccaaattcatgttttgtattgcctgaccggcagcgcctttcaccatattatcaatggcagaaatggcaaccagagtgtttgcgtgctcatctacatggacggaaatatcacagaagttggtatactgcacatgtttaatattggctacactgccttttggcagcatacgtacaaagtattcctgttgataacgtcgtccatacacataacgaacttgctcttctgttacaccctctcttagtgtagcatagcatgttgccagaataccacggctaaccggaagcaagtgcggaacaaacgttaattttaccggatttggagcataacaagataatgtttgttctatctccggcgtatgacggtgagcagctaccttatatgcggtaaagctctcattacagtccggaaaatgagtggtttgggtaggttttctgcccgcgcctgttgttccggatttgcagtccgcaatgatatggtctgtttcaatcaaacccgcttccatggcaggcacaatggccaaaggaactgctgttgcataacaacccggatttgcaattaagctttttcctctgataaatggacggaacagttccggcagtccatatacagcttgctcatgcaacgctttatcaagaaattcacagccataccaagttttataagtttcttcatcttccaagcggaaatcagcgcctaaatcaataaagaatttcatacgtttggcacaggctgctgccaattcttgagataatccatgcggcaatgctgcaaatacaacgtcgcatttttccaccacttcctcctgagttttgcaaaccatatcgcataatccaagataagaaggatatacctcacttattttttgcccttcaaaggtaactgaactgattgcagtcagctttgcataagggtggtttaataaaagtcttaccaattcggcgcctgcatatccggttgcgccgacaactccaactttaatttccattgatttgcctgcctttcaccattgtgccggttattttcccagcaagttcaatactcgttttgcctgcatctctacattttcaggagcaggagcacccaaaacattgcgtccgtttacacagcgttccaaagagattgcatcataaataccttcatcaaaggtatcacataccgctttataatcttccaatggcaatgtttccaatgttaagtttcgctcaatgcattgtgcaaccaaagtgccggttattttataggcatcgcggaatgctaaacctttattcaccaagtaatctgcacagtctgtggcattaataaatccacgtgctgcggcattgcgcatattttcaggcaacactttcatagtatctaccataggaataaatgcagtgaggcacattcttaaggtatctactgcgtcaaaaattgcctctttgtcttcttgcatgtccttgttataggccaaaggtaatcccttcagcatggttaataatgtaacaacatcaccaatgactcggccggatttaccgcgtaccaattcagcaatatctggatttttcttttgcggcataatgctggaacctgtagaaaaggcgtcgtccaactccacaaatttaaattcccaagaacaccataaaataatttcttctgaaaaacgagataggtgcaccatagccaacgcaatggcagaagcaatttctacacagaaatcacggtctgcaacactgtccaaactgttattggtgactctggaaaagcccaataattcagcagtcatacttcggtttaacggatacgtagtacctgccaatgcacccgctcccaacggaagttcgtccatacgcgctttggcatctttcaaacggccaaggtcacgcaggaacatctctgcataagccattaagtgatgaccaaatgtaatgggctgcgcacgctgtaagtgggtatatcccggcataacatcgcctttatgagtcatcgcctttttacaaagcactgttaccaattcttcaatttggctatataatgcatcacattcctttttcaagtataaacgtacatccaatgccacttggtcgttacggctgcgtgcagtatgcagacgttttccggaaacaccaatacgctgagtcaactctccttctacaaaggtgtgtacatcttccgcatttgggtcaataggtaatgtttcgttctgaatatctttataaatttgttccagctctttacaaattagttctgcttctgattgctcaataattccgcaagcacctaacatggttgcatgggcaatgctgcccttgatatcttcctcaatcattcggctgtcgaattttatggaagagttaaagtcatttgttttttgatcaatctcttttgaaaaacgtcctgcccatagcttcatgccgggagccctccttatggattatccttaattgaatttacgtcctttttttgcctggattttcatagacaaaccaaacaagttaatgaaacctgcagcgtctgcttgattgtaaacttcatcttcatcaaaggttgcggtatcttcatcatatagagaatatggagatgtcatacctgcatcaatgatattgcctttgtacaatttcagtttgacatcgcctgttacatattcctgagtgctgtctacaaatgcggataaagcttctcttaatggagtataccatttaccgtcgtataccaattcaccgaaggtaatagcaacttgttgtttataatggaaggtatctttatccaagcacatttcttccaatttattgtgtgcatgatacaaaatagtaccgccgggagtttcataaacaccgcgggatttcatgccaaccaatctgttctctaaaatatccgcaataccaataccgtttgcgccgcccaattgatttaattttgccataacttcaagagcattcatgttaacgccgtcaattgcagttggaattcctttttcaaagtgaatggttacataagttgctacatccggagcctgttccggagaaacgcctaactctaaaatttcattatattttggttcgtttgcagggtcttccaaatccaatccttcatgagataagtgccataggtttttatctttggaatagttggtttcccttgtaattttcaaaggaatattgtgagcctctgcatagtcgatttcttcttctctggatttgatatcccactctctccaaggagcaatgattttaatatccgggtcaaatgcacgaatggacaactcaaaacgaacttggtcgttaccttttcctgtgcaaccgtggcaaattgcgtctgcaccttctttttttgcaatttcaaccagtctttttgcaatcaaaggtcttgcaaaagaagtacctaataaatatctgccctcataagcagcgtttgcttttaaagtaggccaaatatattcttcaatcaattcttttctcatgtcttcaatgtacaatttagaagcgcctgttttgattgctttttcgtttaggccttccaattcatcttcttgaccaaggtcagcggaaactgcgattacttcgcaattgtcatagttttctttcagccatggaataatgatagaggtatccaaacctcctgaatatgcaagtactacttttttaatttgttgtgccatatctatgctcctttttatccgttattgaaatataagtattattatacgcttctgattgtatattacaagcatacaatgcataattattcagttttgataaaattttcacatcatgacaaaattcatatgatttttacggtttccttgtagaaaatgcaatacatttgaaaagaaactgagaattcatagcgaacagttgcaaactttactgagaatctgtaatataataaataaggttacgattgtataaaaattgataaacaacgatatggagggtataaacatgtctttaaaaccaattgatccaaaaacattggaactaaatccttttacaaccattggaacagaatggatgttattaaccgccggaaatgaagataaacataacaccatgaccgtcagctggggcggattgggcgtgctgtggagaaaaaatgtcacttacgttttggtacgtccacagcgttatactatggaatttatggaccgtgaagagtactattcattatgtgtattcgatgaaacctataagcctgcattaaaactatgcggtaccaaatccggcagagatatagacaaagataaagaaaccggtctgaccgtcatgtttgaccaagaggcgccttattacgctgaagcaaaactggttttcatctgcaaaaagatgtccaaacaaaaaatggagcccagctcatttatagatagcaccattgatgaaacattctataaagaaaaagattatcacgaagtgtttgttggtgatattgtaaccatactaaaacaagactgattcaccatttttattagaatatctaaatatcgtattcattaaaaaaagccttgcttatttaaaataagcaaggcttttttagtaactgatttttattttaaccttatttcagatactatatgcttgtacatttttcatatcacactcttagaaatcacttgttttcagccagacaaatacgtgattccttctattatatgacaccacctcctaacagaaaactatatttaactgttaagagagtatttgaaaattggtatgataagaattgcacagtaaatttctttctattataataaatacaatgataaaaacagaggagttatctcatggacaaacaagtcaagctgcgtattgcaactatacaggatgccgctgcattattggatatttatgcaccatatgtagaaaatacagcaattacatttgaatataccgtgccttctgtacaagaatttgaacaacgtatctccaatacgctgcaaacatatccgtatcttgtcgctgaaatagacaatgaaattgtaggttatacttatgcaagcctctttcgggaacgctgtgcttatcaatgggcagttgaggtttccatttatgtaaagaaaacagcgaaaaaaatggggataggaaaaaaattgtatcaaacattggaaactattttaagccttcaaaacatcacaaatttgtatgcttgtattgctgacacaactgaagaagaccttcatctaacaaaagacagtatgttattccatcaacgtcttggctatcgtcaagtaggaacatgtgcgcaatgcggctataagtttcaccgctggtatgatattgtttggatggagaagcatatccaatctcatacgatacctcctgagaatataaaaacatttgaagaaattcgtgaaatggtaaaaacacaatatcatctataaaaaagagtatggactacacccatactcttttttcattcatgaaatagaaatgctgcgatttggtgaagagaaaaaactacatactccattccatagtaaagtccatctgacctgtttcagaatccatttgtttctttttgatttgaaatccctctttgaagtagaaccgcagtgcggattgatttttctcatacacctgtaacgtaagagaagaacaaagttgttttgcaagatttaataattgtgttcctatccccttaccacgcatagattcctctacaaaaattccttcaatataattctttgtcaatcctataaagccctgtacagaaccattatcttcatatacatatacggtagcatccggcagcatttcttttacttgcccaaaatatttcatccaatattcccttggtataaaagaatgcgcttgtatattggaactcaaccaaatattcattacagcatcaatatcgcttggttttaatattcgtatcatcaaatcaacaccaattattcttctcccaaaattgcataaggcaatacctgctgcaataagtcaggagtaaccattgcaacaagatgcagaccttcttcaacatactcttcttgcagtacagtaccatctttgcgaatttcagctgcaaggccacttttggaaaacggcaataacaattctactttggtatttttcacagggagattttcttcaatgacctccagtaaatggtcaacaccttgtcccgtcgcagcactgattctcactgcaccgccaatcattggcatatgattaatctcaggaaccaaatcgcatttatttaatacaggaataatcggtctgtctttacaacccagctcttccaatagtgttttggttaccgttaagtgcacttgtgattccacgctggatgcatcacaaatatttaaaataatatccgcagttgccgcctgttccaacgtagatttaaatgcctgtaccaaatggtgcggaagtctgcggaccaaccctaccgtatctatgagcattacggtttttccgcaaggcaagcgcaaagctctcgcagttgggtccagcgttgcaaacagcatatcctttgccaatacgcctgcatccgttaaataattcatcaatgtacttttcccaacgttggtatagcccaccaacgctactgtaacggtaccgtcctttttccttctgcgattgatttgctctctatgtttttctacttgttccaactgttcttttaaagcatctattcttcgatgaatatgacgcttgtccgtttccaatttggtttcaccgggacctctggtaccaataccgccgcccaaacgggaaagagcggtaccctttccggttaaacggggcagcatatatttgagctgcgccaattccacttgcaatttaccttctttggaaacagcacgtgctgcaaaaatatccaaaatcagcattgttctgtctatcactcgcacgtttgtaatatcctctatattccgtatttgcgttggagacaattcgcagtcaaaaatcaacaaatcaatctcctgtttttggcaaatatctgcaatttcctgaaccatacctgaaccaacacaggtagcagtttcataagccggtcttttttgtgtcatggctccaaagggctctgcgcccgcagttttggtaagttcatataactctgccaaagaagcctctacatcataacttcctgtatctaccgcaaccaacaaagcacgctcttgtttctctgtattttcatgcagttccatttacttgttccccctttgttttgcctgaatgtttctgtaccaacacgttaaattatatttttaatcactgtattttcctaaaaaatgtttatcttaatgatagtataataaagcagaaaatacaagtgatttccttctattacgacaattggggcaatgccaaacattgccccaacctgtttctctattttatttaacccaaaattttgatacttatacactcaaacatccaaatcattctgcttcacttgcaaatgtaaccgtacattccacatgagcagggatgtaatcagaaacagctttttgcgtatcttgctgtgtttggccgtcttttacagacaacacctgtacgcctatatgctgtgtgcttggagattcggtcacttcagcctcaatccctcctgattgtaatatgttcaaaaagtccgctttgctaaaggaatttacattaacggcaccacgcatgcataacagttttcttctttcttcttccgtgcaggagctgagatgcaaaccaaataacaattctttttcttctaaaccataagaaaccgctgttggaatcaatgcttcctgcaataattcatccagttggtcatgcagcgtttgaaagccggcatcataagcttttaattctgcatatagtcttgtatcttctgtgatttcatacattccgtttgcaagcaaagcattttgcattgctgtaaatgaaatactcaacttatatcacgccgccttcctcaatgataatattgcctttcacaaccaatttattttgcggcgttgaaaaatcttctcccggaggtgtaaagtgattgacaatcgcacccgattccaacatgttcctacataattcagcaacacggaaaataccaccaatatgcatctgcgcaaaataatcatcaacgacttgcatacaaatttccttggcctgctcaaacgaatactgctctgcaggcttgatttgaatccgcagcggtatcttttgtaaaaccgccggttttacggttaccgctacatttaattcccttgcttcatcgaattggttttgtaattcttctatgacttcatcagacggcacgccgcctctggtagccacatatacggaaaccgttccaactccgtcatcttttgcaactacacctgcggaataaacggacggatgtttcattgccaattccctgtaaaatgcagcattggttccattggaaatatttgcgtaactttttaataaacgtgcacgaaatgcattgtcatcttcagcatccatgccgccaataaatggttctgcatttgtcactgccttaattccggaaggaggagtaatcataatttgaatggtattttcagccgtgttaccgttacggcctccttctttcgcctttgcttttacagtcacgctcaattcatttgcctttaaggttgcctcttctgttgtaatatatcgtaccgtatcctctttatctacagcacaaacagttccaacgggaatgggcaaatcataactcagcgcactggttctggaaaaagttaaacttcctactgccgcttgagactcctttctcacaagtcctctttgtgtgccgtgcatcgtcaaatattctcccgtagctgtttgaggaaatacctgacgctttaaccattctatgtttgcaaatgaactgtaaagttctcctgccaatacttgcattcgtatttccaaatcactgtttttttctacttcataacctgcttgctgtgcaaagctttgtttcattctttctaaaatttcctcatacgtttccatttactctcctcctttcagtgaaaactgtaaagcgtcgtctccgtattccgtttctatataaactgtaattgttttctctgcaatgactacatcttttaccctaacctgcggtatgaactccaatgcttcttctattgcttccaataccttctgttcacatttggaatcgcttgcagcaatttggtacaatctgctgcccagcgttccgcagtaaggaaattcccctcgatgcgctgtcagctgtatccaaactcgctgcaataactcccgcctgccgctgactaaaatggcagacgtatccccgttttgtatcaaactgtctatggaaatcccctcctcaagttgattgcagaggaaatacttgtccatttatgacaatatctccgttattcttcaagtagatatatgctccgcctgaagaacgcagcatcagttccccttcagataaatttatagactcggaaattgcccccgtacacaataccgtatcctcttcttccaacaaaactacctttgttcctttgggcggtacataagtaattccaaacggagccgctaggggcactgcactgtattgtcccacagcctgtatggaaagactgcctgtattactaagtacttcccctacttgtatctgggcgctcggttgttccaaagcgcctactttttgtgaaatccacatcgtatcaactcatttcttatcattaaatatcttcttttctcagcaaatattcacagcgttccccattactgttcagcgtataggtccagcctgcaatactcaatttatcaatggtacccaaaatcgcatcggaaataacaacaggcatttttaaagaaccacaaatgcctcccgcacatacaaccgttacttctactgcctttcgttttgcactgtcaatcatgcgtgttcctctataattattggagaccacaaatcgtctgcgctgtacacctaatttatgtgcttggtcatcatgcacaacagaagtatatgcctgtcccagctttggctgtatatacaattcactgactcgtttataaaatttatcacgataaagaatcgacaaataagggatacacgacgcatcgctgttatcaaataccagctgctcgtttgggactgccccgctgcaatcaatataatcgtcagctgttacaaaaggaatcgttccaaagcatctgacacaaaactcttcaatgacttgccattcactcattcctttggtgatggtcatctttgtatcaaacgttcccccattgccgataaagccacaaaatccatacggttctacgtgtcgttcatacagttgagtcaaggaaggatagtgatattcctgtggcatggcttcgttatccaaaagcaatgctgccctgctgcgagcaattaattttaacatggctccattttttgtcactcccatgatttgctcatctatgattcctgaaaatattggtttttcaccattccaaacacgtatagttgctatctttggcacttgttctataagcgggaatataaccgtcatatcatcggcaggagcatcttcatgcacattgatttgaacagaaataggaggcaataatgcaacttttttaccacttaccgtatagcagcaatagttcatggcaaagtcacctgcaaaccttctgttaaataactgggccatacaatgtggggattgagccgaagcagttcttctaccgttgtgtgttccttttgtgcaatggtccataaattttctccgtcttctttcaccgtaacatgcatacgaaaccgggagatttcaggtactgaaacagaatttttgctgtcttcccagaatacaaactgataacggagaatatccggtcttgttacagtcatataagaaagagaaacaggctttgcaatgaaagcaggaaaattaggcaatgataatacgccgctttctccgctttcaaacaatgctgccagcttttgatatgtctccatacatcgttttcccgaaaactcgccttctcctttgattattcgtttctgttctccgtaatcctgcatcacggaaccatgaaaaggaatcgacaattccttaatgtctcttgtaatagaaatattgaatgtttcgggatttttactccatataaaatctttgaatttcataagaggtaccactaaccaatcacctcttcgtctaacttatgtgcatatctgcgataatcttgctccaattggtcagaaacagatgagacagtgttggtatcaaaaatatcttttggtgtttgattccataattcttccataacgattctccttctacgatgctacaactttctgcagtatcgcacaaacatagattggctcattttgcagatagactgccctggattttgtaacccaatataggacgtcatcctgttccagtttggtttcctccaattccctgtcaatgcggtattcagccggaccaagatacaagtaaccgccgtcatccgtatggtcaaaaggaatgcccagctcattggaagaaggtaaatgttgaaaagacaacgggcgaataaatccttttacttgatattcttttttatattttgggtacaccgtaatctcatttccgtatgtttgaaacatagtttttaaatacgcactttttttcatattttcatctcccaaaaaccaaaatccgggtctttcaataacggagcagcatgactgcgcgcctcaagccaaaaatcttttgcccactccacacttttgctgttgtgagaaatgcgcacatctcctacggtaaaatcagcttgacctgcagcattttgatgtaatgtatattggtaaaatgccaacgcagcggcagcagcacaaaccaaatctccaacacaagaagcatctttctgtttttttctttgtgattccagcaaaacataagcgtcaccgcaaagatcctgccattgttccgcttcctccactgtcagtcctgcaagtcttgcaaaccttctcaatacttcttccataataaaacctaattaagcagtataagaagccgcttttgcagcgcctgtaaagatttttgcaaagcctgcaatggtactgatggttgcacgttccaattgacggtcaatcagtttatcataatctgtgataacatcacctgcttgtaccatttccaatgcacaatttttatcaagaccaataatggttttgtctttcaaagacggaacatgaagcaaattcgctcccaaaggtgtgacaagtttgcctgtaccttgaaaattcaaacctgctgttgcatctttaaattcgtcaatatttaataaatcctgcatggttacagtcgatgctaacatggtgtttagttcatatggagccaattcaccccagagttttacaatatccgtataagtaggttttgaagataaagaggtaggtgttagcgcattgtcgtttccgtcaccgttgagcaagacatctactgcgtctttcaattgtgctctggcgatatacgcgccaatttgacgtaatgtcaccgtaaataagtctaatttctggaaacgcaacgcctcataggaggacaccagcattctgcctcttttatgaagttttaccagattatcttgtgttctgactacggtttgagggatttgggcaccttccaccacaggctttaattctttgtcatcctcactgggagacgctgtaatggttctgtaatccatagactgaattgtagtagtggtggccacaatagaaggcagtaaattcgcatactccataccttgctttactgcacgtgttacatattcgggaaacaaggcagcgctgtcactggtttggaaaaatttttctaccgcatcggagcttctgcctcctactttaatgtcaaaacgttttaattgacgctgataagcatccaaaccttccaactctgttccttcatagtttttggaacagtccagttcttccaatacttgtgtaaaacttttattaccggaattgtacattcctttttccaattttaaattatcataaaaagccatttgattctccctttccaattaaagaataataccgcaggtagaagattcactgtctatatctactaccagacactctttacctgtttcagatacttccgccttatcagaagtagcgccaagttttaagattccaaccttcataccggaacctgtgtatggcaacccactatagtaaccctgcagctgtactgctgcaaaaccatttctgacattgagtgcaataccacaaaatgcttctttggccgtacataaaccaactttgccgttaccggtcattttaacaggataacccgctcttacactgtcttctgcttcaaatgtagttacgctttcaccgtaaccgtttaatgacactttcatatattcaactccttaaattttaaatgcctgatttgggctgtttttcttgtattctttctcttttgccacagccaactgcggagaaagtggaatcacttcttccgcctttgtgcgaaatgccttctcaaagacttttaaatcatctaaactcataccttctgtcacacgcttcatcacctcagaagaaatttgaggctgtgccaaaccgcaaagtttgactacattgcggcttacttcttccctgtatgcttttccgcacgctgcatattcttccatttgttccagatgtctgagcatttttctgatttcttcttcggaaaggaatagcccctcttgagtctctttcattttttgaatgatttgttccaccgtcattccccctttcgtctttgcaaacatctttatgacccccgcctctcgctgagcaggtactgccacaaaagaccattcatatgcatctgtcggctgattcaaaacaacgtggcagacttcttttattccgtttttttcataacgctttccctgtttatggttacatggtgcgaatacttggttcgcaccgcaaacagaacaaattctctctgcaacagcacaacctacgcttacctcttttttcataccgctttcaatttccataatcaaatctgtgtttttttcacatcgcggcaagtatgcttttgctaccaaacgagtatacggttctccataagaagtcattttttcttccatagtttccattgctgtatcataaatacgcgccgcttgattacctgttttcatattgtggtcaaaaatgcctgtttttcctaaaaacaattgacttaacgtatgtaatgcttctacactgaaccgttcaaaatcacggtcgatttcgttgtcacaaagtaccacggaaaacgtatatacttcctgttccgtaaatggcctgcgtgtatattgattgatgcattccaagtcgtgcgtcatatctgtttgcatatgtttgataatggctccgttcactgttttccctccttttccttttcagtttcccattccagtttctctgcttgtgcgtgttttaatctggcgtcggcttcctctacacggtcctgcatggtaatggtatcccatacaatttcaaaagaggtatcataaccatgcagtgtaagccaaagggaacatattttttcaatagaagggttcagcagcatacggtaagcttccatttcttttgttaaaacatccgcctgctggctggacattctttcggtcgaggaccacgacaatcctaaaataaacgggggcaatccaagccttgtaataatctgctccatcatctgacgtacaggtacttcactatctaaaatctggttgtccgcgccaatgactttaatccctacatcacccactgccacaaaatcactgatatcgccgctgcgcatagcacggctccactctgtggcaatttgctgtgcacgttcttttgcatacgcacggtccatggggtcactggtcggtttgtaggtaactgcaaatctgacgttaccaactctgtcccagttcataccaatggatttataaattttcagaagcacttcactgacaaacggcaaccctcttaaaatggaaacgccatgtgcactgccgtgaggcggattgagtgctgtcattaaaatcaaatccggatatggaatcggctttctttccccaaagttatcttttacataaatatccacggataacgttttatcgttatgcattaaatcaatgttgtccaaatcagctacatacaatgcaccaatatcatcgcctcctatggtaggaactatctcagcaactgctgtaccataagtaagcaactggtcaaaatagcagctgataaaactgtaaataccttgttgatacgtattcacctttacgtggtccagaaaagaatgcagctctttttccacctgtttatcctcgcattccacagtaaaatttccaataatacgaagcaatttatgaatggcagaatcaataatcggcactgcacctcttaatgcagtataaagctgccgctccgcagcaatgttattctcacaacattgccaaacaaaataatcttgtttaccaacagtttggactgccatggtagcgtcaactgtcttactttctaaagcttgttcttttttcttctttttcccctcttgtccttgttttctcatgaaattcaatgaaaaaatcccttcttttttctctatcatctgttgttggtattttctatgtcgactgcgccgtactgaaataaatcaacagcgctgcgttgccataacaaaaaaatcgtcacttctttctgataaaacggtagaaacaaaatagcgaatgtcatccatagcgtggtcattttccttaatcggcatatctttgtgcatggaatcgttccagcggtataaaccaaattcacgaatcgtatccgtacaagtattgcaaattcggatatccccttgttttaaagcaacactcactgcacggataccatctaccacgtcattctttgcaggaagaaccaaatacgctccatgacgctgaataaccgcaataaagctggcggcagatgggtctaccacaattttggcaaccggacgacctgcgattaaagctaccaatcctgcataatgttcctcatccgtgcgggacatccccgtcaaacgggaatgatagtaatattcctccagacgataccaaatcccttgttgttttccccacaaaccaaaggaggaaggattaatggtgccgtaatcgcaggataccacatattcctcaaatgctcctttcggtgtatcgcaaaatctatcttgagtcataaaaggatagataagaccttgtaccgctacccattttcccaaaacaaagcgttcataaaacgcacctgaatacaaagaatgatagcgcttacgcacctttggggacaacgacggattatcctccattgtaaaatgcaaatataacgcctgtttttgtttggtttttaaaatccattcttggtaaaaccaatgctgaggatgctccggattacagttgaaccaaaactttgcctcttctacagagcatcttgccaaagcttgctccacaaaagagcgcggcatcaaggcaacttcatcaaacataacacctgctaacgtaataccttgtatcattgctgccgaaccttcatctttaccgccaaacaaatagaatcgattttttcgtccttgaaagattacactcaaacaattttctgaataatgaatgtgacattgaaaacccaactccttcaaaatcggtaaaacaggggtgattaaattccgccttaaagagcgtatggttttaccgcagaaggcaaacgattgattttgaaattgataaaaagcccagagaaaaaacgaaatactcatacataaggtttttccgcttctgactgcaccgtcacaaataacagctgtgtaagaggcatacggactgcctcgataccaccagcttaatgcctgcagctgtttttttgagaatgattgaaatatcaattaagattcatcctcctcaaatgttttcacaccttgctccaaagcacggtaaaagccggaagtatcacttgactgaccattgtataattcctgcaagcattgcagcgccttcaaacggtcataaaatttgatttcaattcctccgccttttggtcgcttaatttcagaaatattgaataagtccaatttattcagtatgcgggtatttaactcatcacaaaacaaaagtttaatggcatctgttacattaccaaaagctaagcgctcaagaccttccactaattttgtctgtttttcctgttctgtatgttccataaagtcctcctaatgcttttatttatataaaccccctcactataccgtaaaaaagagtggaaaattcgcctaaatagggaaatatgatgtgaaaaaatttttcaaaaacgagtcagaatacgaaaaaaagaaaaaagccgaactttcaattgagaaagttcggcttttatgaaatgcttaaacaatattaaagtttttaatctcggttcataatcgtagtttgcacgtcaaatgtgaaatcctcattttcattcattctgcgaatggttaaggtaatttcttcccccacacgataatcttttaactgcgtatatacatcctcaagtgttttaatggtattaccattaaatgctacaaccaaatccccctgttccaagtcgctgtctgctaaaggactgctgctatcaatagatgcaatcaatacgccgcctgctacagaatagttttcaccatctaccggcagatattgagtggaacctgtaatacccagtctgcccacagatggtatatcaccttctctgattaatgtgtccaatatagactttgcttgactgattggaatagaaaatcccataccttcataaccggaagaaactacttttatggtattaattccaacaatctgcccacgcatattgattaatccgcctcctgagttgcccggattaatggctgtatctgtttgtatatacgtaatgccggtactgctataatttgctacactgcgattcactgcagatacaacccccatggtcatagagccggaataacgtacaccacccggatttccaatcgcaaccacggtttctcctacagataaattactgtcatctccaaattcagcgggagttaaaccttccgcttcaattttaatcacagccaaatcggcatccttatcaagacctactacgataccatcatattgcttttggtcatgcgtaataacagatacttgtgcggatttggaataattaattacatgtgcatttgtaatgatatatccattggaagttgcaatgaccccgcttccctgactgacagaagaaccactttctgttgtattgccgatagaagtcgccaaaacgctgaccatggataccgatactttttcatacacttgttcaggagtaagtgtttcgctgtcagcagatgaaagcgtgattccctgaaaatccgggtccgttttatcaggaatgtttgcagctgtgtcctcatccacaatagtatcattggaagattgagaagaactgtgattatcgcttgattcagatgatgtgccatcttgctgctgaaccaccacataaataccaaatccagcaaaacctccaataaagctgactgccaaaacagccaatatcacaataaatacctttacacctacgctcatcttctgtttgggttcctgaggaggccatccggaaggagaaggctgaaatcctgctccattttgccaatactgcccgttccaattgggaaatgaaccgccattatcattttggttccaagaattcggctgtcctgttccgtaaggatattgctgcccataggaatcacgtggagcttgctgcccggacggttctcgattcccggaaaaatctccctgataggaagagttccattggtacggcgggatatcagaacttctttcttgctgattctgttctgtgttcctatattcttgccctgattggtaatagacactctccgattggccggcagccccctgttgaggccattccgttgacggagtggtatgggaacctgtttgctgtggctcagacggattggaatttgactgcgtagaatcaaacggattgcggttttcgtccatgtatacacctcttatcaatagtatctgatgacaaacagtagggcaaaactatgtttaccctactgttcattacacatcaatgcagtgcagcatcgtcatcttttggtttttctacaatttctacatctgtcacttcaatgacctcaggcgcagaatctgcttcttcttttttcttcgctttcttatctgtttttacttgcttgctatcactttttagaggattattccacttgctgtcttttggttctttactgtcttttcctttatctgaatttaaatcttttatcttcttaggcagccaaaattcaaattggcaaaattcattctcaacactgctaacactaatttcaccgccatgcagacggatgatggtacgaacaatataaagcccaaggcccattccgtttttatcttgactgcgagatttatccgttttataaaaacggtcaaatatcatagccacttcatccgcaggaatacccggaccactgttcttaatggtgactgttacacggtcattggtttctgctaagcgtatgtcaatgtaaccttctacattcgtaaactttactgcattttccaataaattatataaaacctgatgtatcatatcagggtcaccgtctacaaataaactggaggcggtttccaaaccacgaatttctatttttttgtcttctatggctttttcaaacgatagcaacgtaacaaatacggtattacttaaatcaaagcgagtaaggcgcagtttcatttcaccgctgtcaattttagaaagatccaacatggtctttaccaaacgggacaaacgttttacttcctgagaaacaattttcaaataatgattgcgtttttcttcgggaatggtaccatccagaataccatccacaaatcctgcaatggttgtcataggtgttttcagctcatgagaagtattggcaataaaattgcgcctcatactttcacctgccgccaatgtttccgccatttggttaaatgcagatgccagctctccaatttcatcctgactttcaacaggaacacgaaccgagaaatctccttctccaaagtgtttggttgcaattgccatttctcgcagtggttttgccaatttgtacgagaatgtccaaacaatgcaaaaagataccataaatgctgcaacagccgccaataaaaacattttaatggtttcatctctgaatacatccaataccttcaggtcagatgcagcaaatacagctcctatcgccacttgttgacccgatgaattggtggtaacaatcggtaccccaataatatagtaattactgctatacaacccattcatagtacctgtagcggaaaaatatccggataatgcttgctgcatggcttcagaactgatatttttcctggatttgatatctgcactgggattttcatcttcttcaatgctgtaggtagaaatcatttcagcaccggactgatccaccaagaaaaaatcagcatccacattctccgaaaaagccttaataaataaagccattctggaaccgtcgattaagtattgattatcttgcatcataacaacgctttgacctgcaatgcttgccatactttttgcattctgggttaactgcgcctgcttttcagactggaagtagcgagcaataaatacaatcataacggtgcctaagaataaaaagctaaccacaatgataatagatgttacacttaagtatttcttaaacaagctctttttcaatcaaaacagccctctctttattctttcagctcaaatttgtaaccaacaccccaaacagttttcagcgcccatttatcagaaacgccctctagcttttctcttaaacgttttacgtgcacgtcaacggtacgggaatctccgtaataatcaaatccccatacttcatccaaaagctggtcacgagtaaatacacggttgggattgctggccaaatggtaaatcaattccatctccttgggaggtgtatcaattgccacaccatccaccttcaactcataattggtcaagttgatgcttaatttatcgtaacgcacttcttttacctgctcctcagcattgcttccgtagcggcgtaaaacagccttaatgcgggcaactacttctttggtttcaaacggttttaccacatagtcgtccgcacctaattcaaggccaagtactttatcaaatacctcacctttcgcagtcagcataatgataggacattgagatttctttctgatttctctgcacacctgccaaccgtccaattccggcaacataatatccagcataatcaaatcgggattctgctcttcaaaaatctccaatgctttgcgaccgtcattggcaatacggacttcaaagccttctttttcaatatataaacgcaataattcgcaaatattctggtcgtcatccactactaatattttacctgccgacatcataaccgattcctctctttagtatcttgatagcttcattataatagaaaatcgcttgatatttatgaatattttataaagcttttccgtttttctgtctataaaacaacaaaagagtataaccaaaatactaatgtatttcagaaatactccttctcattattttcctatacttttcagtaatccgcctttggaaataatattttgaataaacggcgggaatggttctgcctggtatgtttttcccgtagtaacgttttcgattacacctgtatcaaaatctacttttacttcatcaccgtctttaatatcttttgctgcctcatcacattctaaaattgcaaggccgatattaatagaattgcgataaaagatacgtgcaaatgtgcttgcgattacacaagaaatgccgcttgctttaatcgcgatgggagcatgttcacgagaagaaccgcagccaaagtttttattggcaacaatgatatcgccttgttttactttgtttacaaaatccttatcaatatcttccatacaatgagcagccagctcactgtgggaagcggtattcaaataacgggcagggataattacgtctgtatcaacattatcgccatacttatgtacaataccatgtgcgttcatatggaaagcctcctttttatttggttgggtctgtaatataaccggtcaatgcacttgcagcagcaactgccggactggacaagtaaatttctgaatcgatgtggcccatacgtcccacaaagttacggtttgttgttgaaaccgcacgctcgcctttgcccagaatgcccatgtgtccgcccagacaaggaccgcatgttggtgtagaaaatactgcgcctgcttcgatgaagatttctacccaacctctgcgaatcgcctccaaataaatggactgtgtacccggaataatgatacatcttacatgtttggcaacttttttgccttttaaaatctcagcggtcacttccaagtcttcaattctgccattggtgcaggaaccaattactacttggtcaattttaatttcgttttcgccaatttcgtcaatggtcttggtattttcaggtaaatgaggaaatgccactgtagggcgcaacgcagaaaggtcaattacaatggtttcatcgtactctgcatccgcgtctgcctgaaaaattctaggctctctctggcatctgtctttacaatattccagtgtcacatcatctaccgggaagataccatttttggcgcctgcttcaattgccatatttgcaatgcaaagacggtcgtccatggacaaacttgcaacaccttctcctgtaaactctaaagaacggtataaagcgccatctacgccaattttaccaatcaagtgcaaaataacatctttaccgcttacatatttttgaagttttcctacaagttctactttaattgcagatggtaccttaaaccaggcttttcctgttatcataccgcaagccatatctgtagaacctacacctgtggaaaatgcacctaaagcgccataagtacaagtgtgtgaatccgcgccaataataacatcgcccggacctacaaccccttgctcagggagaagtgcatgctcaatgcccatttgccctacatcaaaataattcttaatatcatatttatctgcaaaatttcttacctgacggcattgttctgcagccttaatatccttatttggtgtaaagtggtccattacaagcgcaattctttctttattaaatacgcctttggcaccacatttttcaaattcattgattgcaactgggcttgtaatatcattgcctaatacaatgtccaagttggcttcaattaattgacctgcttttacagagtccaacccggcatgtgcagcaagaattttttgtgtcatggtcatgcccatttctatttccccctcattcaaactcataatcatttctatctattatactgtttttttcatcttttttcaacttcacaaaaaaacacagtaccgttttacgggtactgtgccgacaaaataatacgtgt

SEQ ID NO: 204 - DNA, 3345 bp, Unknown
  16S sequences of unknown bacteria
cgtggtgccgccaacgccaaacagaatcattaaaattgggatcatccatttctcccggccacgcattttgcgcaccaccgccgccacaccattgttaatggcgccggtttccatcacaacgcccaggaaaccgcccaccattaaaatgaacagctccacatccaccgcatcgaaaaagccctgcagcggcgccagaaggatcgcaccaattccctggggatttgcctccactgtatgatagctgcccgcgatgggaagtccgtccacataatcgtactgccctgcaggaatgatccaggtggcaatggccaccgctacaatcaggcccgtcagaatggcatacgccgtgggcatcttaaactgcttcaaaatgattcacctcattttcttgccccgcagggcacagggaccgatgccccttgaaaaacgggacacgcgcctgttcaggttcccagcgtcgccaccaggacggctttgatcgagtgcatccggttttctgcttcgtcaaataccacgctgtgggggccgcggaacacctcgtcggccacttcccggatatccacgcctttctcttcccactccttggccagtttggtgttcaagtcgtggaacgacggcaggcagtgcataaagagcacgtttttgttgcctgttttctccagcatttcctcagtcacacgatagggagagagcagcttggcccgctcaggaatcagatcttcctcgcccatcgaggcccagatatcacagtaaatcacatccgccccggccaggcaccgttcgtcgtggctgatttcaatggtcgctccggtgcgccgggccacatcctgcacctgagccagcaccgtcttgtccacttctagggacgccgggccataacccacaaagtgcatgcccattttcgcgcagccgtacatccaggcatagcacatgttattgcggatatcgccggggaacaccactttcacctcccgcaggggctttgcgcagtgttcctcgatggtcatcatatccgccaggatctgggtagggtggtccacatcggtcaggccgttgaagaccgggacaccagaatgcttcgccagcagctccacattctcctgggcatagccgcggtactcgatgccatcgaaaaaacggcccagtaccttcgcgctgtcctccagggattcttttttccccatctgagaggaattggcgtccagatacgttacggtgccgccctcctgggtcatcgccacctcaaaagcgcagcgggtgcgggtgctggtcttttcaaacagcagcacaatatgcttgcccttgagtgtgttcccacacacgcccgcccggcgcttggccttcaagtcgtggcccaagtccagcatatagcggatttcctccggggtaaaatccatcagcgttaaaaaacttctgcctttcaaattcactgccatgattgttcttctcctttttgttgttttgttgtttccaacacagattcccttcgctttcagctaccaatgcggcgaacgcgctgcagcctgtacgcagcgcacacagccagcgccccgcaaacccggcgcagcggaaaaaagaagccgcgttttttcagtctctgacaaagggcatgctcatgcaccgcgggccgccgcgcccccgcgacagttcgctggaggggatgcagtgtacggtgataccgtgctcttccagcaggcgattggtcacatagttgcgcgaatacaccaccacctcgccgggcgcaatggccagggtgttgctggcgtcgctccactgttcccgggccgcgtcaatgggattgccgccgccgcaggggatcagctctaccttgtccagctgtaaatggcgctgcagaatgtcggaaagccgcccctgttcctcacggatatgcagcgctccgcccttgcccagctccagcacatacacatccagatcccgcaaaatggccgggtgtacagtaaacacacccacgtccaccatggtgaacaccgtgtccagatgcatcagcgcgcgggtctttggaatgttaatggccagcacttttttgaaggtagggctgttttccagcactgtctgggcaaacttatcgatagaatcctcttccgtgcgctcggaaatgcccaccgccagcacttcgggactgagcaccaggatgtcgccgccctccaaagaggccgtttccgcccggtcgtaccatttgggcacctgcttgtagcgcgggtgatgctcaaaaatatacttgccgaacagcgtttcccggttgcgcgtttttgtgtgcatccggtggatcgtcacacccccgcccaccacggcaaaggggtcccgggtgaaatacaggttcggcatgggatccaccaggaagggatactcctcttcgcccagagctgtcagatccgccaggcgggtgcgttcaaagcgctgcaggtcgctcttgcgcacgcccgcttccatctgttccaccagttcttttaccgggagcgaggcaaaatactcttccagcaaatcgtgggtacgccggtgctcgatccccgcttcgcagagataatcccggataaactggcggcgcacggcttcgtccgtcaccgcttcagccgtcagatccgtcagatagagcacctccacgccgcactggcgcagcgtatcggcaaactgatcgtgttcttcctgcgccagcttcagatagggaatgtcgtcaaacaaaagccgctccagatagtccggcatcaggttttccagctcccgtccgggtcggtgcagcagcaccttgcgcagcggaccgatctcgcatgtattgtgcaggggtgaatgttgctccatagtcgatcaactcctttttttcaagtcctttctatgatttgcgaaaattcccgctttatgcccgccgccggctgaaaaaagaaaaagccgcccacaccaaaaaggtgcgggcggcagcgcttctacgatgctgtgttgccttcccctgaaagaaaagaatgctcccgttggtttcaagatcgtctctctcaagttgcttgctgcgccggaacagtcaatcgcgcatattgattcacaaatggtgcacttacgtcaatagaagcataaatatggggttgagcagcacccacaatatgaaggcagagcctcctgtaatcgcggaaaattggtgcaaataagtaccagaatgataaaaactgtcgattgccggatctgcaatgactcctttgcaaataagatagccataccactccgaatattcatcggtcttcaaccctgtgcttgaagaataacgtgtgatagggagatcaaagtcaaaaccgataccaagcatctctccagcatcgtttgtttgtagtttcggcgttt

SEQ ID NO: 205 - DNA, 28498 bp, Unknown
  16S sequences of unknown bacteria
gggggtggtgggggggggggagcttgccccccccgtccaccagcttgtcaaaaagacttttttgacaagctgatttttctcccagacgcggtattcagccgcctgggagaaaaatgtcatggttgctattataaaatttttttcaaaaacgcgcccgtatagctaatgggattttgcgcgatttcctctggcgtgccggtggcaatgatctcaccgccacgatccccgccttcggggccgatatcgagaatgtagtcggcggttttgatgatatcgaggttgtgctcaatgatcaccagcgtattgcccgcgtccgccagccgctgcagcacctcgttcaagcgttctacgtcggccacatgcaggcccgtagtcggctcgtccagcacatagagcgtgcgccccgtcgcgcggcgcgaaagttccgtcgccagcttgatacgctgcgcctcgccaccggatagtgtggtggatggttgcccgagcttcacatagcccagtcccacgtcgtaaagcgtttgcagcttggccgtgatgcgcgtatgcacagaaaagaaatccaacgcttcctcaatggtcatttcgagcacatcataaatgttcttgcccttgtagcgcacttccaatgtttcgcgattgtaccgccggcctttgcaaacctcgcaaggcacatagacatcgggcaaaaagtgcatctcgatcttgataatgccatcgcccgagcaagcttcgcaacgcccgcctttcacattgaagctaaagcgattggccttatagccccgtgctttcgcgtcctgcgtggaggcaaacacatcgcgaattaggtcgaaaacgccggtatacgtcgccggattggagcgcggcgtgcggccaatgggcgattgatcgatggcgatgaccttatccaactgttctatcccctctatcccgtcgtgcgggccgggccgctccttggagcggttgagcgtgcgggaaagcgccttatagaggatttcgtttacgagcgagctcttacccgagccggatacgccggttacgcaggtgattacgcccaaagggaacgtcgcgtcgatgttcttcaaattgttggcgcgcgcgccgcgcaccgtgagaaaaccggaaggcctgcgccgggaggaaggcactgcgatcctcttgcgcccgctcaggtacgcgcccgtgagagactgcggattggacatcaattcttccgccgtgccgcaggcgacgagctggccgccatgcgcgcccgcgccgggaccgatgtccacaatgtaatccgccgcgcgcatggtatcttcatcgtgctccacgacgatgagcgtattgcccaaatcgcgcaggtttttcaacgtggcaagcagcttttcattgtcgcgttggtgcaagccaatggacggctcatccaaaatatacaatacgcccaccaggctggaaccaatttgcgtggccaagcgaatgcgctgcgcttcgccgccggacaacgtagccgccgcgcgcgacagcgtcagataatctaggcccacattcaccaaaaagcccagccggctgttgatttccttgagaatttggtttgcgatcatgcgcgccttttcggaaagctccacattttggaaaaaggccagcgaatcgcgcacggacatatcgctcacttccgcgatggaaaggccgccgaatgtcaccgccagggcttcgcgcttgagtcgcttgcccttgcaatccgggcaggcgacgttggccatgtatccctccagcacctcttttgcgctctccgaattggtttcgcgatagcgccgctccaaattgggaatgatgccctcgaagggcgcagtgtaagtgtgcgacgcgccattttcgcgccggtaggtcaaagtaagcttttcattccgggtgccataaagaactttgtccagcgcgctctccggcaaatcgcgcacgggcgtatccaaggagaaaccgtatttttccgccagcccttccagatacatatgcgccatcgtgccgccatcatccgcggaattccaaccgctcacgctgatcgcgccttcattgagcgaaagcgaaggatcgggaatcacagcggcgggatcgactttggtgagcacgcccagccccgtgcaggtcgggcacgcgccatagggattgttgaacgagaacatgcgcggcgtaagctcctcaatagaaatgccgcaatctgggcaagcgtagttctgagaaaagagcatctcttccccatccaccacagaaaccaccaccaacccgccggacaggcccatggccgtttccagcgaatcggtcaggcgcttttgcatatcggcgcgcacgattaggcgatcgaccaccacctcaatggtgtgcttttgctttctattgagcgtgggcgtatcgtcgatttcgtacatggctccatcgatgcgcacgcgcacaaagccttgtttggccatatcctcgatgagcttggtatgttcgcccttgcgcgcccgcacaagcggcgccaagatgaggatacgcgtgcgttcgggaagcttcaaaacctgatccacgatttgatccaccgtttgctgcgagatttccttgccgcactcggggcaatggggcacgcccgcgcgcgcgtaaagcaagcgcaggtaatcgtgaatttccgtcaccgtacccaccgtggaacggggattgcggctggtggttttctggtcgatggagatggccggggacaatccctcgatggaatccacatccggcttatccatttgccccaggaactggcgcgcataggaagacagcgattccacatagcgccgctgcccttccgcataaatcgtgtcaaaggccagcgaactctttcccgagccggaaagtcccgtcatcacaatcaatttattgcgtggcaacgtcacatcgatatttttcaggttgtgttcgcgcgcgccgcgaatgcggatggtatctctttcgctcatattcctctatttccgtcccctattgcttctgcggcgcgccctgtgcgagcgttcgccagaggcgtcgatcttttcacccttgaggcgcaacatctcatcgcgcaacttagccgcgcgctcaaagtccaactgcgcggccgcggcgagcatttgctcttccaggctgtcaatggccatacgccgctcctgatcgtccattccagcggcgccgccgtcctcatccggcgcgcgggaaatctccatcaattcacgcaccgccgtgcgcacggtttgcggttcgattccgtgttcctggttgtattgcatttgaatcccgcggcggcggttggtctcatcgatggcgcggcgcatggaatccgtgatggcatcggcgtacataatcacccgtccatccacattgcgcgccgcgcgcccaatggtctgaatcagcgaagtttccgagcgcaggaatccttccttatccgcatccagaatggccacgagcgaaacttccggcagatccagcccttcgcgcagcaggttaatgcccaccaacacatcgtattctcccaggcgcaggctgcgtagcaacttaatgcgctccagagtttccacatcggaatgcaagtattccacgcgcacgcccatttcgcgcagatatgaggtaaggctttcggccatgcgcttggtgagcgtcgtcaccagcgcgcgctggcccttttccgctacctcgcgtaccacgccgagcaaatcgtccacctggccctgtgccgggcgcacgacgatttccggatcgaccaggcccgtgggccggatgatctgctccaccacgcgcgtagcgcgctccaactcatagggcgctggcgtggcggatacatacaccaattgctttgtgcgctcctcaaattcataaaatttcagcgggcggttgtcaaaagcgctggtcaagcggaatccataatccaccagcgtgcgcttgcgggcatagtcgccgttgtacatggcccggatttgcgggatggtgacgtgggattcgtcgataaacacgataaaatccttggggaaataatccagcagggtaaacggcgcttcgccgctcttgcgcccgtcaaagtagcgggaatagttttcaatcccgttgcaatagcccacttcgcgcagcatttcgatatcgtagcgcacgcgctggtcaagcctttgcgcctctactaagcgccccgcccgttcaaacgcggcgcgctgttcctccagatcatgctcaatttgctcaatgcagcgatccagcttatcgcgggacgtggcgtaatgcgaagccggaaacaccatcacatggctcaaatggcgcagcaccgtgcctgtaagggcgtccacctcgctgatgcggtcgatttcatcgccaaagaattccacgcgcagccctttttccatattgcccgcgggaatgatttccaccacatcgccacgcacgcgaaaagtgccgcgctcaaaagagaaatcgttccggtcgtactgaatatccaccaattggtcgatcaattggtcgcgatccagttttgccccttcgcgcagagagatggaaaggccctcgtattccgcgggatcgcccagaccgtatatacagcttacggaggccacaatcaccacgtcgcgccgctcgctcagccattgggtagcgctgtgccgcatgcggtcgatttcgtcgttgacggaagaatccttttcgatgaaggtatccgtggaaggaatataggcttctggctgataataatcgtagtatgagacaaaatagcccacagcgttctctggaaaaaactcgcgaaattcgcccgcgagctgtgccgcgagcgttttgttgtgagcgatcacgagtgccggacggttcatcttttcgatgatgctggccatggtaaacgttttacccgaacccgttacgcccagcaaaacctgatgatggtcgcccgcttgcaagccgcgcaccagcgcatcaatggcttgcggctgatccccctgcgctttgtagggcgcatgcaacttgaattcactcatacccatttacctctccaatgggtattataccacgtttgcgctccatttccaacggctccagcaagaattaaactcacgttcgattatcaaattctttcctttactgttggcaatgggggcaaaaatagctgtttgccgcgcccatgcgctgcgaaacaatggctgtaccgcaaaccgggcaaggcagcccctcccggtatcccacttgcatggcgctatagcgccccaattggttgtataagtcgcgctcataatcggatccgcccatggccaacgcgtccagaaaaacctcgcgtaccacgctatacaagcgctgccattcctcccccgacagcgagtccccgctccgcgcgggatgaaggcccgcgcggaacaatacgtcgtgaacataatagtttcccatacccgaaaggatttcttgttttaagagcagcacctttacagggcttcgccggccggcatacgccctggcaaagtcctgttcatccacgctgagcatatccggccccaatttgtcaaagggcggatgcgcctcgcccggccccaccgcatgcaggctgccaaaccaccaaaaatggataccgatcttgcgcccatccgcaagggaaaaaagtgcgcgccatttttccgcaggcgcttccccggcttcgctcaggaggatttccccacccatgcccaaattgatgcggaggcgatatcctccttccaacgccacatccagccatttccccttggcgcgcactgcttgcaccactcggcccagcatgcattcccgccatgcctcttccggcaaattcaggcatttgggttgcgcgatgcgcgcctcgtacagcgctatacccggcagttcctgcgccatttgccgcgcaagatggtgaatttccggccactccggcataaacgttcctcctggtcagtcggttttcaggcaatcgatagcggcgcgttccacgggcaagcccgccgcatagcggcggatgaatgctgcgaatccttctgcttcgctttccagcggcttcaccgcctcgcccgccttgccagcgaacaccttctgttccaaatacgcttccaagctttcgccttcctgacggtaagcagcatacgcggccagcaaagcaatgccccacgcgccgccttctcccgccgtgtccagcacggagactggcgtgcgaattgcggcagccagcaatctctgcgccaccagcggcgttttgaacaaaccgccatggccaaagatcgtatcaatccgcacatcttctttggccagaatatccatgccaagcttgagcgtggccagcgcggaatacaggtgtacgcgcatgaagttcgccagcgtcaattcagcgtccggcaaccgcgcaaagagcggacgtccttcctccatgccggtgatgtgctcgccagaaaggtaattgtacgcaatcaagccgccgcaatcggcgtccgcttccagcgccttgcggaaaagcatgccataaagcgcattcttatcgatatctgcgcccaattctcgagcaaattccgccaacaaccccacccaggcattcaaatcagaagtacaattgttgcaatgcaccatggcaacgggcttgcccgcaggcgtggtaaccatatcgatttcccggtgtacttcgcgcaggggcttttccagcacgaccatggaaaagatggatgtgcccgcggaaacgttacccgtgcgctccgccacactattggtggcggccatgcccgtgcccgcgtcgccttcgggcggacacaagggaacgccgggcaaaagatcgccttccgtgtccagcagccgcgcgccctccgcggtcagcgtgcccgcatcatccccggcaaccaagggttccggtaaaatggcatccagtgtccagggcatgcccgcctcccgcgccagcggcgcaaacgccgcaagcatgcgcgcgtcataaccgcctgtagcgctatcgattgggaacatgccggaagcgtcgcccacgcccaaaactttgcgtcccgtgagcttccaatgcacataacccgccaacgtggtgagataggcaatatctttcacatgcggctcatggtttagtatagcctggtataagtgcgccacgctccagcgctgcggaatgttgaagtcaaaaagcgccgtaagcgcgtccgccgcctcacctgtgatcgtattgcgccaggtgcggaagggcgccagcagattgccccgcgcgtccagcgcgatataaccgtgcatcatcgcgctgatgccaatcgccttcaggcgcacgagctttgtgccgtaacgctcctccacatcgcgcttgagctgcgcatatgccgccgccaggccctgccaaacgtcttccatatgatatgtccacacgccattttccaagcggttttcccagtcgaagcccccagaggcaatgggttcgtgattctgcccaatcaaaacgcccttaattcgcgtggaacccaattcaatgcccagcacagcatgtccgttgtcaatccattttcgcattgcctccactgtcatcgcaattctcccctcttaatgtttatttttcgatccacatgcgcggaattgtctaaaatcatctataacataagcaaaaagcaggagttatccatctcttgtgcgacaactcctgccaggttttgcgaatctaacgatacgtgggaatgcgctccaaggcgcaatccagcccgtcatacgccacgataaagggcggctccatgcgcgccaccagcacatcgtgcgaaggatgcaacgtgcgggccaaatgcgtcataaacacaggggcgcccgttttcaaaacgcccgtggccagcatggttttgagcattacgcgcagcatttccacagaattgtgctcaaagcaacgctcatcgccctcaatgcccgtggtgctatccaccacccaggcatccagttcatgttcgcgcagttcctgccatgtatcatacagcatccagccgccgtccacggcataataccaggtggggccgtcttccatcataaacaaatagtgcagcgggatttcgcccggcaagtggctttcatggtttgccgccaatgcctttatgcggccgcccttgataccaaattcatcgctgggcgctagcggcgtggccgtgatataatccgtttcagaaatcctgcgcgcaatcgcccgcgagcaatgcacgctcagcggcgggcaatccgcctcgtggcggcgcaaggcgatttccgccagcgtgcgcaaattcaaatgatccggatggctatgcgtgatcagcagttcattcacatcctccaaacggatgccgttggccagcagcgaatccatcgcgtgctgggggcaatcgatcaaaatatgcccatttaccagcgcgcagctaaaacggcgcaatgaaccatccgcctccggcccattccaatcggcagcgccggtgcccaaaaacaataattcacaattttttttctcgcccatgtatttcccctctactcaacacagaatgccgtaccggcattataccagaacttcgtgaactttacagcagttccaagaaaaaatacgattatccacgtcccttttcgcgcccaaatccggtgcggtactcgctgggagaaacgcccgtcctctttcgaaactcttttgcaaagtagctggcgctctcaaagccgcacatcctgccaatttgtgaaatttgcgatgccgtataacgcaaaaagcgcttggccttttgcacgcgaatctggttcagagcgttcattaccgtggtccccgcctctgccgcatatgcatggcaaagcgcaaaccggctcatgcccacagattgcgcaatttcctccagcgaaagcgctctggcgtattcctgctccaaaaagcgattgacccgctcgcgcagcgtttcgccgcgcggaaacagcgcttctagcaattccaccgcccaggtataggtgtgcgcggaacgaaccatggccgtagccgcgttctggcatagccgttccaactgttccgtgctggacgatagaaaatccggcgctgcgaaaaacatccaatctcccacgccatatgcgtcgagcaacgcctccgcgccggtaaacgtgacccacatggtgtggaattggcctcccgcactctcgtatccatgccgaacgtttgcccgagtaaacaagccatacccttgtcctaaagccctggtttcgccactcgcccaaaatcgcccgctgcctttcaccacccacaaaaactggtgtgtatcaaagccctgtgggcggtcaatcttgccttgaaacgcgttttccccaatggtgatggggcgagcgggcaaattgccggattcgcttcgattgatttctgcaaacatagcaatatccttatagcatgagcaattatttgtggttgacatcctgctttatgcgcaatacaattgtattagcttttgtgagaactgtcaagccaaaatcaagaagaaggagatttttctatgaaaaagattcgcgtaggccttattggatgcggcggccggcaaggctcgcacatcgacgctttctcgcacatggacgacgtggaaatcgtggcggtggccgatcccgtggaagagcgccggaacgcagccgcgaaaaaaacaggcgcgcagcgcgtctatgccaaccattcggaactgtacgaccacgaaaacgccgatacgctggacgcgctcttcattgccatcgagccgaccgcgcacactgacacggaaacccgcgccatcgacctgggcattcccttcctggtggaaaaacccatgacactcgacttgaaccaggcggatgaaatcgcccgccgcatcgccgagaaaaacctgatcaccgccgtcggcttccaagatcgctatttggatctgatggaaatggtgaaagacgaacttccgcggcacacgaagggctgcctggtgaacggcgcgtggattggcggcattcccggcgtatggtggtggcaaaaacattccacttgcggcggtcagctcgtggagcaaaatatccacctggcagatgggttgcgctggttgtttggcgacccgatctccgtgtatgccgtctcgtcccgcggcatcgtgcgcccgggcatagacgccagccccgagtacgatacggaagactattctgtttgcatctatcgcttccaggacaatgtgactgccacgctggagagcgcctgctattccaaaaccgtgcgtcccaactgcggtcttgtaatcaagctggacgatatgatcatcgactaccgtctgcgcaacaacctgatcctcaccacggcgaataaaaccgtcgacattcgccgcggcaatgaccagaccctcgatctggatcgcgcgttcattcacgccgtgcagaccggcgacgcgagcggcatccgttccccctacgccgacgcggtgaagtccctgaaaatgacttttgctgccaacgaatccatggaaaccggcaaggtcgtctatctctaaaacgaaaggagcgccaaaaatgcgaatttgcattcccgtcccctgctttttcggcaagatggacttttgcgaagccatcgccaaaattgcacagcttggttttgacgcggcggaaacctacaattggaaatcgctggatctcgacgcggtgcgcaacgcctgcgagcaatcgggcgtggaactcttgagcatgtgcaccacggaattcaacatgaccaatcccgccaagcgcgaagattggctgaacggcttgaaagagagttgcgccgccgccaagcgcgtgggcgccagcaagctgatcacccaggtgggcgcggacacaggcgaagaacgcgcccgccagcatgacagcatcgtcgccgcgctgaagcaggccaaacccattctggaagacagcggcgtgaccatcatgatcgaaccgctcaatatctatgtcaaccatccaggatattacctatggtcttcgcgcgaagcgtttgaaatcatccacgaagtcgatcatcccctggtaaaggtggtatacgacatttatcaccagcaggtgatggaaggcaatatcattcccagcatcacccaaaacctggattgcatcgcgcacctccacagcgcgggtcatcccggccggcacgagctgcaattcggcgaaaacgattacaaggtgatcttcgccgccgtggacaaagcaggctataccggcgcttgtggtctggaatacgggccgaccatggatagcgtggaaagcctgaaggagttccgccggatttatctataaacggaattctgcaaatctacttgcgcatccatatgttttatacgaacgcggtttgaacgagaaacaaaatcccaagagctgttctctggacggcgtctcttccggcgccgtccagacaaaatcatctccctatgcttttctgaaaaatctttttcgcaccattctatttgatcgtgtaatttggccgaacaaaaacattgcagcgcggcaaaaaatgccttgacaaaatcggtagacagttgtatactcacagtaacaaaccgtctaccaaggaggcgttgctatgtctgtttccatcacagaggctgaaagcaaaatcctgtcgctattgtgggagcaatctcctttaaccgttgcggaaatcaccgcagcgctccgggagaagacaggttgggaccgccacagcgtcatcagcctgctcaagcgcatgcaagcaaagggaaccgtgtgcgtagaggacgcaaaacccgcgcgccggtattctcctctggtcgaccgaaatgaggcgaggcttgagcaagcccgcgggcttatggacaaatttttcgacggaaagcccgtacgcatgatgagcgccatggtgcagggtgggcagctttcgccgcaagatatcgatgaactcatgcgcatgctggaaaaagcgcgagaggagctgaaacaggatgaaacaagccgttgatcttttgctctcacaatccatcgcgggcggaattgtgattgcagccgttctgctcattcgcgccgttttgctacggcgcgccagcgcccgctgggtgtacgcgctatggctcgtagccgccatacgtctgctgcttccgctgcaatggcccgtgtggccttcgacgcaaatcgggcctgcgctatcgcctgaaaccatcgcgatcgcgctcgcggaatcgccctccccgctttccgccgcaaattcgcttgctgcaaacgaaaatttcgcactttcatctccgcgcgtggaggaaagggattcttcagcgcttcaatcggaagtgcccgccgagtccctccctgtccgcgcaccgtcatggaaggaagtggcattctgcctgtggcttgcgggcgcactggctacggcggcatatatcgccagggaaaacgtgcgctattatatgcagctcgcacgcagtgctgtgcgcgtgagtgcgcctagctgcatccccgtctaccgctcctgcgcggattcgccctgtctttcgggctttttccgaccgcgcatctacgtaaatgaagccacgctcgcggaaggcgcgctgcaccatgtccttttgcacgaaaccgctcacgcgcggcggggcgacaatttctggctgttgctcaaaaatctattgtgcgttttatactggttccacccactggtatgggtggcggcgtttgcgtccgcgcgagactgcgaatgtgcatgcgacgaatgcgcaaccaaagcgctatccccccaagaacgaatcgactacgcgcagacgatcgtgcgcctgagtggtcgcgcttccaaatatgtttcgttcgccagcgccatgcgtacggacttccgcgcgaccaaaacgcgcgttgcccgactggtgcgtccgtccccttgctcccgacgcgcggcgatcctagcggcggcgtttctgcttgcgacctgtctggcgagctttgccacaggcgaagctcagcgaaaaagcgttattacgctgcctgaaactttcgaaaccatcctggattacgacatcgccggagacggcatcgtactcctcgcagatggctgcctctattctgaatcagccgggcaatggacactgatgggcgaatttccgctggctacacgcattgcgacaggcacagccgggacgttcgtgtgcgaaaacggcgaatccgccgatgtgctcatgcgtgtcggcacgggcggggcgctcatagaacgctatactctgcccaaagccctgcgcatcgatcacatggaagtgctcaaagaccaggtcatcttcaccgcgacggacgcttccgcccccgccccaggggcgctcgacccacggaaggcctattccctgaacctgtccgaaggcacgcttgccgagctttccgccggtgcggtctacgacctgtgcgcggatgcgtcaggcgctttgttcctattgcacgaggatttctctggggactgggccatctcccaagtagacgtttcggctgccggaaacgcgcgggaaatctggcgtggtcccatgcaatccgtatccgaaattgccgccggaaaagatggactctacctgctcaaaacggatggaaccatctggtggtggcgcgccgcggatgtgccggaggagcgagtgcccagcgtgccgggcgaaaccgaatactaccacatgctgcgttgcgacggcggcgcgctctacgcctgcgcaagcgatttcgaagccagtacgcaccggctggtctcgctcctgcctactgtcctggaaagtgagcagccagtgcgtacgctgacaatcgtgaacgccgaagtcggcacggcgcgaagcgactatatggaatcgtggatgcgggaacagtatcccgacgtggaactgcaatatctcaacatggacacggcgcagctcgccacccgcctgatggccggggacgcgcaagtggatctgatatatgagcacgcttctctgatggacgcatacgctcagagtggcgcgttcctccccctgaatgcgctacccgccgtgagcgaaagcatggaatcatctggatttctctcctacgcgagcgcgctggcggtggatggcaatgtctactgcgttccagaactggcattcacctatgcgtacgcgctgaacgaacctctgcttcaggcgctcaacctccaatggccgcagccgccatacacctgggaaacgctcgccgactgggccatagatgccctcgccggcacgggatatcagctcttttcggacgtcgtcaatcctccctatatcctctatctggacatgcaggcccgctcgggcgcggacatcaacctggactcgcccgccttccggcaatctatggaagcctaccggcgtctgtggcaagccgggctaatcggcgaaggaagcgatgaaagtcgtgcgctcgccgtggaaacgacgctggacgcaaggatcgcggctttcggagaaggcatgcgcttcgcgcctgtggcaaatctggacggaaccgcgctgtatccggttgaaatccacgggtattacgtctatacgcgcacgcaaaacgccgatcttgtagaagcgtacctggcggaatactgctctgcgcgctgccagaacgaggtggaatacggtctttcgtatcaaatgctcctcgcggacgtcgaaggctacagccgcgaatggacgaacatggagccggaatacgcgcaggaaacgaacgcattccgcctcgccgccgcgcaatctcccctcttgcgtacgaaagcgggtgtcgacattcgcctcgcgctgggaatagagacggatctgcgtgcgtatcttaatggggaactttcgttcgatgaatacatcgtgcgcgtacagccgcaaatcgatatggtgcagtatgaatagaaagatccacgccgcaagccgtgttccgccgcgaaccaggcgcggcggaacgctcaaccgccgcctattgctgctggcgctgccctgcttcgcgggcatgctgctgttttacctattgccgctaatcggctcagcgcgctattccctgctggacagcgcgttcacccaacgcttcgtgggactcgagcagtattgcgctgtcttagcaaaccgcaatttccgcgtgggcgttttcaataccgtcgtgctcgccgcgctgtgcgtacccgcgctactggcgttttcccttccgctgtcgctcttcgttcagcgccatggcactgcgctgcccgcgttacgcgtcgccttgctaatgcccatgctgctgcccagcgcggcggtgaccgacgcctttcaaaaattcccgctaggcggtgcgcgcggcgtgcttttcgctatttatctatggaaacacgccgggttttcgacgctggtctttctggcggcgctctcgagcgtgcccggcgagctgtacgaagccgcagcgctggacggagcagggagcgcgacacgtttctttcgcattacgttgccctccatcgccgggatcgtgggattcgtcgcggtgctggcggccgcttacaacctgcgcctgtttcgggaagcctatctgctgtacggcaattatcccgtcgacggcgcgtacctgttgcaacactatatgaacaaccattttgcccggctggaatatcccgttctaaccgctgccgcgctgctgtttttcggtgcgctgcttgcgcccgctgccctgggcgcgatcctccgggaaaggaggcgcacgctatgaggaaaatacgattgtcaaaggttggggccgcgctgatcgtcgcgctgtttctcctgccaccggccatgatcgtgctttcatcgtttatgagcgacagggatctagacaagatttacgcggacggagccgcgttctgtccgattccccgggaagcgacgctttccggctactgggagctgctcttcgcgagccaggcctatctcgcgacgttctggaattcgctgggaattgccctctgtgccacggcgctcaacgcggtggtttcgctcgtggccggatatgcgctcgcccacgcgcgctttccggggcgcggatgcctgaggttcttttatggattcgccatgttgctgccctttcaggtcacattgttgcctcaatacctgctcgtccgtgctctccatctatacaatacctggtgggcgctgatcctgcccgccgcgtttgcgcccatgggcgcagttttgctgagccggttcattcgcgaaatgcccggtgccatgctcgaagccgcgtatctggacacttcttcccagctgcgcgtgctcacgcgcatcgtcgcgcccaacgtgcacgccgggatcctggcggcggcgctgctcgcctttgcagaaagctggaatatggtggaacagccgctcatcctgcttaaagacgaatggcttcagcccctttccctgcggctgaatgcgctcacgtcggcaagcgcgcgctttgccggtgcggttctgtacatggttcccgtcgttttgctgtatttcctatttgaaaacgaactgatcgaaggcgtgaaacacctgaagctgtagggaggatcaaccatgaaaaaccgccgccccgcgcgcgctgccatcgccttttttgctgtgatgctcgttctcaccttctgttcacgcacaatctaccgcaccaccctgccccgggtgcgcgttgaagccgccacaggcggcgtgctctcctatcgctatgatctgacggactttgctctgcgcgcagaggaatatgcgtacgcatacctaccctttccactggaacaaagtttgaccgttgaaaccgtatgggtgaagccgggcgacgtcgttcaagccggagacgcgctcgtctcgttttacgcgcccgagggggaacacttggctttgagcgcaaacgccgccgcactatccgcagaggcagaactttcccacttggaaagcgccattgcaagcgcgcgtgaggaactcgtccagcggctcgatggcaggcagacgcgtgagcaggccgccgccatccgcgcggaaattgaccgactcgacgcgggcttctatgaaggcaaaagcatcgcgcaagcacgcgagacggtaaagcaggcgcgcgagtatgcagacattttcacctccctgcaaaacgacggctgggttctacgcgcccaagcgaccagcacgatatgcggtgtatccgcctgcgaaggagcggcctacggcggcctttccccgctgtgctcactggccgctttaaaccaggaaatatacctctacgcagttttggcgggagcgcccgacgcacgcggcgcacagtggcagatttccgccgtgctcgagacggacggcggcgcggtgcccgcccgaattgtgcctgcaggcggcggtgcggtgcgcgtttatctagatggcgcctgcgcgcctggagacgtgctttccctcaccgtacgcctgcaatccccctaccgtcaaaccctcctgcccctggaagccgtgcggaacaaccacgtttttgtcctagaagctgctacgggcgactggggggaaatggtgtataccgttcgcgaaaaaagcgtgataaccggcgaaagcgatggcgtacacatttccgtcctcgacggattgtcgcctggcgacaagattgtcgtttctactggagaatctctgtccgacggacaaagtgtgcttgtcgatggaatttgatgcgcattcaggtgaaaaaacagcattggaacttttttaattttttacttgcgctttatcctgcgctgtgttatactaagtgttgctcatgggcgatgatggttggaacccgtgcggcgttgtgtcgtgaaccttgtcagggccggaaggcagcagcaataagcgattgcagcgcgcgccgcgggaatttctggcctgagcccatgggttttttcataccctacgcccattgtgcatatattgtatcaccgggagggatatatgtatgcacaacatcgccgccgcgcacgatctgcgcatcgccattcacaccatgctggccagtgcgcaaatgattgctatagaagctggcgatcgttcgccgcgcatctgtgactacgttggaatcctggaggaaaacgttcaaaacgccacgcgccttttgaaccatatgctggaggattcccgcgccatggactgcacgctgtcctgcgcgcctggcgatgcgattgccttgctgcaaaaggttgttcgtcaattccagcctgccgcgcgccagactagtattgagctcgcctttgaaaccgcatcgccttcgatttgcttttcctttgacgcggacaaactggagcgcatcgcggcaaatctactctccaacgctttgcgccacgcatgccatcgcgtcgttttgcgggcacgcgcctttggggagcggtttgaattggaagtggcagacgacggcgcaggtttttcgcaagatcccctatccctgtctccacatagtgaaacgcatggattcggcctgcgagaagtgcaacatttcaccactttgcacggcggcacgctgcacgccagatgtaagggaggccgcacaatctttggggtcacgtttccgctgcgtggaaatatgcaggacaaatccgaagaaaatgcattcctttaacgaatcccgtcttgaaaatcctgcccattgcgcgtatactaagattcaatttcatacgatatgaggtggccaattatgatggattttcgcgtgattcgtgcggcggatccagaggttgcgcaggcgatggaggctgagctagcccggcaacgtgcgcatatcgaactgatcgcgtcggaaaactttgtgagtcccgccgttctggcggccatgggttcgcacttgaccaacaaatatgccgagggctatccgggcaagcgctattatggcggttgtgagtgcgtggacgtggtggaaaacctggcgcgcgaccgcgcttgccagctttttggcgcggaacacgcgaatgtgcagcctcactccggcgcgcaggcgaacatcgccgtgtattttgccctgctggagcccggcgataccatcctgggcatgaacctttcgcatggcggccatctcacgcacggcagcccagtgaacctttccggcaaatacttccacttcgcggcctacggcgtaggcgaagacgaatacatcgattacgacgcggtgcgccagactgcgctggaatgcaagcccaagatgatcgtggcgggcgcaagcgcttattcgcgcgagatcgatttcgccaagttccgcgaaattgccgatgaggtaggcgcgctgctgatggtcgatatggcgcacatcgcgggcctagtggccgcgggcgagcacatgaaccccgtgccctatgccgatatcgttaccaccaccacgcacaagaccttgcgcggcccgcgcggtggcatgatcctctgcaaaaagaagtatgccaaggccatcgataaaggcatcttccccggcacgcagggcggcccgctgatgcacatcatcgccgcgaaggccgtatgcctgcacgaagccatgcagcccgaattcaaggcctatcagcacgccatccgcgtgaacgcgcaggcgctggccaaggcactcaccgaacgcggcgtgaaattggtttccggcggcacggacaatcacctgatgctcatcgacctcaccggcagcggcgttacgggcaaagacctggaaaagctgctcggccaggcgaacatcaccgtgaacaagaataccatcccgaaggaaaccctttcgcctatggtcaccagcggcgtgcgcatcggtacacccgccgtcaccactcgcggtatgcgcgaagccgaaatggtggaaatcgccgatttgatcgcccagaccattcggaatggcgaagccgccctccccgctgtgaaagcgcgcgtggaagcgctgtgtgcccggttcccgctctacgagaacgacgtttgggcataaagcgttccaccttcaaaccgataaaaaagaattctggctcgcggccaagcgtcgcgagccgcatttttgggaaaaacacctttcaaacaatgcctctatgagaaccggcttttccactgccgatcctcataggggcatcatacatgctttagtccaattcccgcgaccaatcgaattgtgccggatctggcgtcacccacgggacgcgcgtcggcatgggcgtcgcgtctggctccgcataataaatgggattttccggatcgggatcggtcggatcccagccatagccctttacaagctcgggaatggcatccagcaattgctgtttaatttctggcatttcttcgccttttatcgagcgcaccggcgtgccctccgggcaattgtcctgaatccacttggcgtccttggccaacaggcggatgcagccgcccgattcattttcccccagttcctcatatttcgaccagaacatatcgttggaatctttggattcaaacggaaccgagtggaaaagaatgtgcccgctgatgcgtgtggcgtacttgccatatgtaccgtccaacatatagcgccattcatagcgttccttgagcggatacagaccatcggggaacttgctatccttatatcccgtggaacaaatcatgtatttcacaggaatggtatattgcccgttttcatccagcgtataaatcgtcaccacctgcgccgttttgttcacctcaatcaaatacggcagttccaccgccactgccgtaggcgttggcatgggcactggcgtaggcgttggcgtaggcaatggcgtggggctaggcgtaggactgggcgtgggcactggtgtgggcgacggagtgggcgacggcgacggcgtaggcgtgggcgttacagtgagcgcaagttgcacatcaattccgtctggtgacacactgggacgagcgatcgcaaaaagaaataagccgccgatgcaagccaccaaaacccccacgctgatccatatgtgggcgggcttggtgggctttttgcgggattttgccatgggtacctcctaatcaatccatccattctggtttggtataccgctgcaacggcaaaaatgccgcgcctgccaagggttcgcgaggacgcgcgtgttccagcgcgcattccagcacgacgggaattcccgtttcccgcgaaacctgggccagaacttcccggccatagaggaggttttccggctgcgtgagatgggaaagattggcattgttcacaaggcccgtaatcggaaagcgggcgcgttcctgcatggccgccagcatggaaatgatttgctccacgctgccagaacgcggcctgtatgggttgacaaccgcgagcagcgaaaggccaaaccggtcgaaatgcggcttaaaccggcccagcgcccgcgcgcccgcgtcatctccgcccacatccagcaccacgcggcggctttcatccaaaagggcagcgtccacatccgccgccaaggagggaatatccaccgatgtattggcgaattccggcttcaccaactttacgccgtgcgcctttagcacctgcggatgctctgcgctgcgaaaatagggattcacaatgtccaaatcgaccagcgttacgggatcccgctgcgccaaggcaatggccagattcatggcaatttctgtttttccactgccatagtgcccaatgatcgcctgaatcctcttgcccgtcatgcgtcgtcctccccattttcatcgccttcaaaaaacatgcgccgttcgcggcgcgaaagcggcttcacttcttcttctgccttcggcgcctgcgcgttttccggccgcatatattggctgtacgccgaggaatccaacgcttcgccgtcatcctcgccttctgccgcgtcgtatgcgtcggaatcctccgcatacgcatcataatcttcatattcttcatcgcaaggtgcgtatgtgtcggaagaatccaagccgccttgtcccgcacgcccggcagaaacagggcgtgcgggcgcagcgggaggcgtgaaatcctcctcatcaaacatcgaggcggattcgctcatatcttccatttcttcataaaaggcttcttcatcctcccgctcgttgcgcaaagcgctgctgtgaaagcgcagcggttgcggcttgggctgcgcgaattccaccgcccggcgcgccatagcgtcgtcatccagcaaaaccggccgctttttgcgaaaccacagccaatatggccgccagcgcagcatccaaatcagccaatccacaaacaagcaagcgatgatcagccccaccaacagcgcgacccaatggctggaaaaccaacgcaaaaagcccgaaccgccctggagcaggctccaagcgatatccgccagccaacgcaaccaccccaggagggtctgaaccaacgcatccgcaaaggcgctctgccccatggtttcacctcgctattcaatctcttctatgcgcactttcaccgtagccggcgtcaggttgaacgtcacttccgggttttcgctggaaagctgcacgctgatgggcacctcatgctcgccagggccataattggccaaatccacagtagcaatcaagtcttccgcggtaagatcggaaaccgcgctgcgcggcccggtggcaattacggtgatttgcgattgcgtatcatccatgtacacgcggaaatccgagctgacgttcacataccgcaccacgacattttcgaccacttgagaagcgatctgttccgccacttcaatcgtcacatacacctgcgcgggcgaaatgttttcgaagttgctcaattccgcaatgctggcgcgcgcggaatacgtgctgcgcaaattggaaaccgatatgggcgtaatccgcagcacatccaggctatccagcaattcttgctccgcggccacagttgcgctctcgggcgaaatcgttacgcccgttatctcatagccatccgccacagagcccttgaacacatcggaaatttccgtggaaatggggatggtcttggtgggatacacctccgcgcgcaccgtggacgaagtggaagtgcgggtgagcacattggtggagagcacattgccatccccgtccactaggttcagcgtccacgagcggttgaacggctcggtgcgatccgtcacatccacttgggcgaccgcctcgctcacctgctgcaccacgctggcagggccgcttacggtgatcgatgacgggttgacgctggccgcgttataccaatagtcctcgcgcacttcgcccacgaattccacattcacgggcacatagcgcgtatccagttgttccacctgcagttccaccgaagcaggccaaatattcgtcacccggccatagggcgtggttgcgcgcagggagagcacttgcgtgcccgcgcgcgtaatattgctcagatccagcaccacatccacattggaactgctcaccaaggcgtagttcgattgagagacctctacttccacgctgatggaggcaagctgcgaagttacatccgtgagcaaggcgaggttattccgttgcaaaatggtttgccctgtgagttgcacgcccacgccggagagcaccttgctgcgcgtgatggaagtatcgctggaaaccacataggcccagagaaaaatcgccaagataatggaaagaatttttacgccaacatgccgcgtagcgctctcccggatggtgcgcccaatctgcttgagcgcctcgcgcagatcattctttttcattttgcgcgccctccttccgcttgaaaatggtcgccagcggcgtttgcgcgctttccggcgcgaaaagatccgtcaaaagcgccgtgagcgccttggcatccaaatggcgggtgagcttgccttcgcgcgccgtggaaatgatgcccgtttcttccgaaacgatcagcaccacagcatcggtcgtttccgaaatgcccagcgccgcgcgatgccgcgtgcccaattcgcggctgatggaagaattttctgaaagctgcaaaatacaagccgccgccacgatcctatcgttgcggatgatcattgcgccatcgtgcagcggcgtgttgggttcaaaaatgttttcaatcagcggcgcggtaatttccgcgtcgatccgcgtgccggattccaccacatctttcaaacccgtgccacgttccaccacgatcagcgcgccgatgcgccggcgagaaagatccgtcagcgcggtaacaatttcgctgatctcgtgccgcgcttcagtaacctgtttgttcacaaagagggaattgccccgaatgcgcgagcggccaatttgctccagggcgcggcgcagctccggttgaaacagcaccaccagcacgatcacgccggtgttgataatcaactgaagcatccagcgcaaggtattgagctgcataacctccgctacccaagccagcaccaaaagcagcgctatgcccttaaaaaccgagctagcgcgcgtgcgaacggccaggcggatcacctgatatatgatcaccgccattatggcaatatccagaatgttgcgccaatccggctgcaaaaacagcgtggtaaacagcgcaaccgcctgctcccaaagtgccgttaactgtgccaaagcttcaccccctaagcaaacgtttctcctgtgcttctatattataatacaaattcgcgcacaaagcaaaagatttgctggaatttaaaattcccagccgtccgtatgcttcgcgagaaattcccgtcattctaaagacgcgcgtccgccctcagatgttccggtctttacgcaaaatggcatacaactcaacatccacataccgacccttgttatacagacgcgagcgcagcgtgccctcatgccgcatgcccaccttgcgcatcaccgcgccggaagcggggttgtccacctcatgctgcgcttcgatgcggttgagccccaaccgctcgaacccatagcgcaccacggcggaaagcgcctcggtcatcagcccacggttccaataggcgcgcgaaagcgaatatcccacttcggcggagcggttttcctcgttgtaccacataaagccaatggtgccaatgatccggttttcttctaggtattccatgccccaactgctcggctcgcccaggcggtatttgcgcatcatatagcggatatagcttttgctctccgccacattgcgatgcgcgtcccacagcacatgcttggcgacgagcggatcgctggaatagtcgtacacatcctgtgcgtcgtgcatattcagcttgcgcaaaagcaaccgctccgtgcgcaggttgggcatgctggaaaaaggattttcatgttcgaaatacattcgccgcaccgcctgacatcacaatattgcatttaagcactcaaacgcgccgcctttttccaggcggatggattccccgggcaagagcgcgccataatagccttccgcgcacacgcacagcgccacggaaggcccttcattgagcaaaaggccatcccgctgggcaagccgcgtgcgcggcggattccaaagaggagccattggcctctctccgctctctacgcacaaaagctgatcgcaccggctgacgagcctgccatacgcgtcctcgacaatggtgcgcaatagtaccaccgacgcttcccccggcgccgcaaaggagaaggagcccccctcttcctcgattgcactgcgggcaatggattcgccttgcatgccgtacgcctcacagcgcaagtgaagcgtgcccagcggagtatcgcgcaaaagtaccgcttccagcgaaaccgcctcctctggttccacgcgctgccacaaatccatgcgcaaaaaggcgtgtacggatttccacgcatcccgcagcgcccaaaacgcgggcctgcaagtgccattcgcctccaccaacgcggcgctggcataggcaaattcctcgtcgaacgcctttgccgccaagaaccgcgcgccgcgctcgcgcgcttcgcgcgccgcaaaagccacgcattccgcctgcgcgtaccgcgtgagccgcgcgaaccgctccggctcctcgcctactgtacgggaaaacagcgcctgatattccttgagatccatggccggggtatgccggctcttcagcagcgcgcagccctgcggccaaaaaggatggccttccgcgtgccggaggcattcttccggcgcggccatggccacccgggcaaacccctcttccctctcctccggcagcagcgcggcgacgcccgcgcgggccaacttgctcttttctcgcgctgaaaaccgccccacagccgcctgcgcgcccaagcgggccaacgtcgcgggatggcacggcccctccaccaggcgcaggggtgtctctccgctatagggcagcacccacgcgcgcatggcgtcgcaaccaacgccaccgcgctcgatggtgagcagcacttccacgctttcaccgtcggcggagcccatgtcgaattcatgcgcaatctgccgcctagccgctggcaagcgttcttgcacctgtgtgcgcgcaatcaacgcgccctcgcgcgaaaccgtatacgtaaactggtaccttccgcccacaaacgcttccagcgaaagccgggaaacgcccgcttccacgtcccagttttccacgcgcacatagctatatccttccaggcgcgtgccagaaaagccgatgcgcggcgcacagcgccggacatacaggtgcggttccggccggaaaatcacccgcaggcaattctctccctcgcgcaaatcagccgtcaactcatacgcgcccgccacgggcacaatgggttctccgtcgttgaggcgcaccacgtggggcccataaatatgcccaaagcgcaagcgcaggcgctcatcctcgccttccgggcaatcaaaccgggtttcaaacgtccattcccgattggcaacccattccgcttcgcgcgcgtggaagcccatttccaccgcgggaatttcccccgcgttctccagcacagcgcacacatcggtttccagcgccgccaacgggcccacgctttcgcccagcaaaaaccaattactggcaattttccggctcgatggcatatttccctccgatataccgctccgcgagcagcgcgccgcacagcgttttggaatcctgaatcttgcccgcggcggccatatcgcacaactcacgcaggggcatctttaccacgcgcaaaaattcgtcgtcgtctaggtgcgcctcgcccttttccaggccgcgcgccagataaatggaaacaacttcatccgtatacgccgccgccgcggccatatccgccaatttcacccattctttggcgcgcaagccggtttcctccgccagttcgcgcttggccgcttgcaagcgatcctccgccttgctgtccagtttgcccgccggcagttccagcgtttcccgggcgatgggcgcgcgatactggcgcacgagatagacgtttccctcctcgtccaccggcacaatcgccgaagcgcccacgtggcgaatcatctcgcgcgtggcgatcgcgccattgggcaattgcgcccgccagcgctccacgtgcagcaaagttccattgaacacatcttccttatccaggagcgtttccttcaagttccattcgctcattgtcgttccaccttcgctatcaaccatgcctttttccgtttccaatattcgaccccgcgcgcgggaaatcctgcccggcaggcaatttttccgccgcgcgccgcacataaaatgctccgccagcaaattcgcgaaacccggtttgttgagaggctaccttccagcaccataatgttcataaatccatctcgcatatacgctcttctccgcaagcgcgtcagtgttccatgcccctaccccattcttgtccgcccactacatagatagcagtttttccaccagcgcccgggtgatttcaaaaatcgtatgcggaatgtatggcaccccagcaagctccatagccgtcttttgtttgtctgtcgccgttgtataaggataaatgccaaacaaaaaagggaaaaacgcgtataggaacgactgcacgccgctctcgcccatttgcggaaaaaattttgtgagtccttctgctatggtctgcatagcccgggcataaaccaccttaaaagccactagattttccatgcggctgttgccttccagttcatagagattcatgctcatcagcttcagcatacactctctaccttccagcgcgtgcgcaaacgcctctgcgaacgcgctggtatccagcgccgggcccgcaaaaatcttttgtacatccgcaatccacccctcgtgctcccgctgcaacagggcgagaaaaatttcttccttggtgtgaaaataattgtagatcgaagtgcgggtaaaagacgtcctttttccgatttcattgagggtaatctctcgaaaacccatggtttcatagagcacggcgcaaacattgacgatttcttctttgcgcgcttttgtcagcgtttcggaacccgcaggcaccaccatcatctcctttcatacatttgcgcttttactcttttcgccgaacaaaaagggcggcacaagccgcccacagagcattgacaaagtatcggaagaacgaggcttaaatcagaaatgacggcgtgcacgtcatttctggcattttttgcagagcaaatgcttgcatttgcgggaaaaatgcattcccgtcccggtcgctgtccgtcgaaggcccgaagggctgaagtg

SEQ ID NO: 206 - DNA, 32759 bp, Unknown
  16S sequences of unknown bacteria
ccacggtgacgggctggaagcggcgctcgagcgcggcgtccttttcgatgtgcttgcggtattcgtccagggtcgtcgcgccgatgcactggatctcgccgcgggccagggcgggcttgaggatgttggccgcgtcgatggcgccctcggccgcgccggcgccgatgagggtgtgcagttcgtcgatgaagaggatgatgttcctgtcgcgcttgagctcctccatgacgttcttcatgcgctcctcgaactcgccgcggtacttcgcgcccgcgagcatgccagcaaggtcgagcgagacgatgcgcttgccgcgcagcagctccggcacgttgccctcggcgatcttctgggccaggccctcggccacggcggacttgccgacccccggctcgccgatgagcacggggttgttcttcgtgcggcgggagaggatctggatgatgcgctcgatctcctccgcccggccgatgaccgggtcgagctccccggcgcgcgcggcgcgggtcaggtcccggccgtactgcatcagggtcggggcgctctcctcgccgtccttcttctcgccgccggcggcgcggccgctttcgcccgcggcgccggggttctggccgcgcttcttgaggtccgcgaccgttgcggcgatcatcttctcgtagagctccttggtgttgacgccgaggtcccgcaggatccggttggccacgccctcggtctccagcaggagcgcaaagaggatgtgctcggtgcccacgtagttctggccgagcttgttggcctcggccttgctcatctccagcacgcgcttggtgcgcggggtgtagccaaaggcctcggagaagttaaagtctcccatgccgatcaggttctcgatctccgcgcagaccttttcatacgtcacgcccagctgcgagagcagggtgctgacggacgacttttccttgattgtgccaaggaggatgtgctcggtgcccacgtaattgtggcccatgcggcgcgcctcctcctgggcgatgatgagcacgcgctgcgcgccctttgtaaagctgtcaaaaaaattcattcttctcttccctttcgtgccccggctgcggggcgggtttcccacaatcgaagtttatgtcagcgccttgcggatgatctccgcgcgcagctcgtcgcgctcgccctggctgagcttgcggccggcgttgcgctccagggttgcgggctgcacgtcgcgctgcaggcggtccagcgtctcgggcgcgacggagacaaaccccaggtccgccgccaggcgcacgttggacaggcgggtcatgaactccttggtcgtcatcagccgtgcctgggtaaagatgccgtaggagcgcatgagcttgtcctccagctcggtgcggccctgctgcaggagcatctcgcgcgcggcgcgctcgttgccgatgacctgctcggccgtgtcggagaggagcttgaggatctcctcctcggtccggcccagggtgatctggttggaaagctggtagaggtcgccgctggcctcgctgccctcgccgtagaggccgcggaccgtaaggcccaactgcgaaaccgcgcggatgacctggccggtcttggcgagcatcgcaaggcccgccaggtgcagcatgaccgaggcgcgcatcccggtgcccgcgttcgtcgggcaggcggtcaaatacccccagtcccggtcaaaggcgaagcgctccgtgcgctcgatggcgcggtctgcgcggtccgcgcgggccatggcctcctcgagctgcagccccggcaggaccgcctgcacgcgcaggtggtcttcctcgccgatcatgatggagacggtgcggtccgggctgagcagcacggcggcgctgtcctttgcggacagctccggggagatcaggtgctcctccaccatgacgccgcgggcgttgcggctcaggtcggacatgcggcgcaggacgtagtttccgtcctccagcgcgcggcaggtgcgctcgatgatcgcggcgctgtccgcctccgtcatgcgggtggggaaggggacgtccgcgtagttgcgcgcaaggcgcacccggcaggactgcgcgatgttggtggcgagatttttccgctcctcgctcatgcctcttccccctctcccccggcaacgggctggcctttgtccagcgcgcggatgcggtcgcgcagctcggccgcgcgctcaaagtcctccgtgcgcacggcctcgtccatctgccggcgcaggtcgtcgatctgctgcttggcgcgcacctcttcctcgaggtatcccggcaccttgcccacgtggtgggtgtggccgtggatgctgccgagcatcttcctcatattttcgccaaaggcggcgtaacaattcgcgcatccgaggcggccgctcttctggaactccgcaaaggtcatgccgcacttgccgcagcgcaggctcttgtcctcctcctgctgcggctgcgcgcccagcagctgggagagcagattccccaccgaaaggccgcccaggatctgcgcgttccgcttctgccagcactgcgggcagaggttttcgtccttcttctttcctccgatgatggtcgcgatgtggatggttgcctggttctgtccgcattcgtcacaaagcatgtgtccttccctcctttgcggcgcagcgcagcatgctgcccacgatccgggcgcgcagctgcgaagccgtctggtcttttccaataatttcctcgctcacggccgcgagcatgagccttgcctgctgtggggcgagggttccgctgcggcagagcgcgtccagcagctgcgcagccgcggcatacgtcagctcctggccgatcgccgtgcgcagctcttccatatattctaccctcgtgcggtcgatgcgtatcacgcgaacgaacccgccgccgccgcggcgcgactccacgcggaagccctgcacgggcgtaaagcgcgtggtcagcacgtaattgatctgcgagggcgcgcaggagaagcgcgcggccaggatgttgcgctggatctccacctgcgtctgttcctccaacaggttcaagataaatcgctcgatgtcgtcgcagagctttgccacgtcgcttccctcctccttggagtggctttgacctttcctgaccttcaaattgattataccacagccaagcgcaaacgcaacaaaaaaagcccccttggcggagagaatttccgcaagagggcatgagtttacaaaaagttaatgggttttcttgtgggagagcttgctcaggtcgtagggcgtctcctggtagacgtagtagttgagccagttcgcgtagagcaggttggcgtgggcgcgccaggtgaccaggggctcctgtgtggggttgtcgttggggaagtagtggcgcggcagggtgacgggcaggcccttggccttgtcgcgctcgtactcgttcttgagggtatcggcgtcgtactccgcgtgtccggtgacaaagacgtgcttgccgtcgcgggaggcggccaggtacaccccggcctccggggagacggccaggatctccaggtccggcacggcggcgatgtcctcggcgcgcacctcggtatggcgggaatggggggcgttgaaccagtcgtcaaacccgcgcaccaggggcgcggtgcgcttgaccacgcggtgggagaagacgccgtgcatcttctcggccaggggatatttcttgacgccgtagcggtagaagaggcccgcctgcgcggcccagcagatgtacatcgtggaaaagacgtggtccgcggcccagtccatgatggcggtcagctcttcccagtagcggacttccgcaaactccatctgctccaccggcgcgccggtgatgatcaggccgtcgaagttctgctcgcgcacctcgtcaaaggtcttgtagaacgcctccaggtgctgcaggggcgtgttgcgcgaaaggtgcgaggccgtgcgcaggaaggtgacctccacctgcaggggcgtgttgccgatgacgcgcagcagctgcgtttcggtgacgatctttgtgggcatgaggttgaggatggcgatgtgcagggggcggatgtcctgcgtgcccgcgcgcgaggcgggcatgacgaatatattctcctcccgcagaatggagatggcgggaaggttgtccaaaattttgacgggcaaagcgctgacctcctccaaaatggcatacagcttattttacactcggccgcgcgcccgcgtcaatcccgccccggaattttttccccgcgcgctggaactttcacccgttcttcatcgtctaatttcctgaaaagcggcggcttttctgttgccattttggcgggttttgtgtataatacagtcgtgtcgcccgcggcagcgggcgacacgactgaacttgagttttttaacaggaggaatccgaatgaaaaaagctgttgccctgctccttgtggccgtctttgcctgtgcaatgctggccggttgttccaacaacacggaagtggatccgatcctggaagagagcgcttctccctctccctcggctgccgcatcgggttccccctctcccacgcccacggttgacccgaacgccgccggcgagggcgtgcccacgccgcgcgtggacgaagccgtgacggtcgaggtcatcgacgccggctttgacgagctgtacaaggcgtccccctacgtggtcatcggccacctgaccaagtccctgggcgagtggaacagcgtccgcgagacggacggctccgccagccaggacaccttcaacatggagaagcagtacaccctcgtcgtgaccgaggttctcaagggcgaggacatcaaggcgaacgactccatcacctactcgctgccctaccgcaacaagtacgccgacgagagcgagtacaccatgctcgccttccaggagccgccgctgaaccaggagatgctcttcttcctgggcaaggacgtcgtgaccaacctcaagaccaaggaagtcatcgccacggtctactaccccgccagtgagccgcactccttcctgatcaaggaggacacgctcttcaccttcggcaacagcgcggatctcgccgcggagttcgccaacggcgacggcgccgagggcaagggcatctccctcgcctccgcccgccaggagatgggcctgagcaactaatccacccaaaaaacattgcgcgcccggaaccgaaagcctcggttccgggcgcgtcttttcttttttttacagcatggcctgcaggttctcgcgcccgagctgcacggcctccaggcagggctccacgccctcgaactcgatggcgaccacgtcgtcaaatcccgcgcgctggaggatgcgcagcgccgcttccaccggcaccacgccgtggccgatcaccgtgccgcgcaggtatgcgccggcgcgcgtcgcaaaccaggtgcggccggggtcccgcgcggtgcagggcttgtagaggaagtcctttgcgtgcgcgtggaaggcgtaaggggccaggcgccccacggccgcctccggcgcctcgtccgcgcagaggaagttgcccatgtccaccagcaggccgaagttcgcatggtccacggccgcgacgagctgctcgagccggaggctgtcctgcaggaaggtgccgtggttttccaccatggtgcggatgccgcgcgctgcggcgtattccgtcacgcggcggcagccctccgcgatgcgcggcagcgcctgctggaaggtgcgcgcgctgccgtccttcggcaggccccaggcgccgtcgtgccggaaggtgcgcgcgcccaggcgcacggcgttttcgacctcgccctgcacgcgcgcgacctcggcgtcctggtcgttgttcaggaagtccgcggcaaccgcgtaattggccacgtccagcccggcgtcccgcgcctggcggccgaggcgcgcgcacatctcctccaggggatcgtcccccagaaggaccgcaaagtcgatcgaggcaaagcccatgcgggccgcggtatccacgatgtcgtaggtggaaagggttccggcctccaccgcctggtggaagctgtagctgctcacgccgatcttcattttgctgtttctcctctcgatttgtgtcgggtttccgcctgttccgcctccatgcgctgggcgagctgctcggcgaggatgcggatgtgctcgcgcgcctcctgctgcaggcgcagggcctccccctcggaggggaccgtgtcgcccatgagctgcacgaactggctgaccttgagccccagggcctcctgcatctgcgcgtcgctgccgcgggggctgaccaggtagtagcagagcacgctgtccttctggcccatgcggtgggcgcggtcctcagcctgggtgtggaccgcgggcgaccagtccagctccccaaagaccacgcaggtcgcccgctgcaggttgaggcccgcggccgcgcgcatggagatgcagcacaggtccgtcttcccgctcatgaaggcgtccacggcgcggtccttctgcgcggcggtctcccggccggtgacgaacaccgggtgcgcgctggccagggccgtgcggtaggcgtccatcacgccgtggtggtgcgcaaagagcagcaccttctccccgccctcgagcagcgcgcgcacaaaggccgccacgtacggcgccttggccatgcccgtggccctgcgcatccgctggcagatctcgtcctcgatgcgggcgcggtcgaagttcgtgcgcgcgtcgcgcaggcggcgcagggcctccatggcggggatcatcagctcgcggtagactgcgtcgtccgcgtcgatctcctgcacgaggcggcgcttgggcgggagctggtcgagcaccgcgtccttggtgcggcgcagcatgtagccctcctcccgcagcgtctcgcccaggagctcgggcttggccacgatgttgttgccgtagccgtagcaccactcccgcgtaaagctctcccagtcgcccagcgcgtggaagtccaggatgttgatcacgttccagatctcgccgccgcggttgtagatgggcgttccggacaggccgatgacgcgcggggccttttccgccacgagcgaggccgcgctgtacttctccgtgccgctgtggcgcagctcctggatctcgtcaaagatcacggcggcaaagtcgagcttgggcagcgcctgcttccacccgcgcagcagcaggtagtggacgatatagatctgcgcgcagggcaggtcgtagggcttcaggccccggagcacgtgcaccgtgggctcgctgccgtccgcgttgcgcaggaaggagcggatctcccgctgccagttcgtcacaaggtgcggcggcaccaccagcagcagcggataggcctgcagctccgccacggcggccagcgcctggacggtcttgcccaagcccatctcgtcggccagcagcgcgcgcggcgtgttgaccaggtacgccgcgccctcgcgctggaagggcatgagctggcccctgaagaaggcgggcgaagggtccagcgcctggggcgcgcagcgcgcccgctcccgcgcggcggcatagtcgcgcgcgtcctgcagggcctgctcccagcgggcggcgtccgtgggccgcacggccaggggatagcgcagcatgagccagtgcaggtcgcccgcgttgcgccggttggccgggaaccgcgccacgccccggccctttccgtcgcagccggggaagaggcgcttggccatctggcagacgatgggctcgcccttgatgacccaggagcgggagcgcttgttgtagctcaattccccgtacgtcttcccggccgaggcggccgaggcgcgcaggtaggcgggcagcaggtccacctccggcagttcgtcaaagggatcgtattcgctcacccgatggccaccccccagagccgattcagcgccaccaccgcgcagggcttgcccccgacgcgccggggcaggtccaccgtgcgctccgtcaccacgacgagcgaggccacctccggcagggcggcatagcgccggagctggtccagcagcagcggccggcgcacggccccgcgcttgacctcgaccagcacgccgccctggcagaggaagtccgcccggcagcgcggcgcaaggcgcgcctccttctcgtaggccaggcccgcgcccgccagcgcggccgcgacgcgcgcctgcaattcgtactcatccatggagagcggcacgcgcagggcgcgcagcgccgcaagcacctcgcccatgcgcatcgcctcccctcttctcatttttcccattgtaccacaaagccgcgcccgcgaacagggggcaaagcgcggcgcgaaaaggccgcaccaaaccgggcctcccttcataggatggatactgaaaaatgcagagaggagctggattgctttgaagcaagcgcaacctacatattccgcttacacgcaggaggacatggacgccctctacggcacgcgcccggccacgaccaattcccaggcgcccgagtgcccggagggctacgttccctacaccatcgaggcgggggacaccctgcgctccatcgcgagttcgcgcggcatcaccgtaaacgagctgctcttctacaaccccacgctgagcccctacggctacaagaagggcgacgttctctgcgtgccgggcacggatgcggccacggccgccggggacgccgcgtccgccggggacgccgcgcccgccgagggcacgagcgcgccctccggctcggcggacgccggctcctccgcggacagcgccggggacggcgtcgccgccgagcccggcacggggccggaagagctgcccacgccctccctgcctggagaggacgacgcttccggcgcggacccggagacgccggcaacgcccggaaccggtcccctgcccctgccgacgccctccttgccctccacgcccgcgcagccgggcaccccgacgccgagcgtcccctccatccccgtgcggccgagcattcccgtgcggccgagcgttcccgcgacgccggtctgcgagagcggcacgctctacaccgtgcggccgggcgacacgctccggcggatcgcgcagggctttggcgtgacgctggaggcgctcatggaggccaaccccggcacaacgaacaaccgcctggtcatcggccagcggctgtgcatcccctgcgtaccctgcgaggagggctgcgcgcagggcacgaccgcagtgcgcatccgctcgacggactttgtggactacctggtcaactacaacatctcctacgcggcgctggccgcggccaatccccagacggatcttggccagctcaccgcgggcggaacgctgtgcatcccgcccgcgggctcgcgcgggacctgctcaggcggctccggcacgcaggagctggagtcggacaccaccgcggccatgctcgccgagtcgctcggcgtttcgattgccgcgctcctgcaatacaacccgacctttacgcccatggacttccgcaggggccgcctgatctgcgtgccgccgcagtcctgaggccgcctgccgccgcccgcgccgggcggctttttttgcgctgggcaaatcccccgcgccgtgctatactcgtcttcaacagaagggaggatgcggcatggcgacacagaaaaagacgggcggcggggctcccctgctccagcggccggacctggacgagggcgcgctgcgcgccggcctggagctgatcgacggcctggagggcgggcaggacgatcccctcgagggctggctgttttcgggcatggagtcggcctgggccagcgccgacggggtcgagctgcgccagtgcctgctgcgcgggtgcgagctgcgcggggcctcgctcaagcgcgggagctttgtggacgtggtgttcgagcggtgcgatctctccaacgcgcggctttcggaggcgttctttcagcgggtgcgctttgtggactgcaagctgctgggcgcggacctggacggcgcgcgcctgcgcagcgcggcgtttaccgggtgcgtgctgcgcatggcgaacttctcgctctcaaaggcgcaggacgtgcgctttgcccagtgcgaccttacggaggcggcgctgcgggacctgcgcgagtgcaagcgcgtggagttttccgcgtgcgatcttaggcgcgcggagcttgcgggcacgcgccttgcgggcatggaccttaccacctgcgagatcggcggcaacacctggggccccggccttgcggaggtgcgcggcgcaatcgtcacgcccctgcaggccatggagctcgcgcgggcgctgggcgtgcgcatccaggactaggcgcgcggcaaatgcgccttgatttttgttccgaatgacggtatgatagaggggaagggaatatctagcattctcaattttacgtgcaggaggtcgaaccccatgaagtacggctactttgacgacgccgccagagagtacgtcatcacccgaccggatacgccctatccctggatcaattacctgggcgaggaggacttctttaccctgatgtccaacacctcgggcgggtattccttctataaggatgcgcgcatgctgcgcctgacccgctaccgctataacaacgtgcccacagacgctggcggaaagtactactacatcaacgagggcggagacctctggacccccggctggatgcccgtcaaggcggacctggagaagtacgagtgccgccacggcctgggctatacggtcatcaccggcaagcgcaacggcctgctgtgcgagcagacggccgtggtgcccctgggctacaccgccgaggtcacgcgcgtcaagttccgcaacgagacggacaagaaaaagaagttcaccttcttctcctttgtggagttctgcctctggaacgcctacgacgacatgacgaacttccagcgcaatttctccatcggcgaggtggaggtcatcggctcgaccatctaccacaagaccgagtaccgcgagcgccgcaaccactacgccgtcttctccgtcaatgcgaacatcgacggctttgacacggaccgcgagaccttcatcggcctgtacaacggctttaacgagccggacgtgcccaaggcgggcaaggcgcgcaactccatcgcctccggctgggcgcccatcggctcccactgcatccacgtcgagctcgagcccggcgaggaaaagagcttcctcttcgtcctgggctactgcgagaacccggaggaggagaagtgggagtgccccggcgtcatcaacaaggcgcccgccaagaagctgctggacgctttccagaccgacgagcagtttgaggccgccctccagggcatccacgactactttgccgagcagctctccaactaccaggcggtcaccccggacgagaagatgaaccgcatggtcaacacctggaaccagtaccagtgcaccgtcacctaccacatgtcccgctccgcctcctacttcgagagcggcatcggccgcggcatgggcttccgcgactccacgcaggacctgctgggctttgtgcacatcatcccggagctggcgcgcgagcgcatcctggacatcgccgccacccagatggaggacggctccgcctaccaccagtaccagcccctgaccaagaagggcaacaacgacatcggctccggcttcaacgacgacccgttgtggctgatcttcggcgtggccgcctacatcaaggagacgggcgacaagtccatcctcgacgaaatggtcgcctatgactgcgacgcctccaaggccaagcccctgtccgaccacctggtccgctccttccgccacgtgaccgacaacctcggcccgcacgggctgccgctgatcggccgcgcggactggaacgactgcctgaacctcaactgcttctccaagacgccgggcgagtccttccagacgaccgccaacttcgagagcggcgtggccgagtccgtgttcatcgcgggcatgttcgtggccgtgggcgaggactaccaggcgctgtgcaagatgagcggcctggacgccgaggcggcctttgcggacgaggagtgcaagaagatgtacgaccgcgtcatgaaggacggctgggacggcgagtggttcctgcgcgcctacgacgccttcggcaacaaggtcggctcccacgagaacaaggacggccagatcttcatcgagccgcagggcttctgcgtcatggccggcatcggcgtcaaggagggcctggctgagaaggcgctcaactccgtgcgcgacctgctcgacacgccctacggcgtctccctcctctacccgacctacaaggagtaccacgtggagctgggcgagatcacgtcctatcccccgtcctacaaggagaacggcggcatcttctgccacaacaacccgtggatcaccatcgccgagaccatcctcggccgcggcgaccgcgcgctgtccacctaccagcacatctgccccgcctacaccgaggacatctcggagcggcaccgcaccgagccctacgtctacccgcagatgatcgcctccgtggatgcgccgcgccagggcgaggccaagaacagctggctcaccggcaccgcgagctggacgctctactccgtcacccagtacatcctgggcatccgcccgcagtacgacggcctgatgatcgacccctgcatctcggacaagtgggacggcttcaccgtcacccgcaagttccgcggcgacacctacaacatcaccgtgacgaatcccgatcacgtgatgaagggcgtcaagtccatcaccgtcgacggcaagccccttgcgggcaacgtcctgcccgtctacggcgacaaggccgtgcacgaggtccaggtcgtcatgggctaaccccaaaacgccaatgccaaaaggctccccgcatggggagccttttctttgcgccgcgcaggattgacgccctttctgcgctttgctatactgggggtacagtctttgtccacatgcccgagcgggccggggggggggagcgtcccctgtgcgcgcccggtcctttgaggaggagcggaccatggaaaatcgctatacctaccggctggagaccccggcggactgggcggccgccgaggcgctgacgcgggaggccttctggaacgtctacaagcccggctgcgacgaacactacatcctccacatcatgcgcggcaagcccgccgtggcgcaggagctgaactacgtctgcacagagggcgcggcagtgcgcgggcatatcttctacacccacacggccgtcgtgaccgaccagggggacgcgctccccgtgctctccttcggcccgatcagcgtcgatcccgcgcgccagggccaaggcatcggctcgcacctgatccggatgacgctgcgccaggccgccgaggcagggcacgccggcgtcgtgatcaccggaaaccccgcctactattcccgcttcggcttccggcccgcgtcggatttcggcatcgtcgaccaggacggcgcctcctatccggagctgatggccctggagctggggccgcagcgcctcgccggcctccgcggccgccaccacttctgcccggagttttcggacatcgatcctgtggctttggagcgctttgacaaagccttcccgcccaaggagcgcctgcggcttccgggccagctcttctgatccctttggacaacttgggcgccggcagctctgccggcgcccctctttgcgacgttggaggtgttctcttcatgccgatcatccgccgcgccaaagcgcgcgatctgcccgcgctcgccgcgctggccgccaagctcttttccggggacgaggcggagcattttgcggagttttcccagctcctcccctgcgcggacgcggccctcttcctctgcgaggagggcggcgcgcccgcgggctttgcgcaggcgcagctccggcgcgactacgtcgagggttcttccaccagcccggtgggctatctcgagggcgtctatgtcgagcccgatttccgccgccgcggctttgcgcaggcgctgctgcgcgcgtgcgaggcctgggcgcgagagaggggctgcgcggagttcgccagcgactgcgagctggaaaacgaggcgagcgccgcgttccacgcccgcatgggctttgcggaggtgaaccgcattcgctgcttcctcaagcctctgtgagcgcgcgccggcggcgctccacctccgcgctgagcgcggtgccgtagggcgcctcgccccgcagcggcacgtccagcacgcgcaggcactccgcgtcctcgccatagggcagggttgcgccgctgacgccgtccgggaagagggcgatggagttgccgatgcaggaccaccccgcccaagcgcccgcgggaaccgcgcccacgttgctcaccccgacggtcgggacctgatagagcttggccaggcgcgcatagggcccgtaccactccgcgccgtagtaggcgcgggcgcaatccggcggcacggcccaggcgcagggcgagagcacgatctgcgcgcccatgcggcagagcgactccgccagcaccagcgaggacgacgaattgtccgcgcagatcgtcacacccagcgctccgaaccgcgtctgcgcgacgccgagccggtcgccgacgcagtagcaggggccttccacctccgtcagcaggttgatcttgcggtgcaggagcaggagctcgccccgctcgtccaggagcacggcggcgttgtagaccttgtccccgcaccgctcggtgagcccggcgcagacgaggataccggcccggcgcgccgcgtcggccagcgcctggctgcgcggccccgggacgggctccgcaaggcgcgccgcgtccggattcgcccagcccaggtcgagcgtctcgggcaggagcgcgaggtccgcgccctgctccgcggcgcgctggatgtacgcctgcgcgcgggcgaggttgccgtccgcatccccgtagaccacgcgcatctgacacattgcgatcttcatatttgtttccccctcgttggatttatcccggattgaaaaacggcgccgccgcatgccgcaatccgtcccgatgcaaaagaaaggcaggaatgcacatgtaccacgaacgctttgccatctcctcccacgacgtcgaccctgccggcacgctgcagcccgcgaacctgctgcgcatcatgcaggaaacggccaaccaccagatgcgcgacgagcgcccctcctacatggagctgttcgacatgggcaaggcgtttctgctcagccgcatggccgtggaggtctacgcgccgctgcaccagtacgaggcggtcgactcctacacctggccggcggccggacgcggcgcgacgcactaccggtgcagctgcatccagcgcggcggggaggtcgtcgcgcgcgggttcggccactgggcgctggtggacacgcagacccgccgcctgctgcgcgtgggcgaggtgcccatgcactacagcgacggcccgctggtggagctgccgggcgtccgcttccagatgccggaggccctttcggaggtcggccgccacgtcgtgctctaccacgagatcgacgtcaaccgccacctcaacaacacgcgctacatggacctgctcgtggacttcctgccggagcgcgagagccactgggtgaccggcttctcgctgcacttcctgagcgaggcgccgcttggcgaggagctgacggtctttagcagcgacgcgcagccggaggagggcggcggcctgcgccggttcttccgcaccgtgcgccgggacggccgcgtgaacctggaggccaccgtccgccttacgccccgagaccctgcggccaagtgagcggccaaacgatccgcgctccgcgaaggcatgccttcgcggagcgcgctgtctttttccagggcttacttgcgcaggacctggatcagggcctgggtgccctcgtccccgccgccggccgccgcaagctcgtcgtacttgtcgcgcacgagcttgagcacgtccaggggcaggtcgcggtccttggcctcctccagggcgatgttcatgtccttgatgaagtgcttgacgtagaatcccggggcgtaattgccgtcgatgatcttctggccgttgttggtcagctgccaggagccggccgcgcccgtggagatcgcgtcgaacatctcctggggcttgaggccgcaggcctcggcataggcgatggcctcgcacacggccgcgatgcagccggagatggcgatctggttggccatcttggtgtgctggccgcagcccgcgccgcccatgtagcggatgttggtgcccatggccgcaaagacctcctgcatccggtcaaaggcctcgcggtcgccgccgaccatgatggccagcgtgcccttctgcgcgccgacgtccccgccggacacgggcgcatccagcgcggtcatgcccttttcctttgccgcggcgtaaatgcgctcggaaaggcgggggctggtcgtggtcatgtcgatgagcacggtgccgggggcggcgctgtccaggatgccgccgggcgcaaagtagacctcctcgacgtccttgggatagccgacgatggtgatgaccacgtcctggtccttggcgcacgcgcccgcgctctcgcaccacttggcgcccgcggcgacgacgccggcggccttctccttcgtgcggttgtagacgctcagctcgtggccctttttcatgaggttctgcaccatgggcgcgcccatgacgcccacgccgataaagccgatcttcattttttcttgccctcctcgttctgtatacatgcgaaaccgctttcattataccgcagtccgcagcccggcgcaagccatccgcctgcggcctacagcagcgcgatgtccaggaagcgcagcacgcgcgcccagtcgtagcggctcaggtagtgcgtgcccgggcgcaggtgatagcccacgcacccggagacgaggcgcccgccgctctccggcatctgcgcgccctcgggcaggccctgcgcgcccagcagcgcccaggccgggctggccagcagcgccgagaggaactccgaccgcgggtcggcccactcgtcctgcgaggcgctggcgacgtagagcggccgcggcgcgatgcaggccaggagctggtactgctcaaaggggagcgcgtcctcccgcccgccgtaggcgccgtagttttcgcagaaccagaaggggaactggcggtagatggccgcgacggactcccccaccttgccgcggctgaccgccgcgccggagcagccgctgtcgttggagacggccgcggcaaagcgctcgtcctgcgcggcggcccagagcgcggtcttgcccaggcgcgaatggcccatgacgaaggtgcgcgcgctgtcgatctccggcagcgtctgcaggtagtccatcacgcgcatggccgcataggcccacaggctgatcttgccgggcgcgtccgccccccggcgcgggaagaaggccgcgagcccgtccgcaaagtcgccgttgtcgcgcgtgacgtcctcgtagcagaacaccgccatggcgtacccgtggtccacgacctcctcgatgggctgatagccggccgtcgcatagggggtaaaggagatgtagacggcgcagggcgcggggcgctgcgccttgggcagcacgaggtgcacggggaaggagaactcccccgcctccagctccagcgtgagcttcacgcgccggtgctccgccttgccggcccagtcgtcctcccggtccgcctcgatctcggcgcgcaatgccttgggcgcgggcggggtgacgccaaagcactcgcgcgcgtagagcgcgagccgctcctgccgccaggcggggaacgcctccgcggtcatcccctccggaaacagcggcggcaggttccgccgggtcttttcttcctgcatgttcatggaaacgacctcctgtgtgtttttctctctattttccggtgctgcccagctccccggtcccgcgcgccgaggggatggcgcggatctcctcgggggagagctcgcgcacctcggtccttggcacgggcaggaggatcgcctggcagatggccttgctgatggggtagagcaccacgtcctgcccggcaaagaggtcttccttgcccggcttaatcaggacgaggggctttttgttgaggttggtcagcgggatcatccactcgctgcggaagcccgagtcgatcacgccgcaccgctgggagatgccgcgggtgccggtggagccgcgctcctgcagctgaaagtaatagtccggggaaaaggcgctgaggagccccgtcggcacgcgccgcgtctccaggggcgcaaagagcatgtagtcctcgtcaaaggcggcgtagatgtcgtatccggcgtcctccacgcgcttggaggggatgaccgcgtcctcgcgaatccttgcaaagagcagctcctccatcacgcgccctcccggagcgggttccccgccgtcagcgacagcagccgcccctcgcgcaggaagtccacctcgatgctgccgccgggcgcgcgccgctcgacgaagaggcgcagcgtgtgcgcgccctttgtcagcagcacggccggctcctccgcgcgcacgaccgtccagccgtcggtgccgtcgcccgcaaggatcgtctccccgtccagctcgagcacaaaggggcaggtgcgcgccaccgcgatgtccgcctccaggtcctcctccacgaggagggcgcgctccagcgcaaacgagcacggcccgacccagccgttgatcgcatccaggtcgatgcggtttccctccgcaaagtagggctcccagagcgggttctccggcagggagcgcccggcgtagatgggctggtcgctgacgcccatgcggccgcagacgcgccaggcctgggccccggcgatgccgaaggtcttttccagcccgcagaagcgcaccgtcatccggttgcactccgtgatgttcgccacgtcctcgggcatccagaccgtgaaggggatgcgcgcgtcctcgccgggcaggaccttggcgcggctggcggtcatggcctgcacgcagccctccgcctcgcagaggatcggcccctccaggacctcgtccgtcgggttttcgatgcgcaggatgcactggcgcgccttgccgggcgcgagcaccggcgcgccgaggaagcggatactcaggctgcgcgccgccgggcgcgccgccggcacggccacaaagggcgcggcggtcacgcgcacgggcagcttctccccccgcgcctcggccatggccatgcacatcagccctgcgcgggccatgcgcgcggccatcgcatcccccacgtccgacgtggagggcgcgccctggagcagcccgcggaacgccgcggcgagccggtccggctggtcgcccagcaggagcgcgagcagcacctcggtcaggcgcggcagcagggagccgtccacgccgccgtagcgccactccatgcgggcgcgggccgtggcggggtccttttcgcagagcgcgcaggcgtccagcgccaggcgcgccagccggctctcctcaggcaggagccctgcggcctcgcggatgcaggccgcggcctcgacccgcacaaaggccagggacatcgccgccgcgaggaacccggccgcctccacggcctcgccctcgtggtcgaccgccgcgtcccgcttggcataggcgctcgcgcgctccgggtcgccggggcaggcgcaggcccacaggggcgcgcagtccatgccgcccgggcccacgcgctccgggtcgtcgaacaccgcgagcggcgggtcgatgccgcggtccatgttccgcaggaagtgcggggtcaaggcgccgccccgttcataggcctgcgccagctccccggcggtaaagtccatgccgctgcgcgcgatgacgcgcagcgccggttcgatccaggtcatgtccccaaggcccagcgcgcagccgcgcaccttgaagaggtattccgtatagtgtagttcagccattcttcttccctcctttgggcgggcgcgcaggccgtgcgtccgacgaccggccgcgcggggcctttcccccgcggtccgtggacgcacgcggtttctgcgcgcccttggccggctttgccgtgcgctcgccgcgcgcgccctttgccgggcgacggtccccagccgggcgatggtcgcctgccggggtccggccgcccgccgggcgatggtcccctgccggggaccggccgcctgccgggctccggccgcctgccgggcgatggtccccagccggggtccggccgcctgccgggggcacgaggcagcgctttccatagccgatcaggtcctcgcgcccggcgatgtgcagcgcccggcgcacgagcgcgtggttttggggccgtttatactgcaggagcgcgcgctgcatagccttctcctgcggggagcgcggaacgtagacgcgctccatggtcaggggattgagccccgtgtaaaacatggtcgtcgagagcgtgcccggggtggggatgaagtcctgcacctgctcgggctggtggccgatgtcgcgaaggtactccgcaagctcgatagccgcgctcaggtcgcagcccgggtggctggagatgaagtagggcacgaggtactggtccttccccaggcgcttgttgacgcgcgcatacttttcgcagaaggccttgaacacctcgcagcgcggcttgcccatgagcttgaggaccttgggggcgacgtgctcgggcgcgaccttgagctggccgctgacgtggtgggcgcagagctcgttgaagaactcgtcgctcttgtcgagcatcatgtagtcaaagcgcaggccggagcggatgaagaccttcttgaccccggggatctgccggaggtcccgcagcaggcgcgtcagctccttttcgtccacctccaggttggggcagggctcgggcgccaggcactgccggttcttgcaggtgccgaccttgagctgctttttgcaggaggggaagcggaagttggccgtcggcccgcccacgtcgtggatgtatcccttgaagttggggagcttggtcagcagccgcgcctccttcaggatggactccgggctccgggactgcacgatgcgcccctggtggaacgtcagcgcgcagaacgagcaggcgccgaagcacccgcgggtgctggcgatggagaactccacctccgcaagggcgggaacgccgccctccgcgtcgtacatgggatgccaccggcgggtatagggcaggtcgtagacgcggtcgagctcctcgcgcgtcaggggcatcatgggcggttcggccacgagcacctttttctcgtgccgctgggcgagcgtgcggccgcggatggggtcctgttcctcgtactgcgcgcggaaggccttgcagtaggcgaccttgtcctccttgcacgccatgaaggacgggatctccagcgcgccctcgggcacctcgtccgccatgtagcaggtgccggggatgcccgtcagcggcagcccgtcgcgcaggcggtccgcgatgcgcacggtctgcttttccgccatgccgtaggagagcaggtccgcgccgcagtcggccaggatcgagtggcggacgctgtcgtcccaatagtcgtagtgcgcaaagcgccggagcgaggcctccacgccgccgatgatgatcgggatcttgccgaaggcctcgtggatgcggttgcagtagacgatcgtcgcgcggtccggccgcaggcccggcctgccgcccggggagtacaggtcctgggagcgcgggcgcttggccgcggtgtagtggttgaccatggagtcgatgttgccggcggcgaccatgaagccgtacttgggccggccaaagcgcgcaaagtcccgcgcattgtggaagtccggctggttgagcatgcacacgcggtagccggcatcttccagcacgcgcgcgatgatggcgtgtccaaaggagggatggtccacatacgcatccccggacacgacgacgaaatccggctgatcccagccgcgcgcgagcatctcctcgcgcgtcacaggcaaaaactgatcgggcatttcttcctccgctccacgcttgacgccgtgaaaaaattgttacccttattgtacaacacccgcccccggcacgcaagtgcgcgaaaagaggggatgcggcccgcgcgcgggctgcatcccctcctgggttttttcggttgtccggcttagaggaagaagtcgcggtcctccgggcggaggtacttttccgccttggggatgttgaactccacgccgacgccgggcttgtcccaaacggtgacgtggccgtcccggaagaatccctccggcaggccctcgacgatgtcgtaccaccaatccgggtggccctgcgggtactcgtaggcgatgtagttgttgggcatggtcgcggacacgtgcgtcagcgccgccatgccgaacacgccgtcgaacacgccgtgcggcgccatcatgatgccgtgcaggttggcgtactccgcgatccacttcagctccgcgatgccgcccacgtccgccgggtccgggcccacgacgttgactgcgtgggtctcgatgagctcgcggaagttctggcgcaggtagacctgctcgccggtgtggatgttggtggtggtgttctgggtgatgtcgcggtagacctgggccaggctgtagggcgtgtagtcgccggtgaccatgtcctcgagccacatgacgttgaagggctccacgcccttggcaaacttcagcgcgtcgatggcggtgaggcccgggccgcagtcaaaggcgatgcccaccttgtcgcccacgatctccttgatcttgccgacgtagttgatcaggtagttcaggcccttgtccgtcagcaggctgccgttggcgccgtccgggtagggcacggaaggggagatcgggtaggaggtgtaggcgtagccctcctcctccgccaggcggcggaagcgcgggctgtggaaggaaatggcggtcttgacgatggtaaagcccgcctcctcgtgcagccacagtatgtcctccgcccgctgacgggcgtcctctgggtcggggtagggcagcttctcctgcgagtactgcgtgcagtagacgcggacgcggtcgcgcaccttgccgcccagcagcttatagacgggcacgcccgcctccttgccggcgatgtcccacagcgccatctcgatggagctgacgagcttgccccagggcttgaacgcgcccaggcgccggatgcggcgcatgacgtcctcgacattggtgggatcgcagcccacgatcatgtcgcggaagtagggcacgttgacgttgatgaagtccttgttctcctcgacctgggaatagccgtcgattcccttgtcggtcttcacgcgcaggcagatgttattgccgatgatcgcgctcttgaggtccgtgatcttcatgaaacccctccgttctgtgttgttctttctctctttgccgggcgaattcgccctgtcttaacgataccgcaacgcggtcgctctgtcaacccgaaaacgcgccttaatccagggacttgaggtagacctccagcagccgcagcgccgtgtcccggtccttctccgcgcaggccgcaaggcgggcaaagagctcctcctgccggagcgcaaggcccgcgtccccgcgcgctcggccacctccatctgcgtcagccccaggcgcttgcgcaccgcgtagagccggttgccgatctcccgaaagtcgtggatgagcatcctacctcccctttcccgcctcattctaggaattttcccttccattccaagctgcccgctgctccagtttggagctgcgggccgcttgggcgtttccgggtattacgcctgcatcttgagcagggcgcgggtgtagtccagggagagcttcaggtcctcgtaggggtcgcgctcgtaggccaggtcgtggtccatgacgaaccaggccggctcgcagcttaggcacaggggcatgagcttgggcaggttcagcacgccgtagcccgtgggccggaactcgaagtggccgcggtccgcgccgccgcgcgcgggcacaaagtcgcgcacgcgcccgagcttggaattgtccgaggagtagtagtccttcaggtggatgaccgggcagcggtcgcggtaggtcgcaaggtaccaggcgcagtcgccgccgccgacctccatccagccgagatccggctccagggcgagcgtctcgggccgggtgttgtccaggatgtactgcagggcggccttgccctccacgcggtcgatcagctcgccgtcgtggttgtggaagagcaggcgcatgccgcgcgcgcgggcgaggtccgcgatgcggtccagcgactcggcgaccttggcaaagtccgcaagcggcaggtccgcgaccgtcaggtactcgcagccgacctcctggtggaagtcgagcagggtcttcgggtccgcggcaaggtccttgtagggcacgtggttgcccagggccgcaaggccgagctcgtcgagcttctggcggacctccttggcgccgtggccgaaaaagccgaggaactcgatgccgtcaaagccggcctcggcgaggcggcgcagcaccgcgaagaggtccttttcgcagtcctggcgcacgatgtagagcggggaggccattcggatggtcatggtcgttcatctccttttgggttctgtgtggcggtcctgtgcgatcagatctcgaactccacgcggcgcgcgcggcccacgagggtgagctgctttgcgggcacgacctcgctgtgcggctcgtagtcgtaccactgcaggagcacgcggccgccgtcctggatcttgaccttgcgcaggtagtagagcccctcgctctggaagagcaggacggcgttgtccacgagcacggtcgcgggcaggatgagcacgcggtcgcccttgcggatgcggtagcccatcatgctgtcgtcgggcgcggcgaggtaaaagaccttctccgcgacgacgccctcgatgcggccggactgcacgggcaggatgcggctgtcgacgtcgcggccggcggcgtcgcgcacgggcacggcgcgcatgaggccgcccagggcgttgacccatgcgtccgtgggctcggcgggcgcagcgggcttctttgcggcgggcgcggggcgcggggcggcgcgcacgggctccggcgtcgggacgccgtcggccttgccctcaaagtccgcgatgaactccgaggtctttcccaggaccttcaggatgcgcgtggcctgcgtgtccgcgatgatgcgcgtgccggcctccacctccacaaggaacttttcggatacgccgctcttcttggccagctgcttgtggctccagccggcgcgcaggcgctcctgcttgatcatatcgccaaggcgtgacatgggtggatgttcctcctcctgttatgcgttttttccattataccttttttctaaaattttggcaaagtctttgtcctttggtccctggtatggtataatgagggtgttggaaccgcatcacttaggatgaaggaggatacacacatgcaatattcccgtgaagtggaagaaatggtctgtgtgaagaagggacccaaccacggtcccgcgcccatccccgaagagggcaaatgggtgcaggccaaggagatcaaggacatctccggcctgacgcacggcatcggctggtgcgcgccgcagcagggcgcctgtaagctgaccctcaacgtcaagaacggcatcatcgaggaggccctggtcgagaccatcggctgctccggcatgacccactcggccgccatggccagcgagatcctgcccggcaagacgatcctggaggccctgaacacggacctcgtctgtgacgccatcaacaccgccatgcgcgagctgttcctgcagatcgtctacggccgcacccagtccgccttctccgacgacggcctggtcatcggcgcgggcctggaggacctgggcaagggcctccgctcccaggtgggcaccatgtacggcaccaaggccaagggcacccgttacctggagatggccgagggctacgtgctgcagatcgccctggacaaggacgaccaggtctgcggctatcagttcctgtcgctgggcaagatgatggacgccatcaagaagggcatgtcccccaacgaggcgtacgagaagaacatcggcacttacggccgctttaaggctgaagacggcgcggtcaagtggatcgacccgcgcaagcagtaataggaggtgtgcaatcaatggctctgtttgaaggttatgaacgtcgcatgccccagctccagcctgttctcgaaaagtacggcttcaaggacttcgaagagctgaaggctttcaacaactccaagggcgtggacgcctacaagatcgtcgagggcattcagcccatcgcctttgagaacgccaagtgggcctacgagctgggcgccgccatcgcgctcaagaagaacgtaaagaccgccgccgaggccgccacctgcatcggcgagggcctgcaggccttctgcatccccggctccgtcgcggaccagcgccaggtcggcctgggccacggcaacctgggcgccatgctgctggacgagaagacccagtgcttcgccttcctggccggccacgagtccttcgccgcggcggagggcgccatcggcatcgcgcgcaacgccaacaaggtccgcaagaccccgctgcgcgtcatcctcaacggcctgggcaaggacgcggccatgatcatcagccgcatcaacggcttcacctacgtgcagaccaagtacgactacctctccgccgacgtcaaggaagaccacgcgctctccatcgtcaatgagaccgcgtactccgacggcgagcgctccaaggtccgctgctacggcgcggacgacgtgcgcgagggcgtggccgtcatgtggcacgagggcgtggacgtctccatcaccggcaactccaccaaccccacccgcttccagcacccggtcgcgggcacctacaagaaggagtgcatcgaggccggcaagaagtacttctccgtcgcctccggcggcggcaccggccgcaccctgcacccggacaacatggccgccggccccgcctcctacggcatgaccgacaccatgggccgcatgcactctgacgcgcagttcgccggctcctcctccgtgcccgcgcacgtggagatgatgggcctgatcggcatgggcaacaaccccatggtcggcgcgaccgtcgccgtcgccgttgccgtgcagcaggcgcagaacgcgtaaacttcctttcgcagctaaaaaacgcttcggcggtcaggacactcggccctggccgccgattttgcactcgggaggggacagcatgaagaactacgcacaggtctatgtccgcaacagcctggaggccgcggaatggtactgcgacgcctttggcgccgaggtcacctttgccatccgcaacccggaaaacaccgcctatgaacactgcgagctctccgtaaacggcgagggattcctggcgctgagcgaggcggccaatccctgcgacgtggagatggttcacaagctgaagtgggagaccatgacgttcaacgcctttgagatgggaagcgaggcggcggtccagcacgcctttgcggtcctgtccgagggcggcgtcgtcctgcgcccgatccaggccgttccctggagctcctgctgcgcgacggtgatcgacaagttcggcgtgtgctggtggatttcgatctagggcgcagaaaaagcggctgcggttctttgcgaaccgcagccgctttttgcacgctcacagctttaaggagaacttcggcttgaccgagaacttgcgcttgtccaggtaggccagcgccgtgccgcgggggaaggaaaactcgatgcgcgtggcgaagagctgctgctttgtgaccttccactgcttgtttttctcgcggtcgccgtagcggtcgtcgccgcagatgggcatccccaggtgcgccaggtgcgcgcggatctggtgcgtgcggccggtgacgagctcgacctccagcagcgaatactccaggcaggagtccagcatggcgtaggccgtctcaatgggctgcgcgccgggcgcggcccagtcgtagatcgtcacgcgcgcggcctgcgcgtccttcttgaggtaggcgcgcacgcgcgccgccccggtctccggcttgccccagacgaggcagcggtagaacttgcgcaccgtccgctcgcggaaggcggcctcgagctgctcgcgcgccgcgtttgtgcgggaaaagaccacaaggccccccgtgttgtagtccaggcggtggcaggcgacggcctcggggtagagcgcctgcacgcgggccgcaaggctcggcgcgcccttgcgctcctccacgacggcgatgccctgcttcttgttgagcaggagcaggttcttgtcctcgtagacgatgtccaggggctcgtcgtcgtccaggtagcggtcgtcgatgtagagggtcaattcgtcgtccgggtagacgagctcatccgggtacaggcgcgtgccccggcgccgcacgtcgcggttttccagcgccttgcgcaggatcgcgggcgggatggagggaaaggtgcgccgcaggtagttctgcagcgccatggggcggtcgatgttggcttggatctctctcatgtcggcatctctcctgcgcgtcgttttgggggaaagcgggcggaaaaggcccccggaaaggcgcgctctccgggggccggacgcttcgtttagaagtcgagcttgacggaccagcccatctcgtccgggatgcggccgtactggatgccggtcagcgtgtcgtacagcttctgggagatcgggccgatgccgccgtcgccgacctggacctcctccttctccaagcagaaggcgccaacggggctgatgaccgccgcggtgccggagccgaaggcctcgctcatgtggccgttgcgcgcggtctccatgacctcgtcaatggagatcaggcgctcctgcacgtcgtagcccatcttgcggccgagcttgatgaccgagtcgcgcgtgatgccgggcaggatcgagccgcgcagcggcggggtgacgatcgcgccgtcgatgacgaagaacatgttcatcgcgccgacttcctcgatgtacttgcgctccaccgcgtccagccacaggacctgggagtagcccttcttctccgcgagctcgccggcgtagatggaggccgcgtagttggccgccgccttggtaaagccgatgccgccgcgggccgcgcggacgtactcgtcctcgacgtagatcttgacgggctgcaggcccgccgcatagtaggcgccaacgggcgagaggatgatgaagaacagatagctgtccgaggcgtgcacgccgaggaacacgtcggtggcgaccatggtcggccgaatgtagagggaggtgcccggcgccgtgggaatccagtccttctccaccttcagcaggagcttgaggccctccatggccagatcctcgtccagcgcgggcatggccaggcgctcggccgagcgggtggcgcgggcaaagttgtccatcgggcggaagaggcggacgccgtcgaccgcgttgtaggccttcatgccctcaaagaaggcctggccgtagtggatgaaggtcgtggccggatcgaaggacaggttctcataggggcgaacctgcgcgttgtgccagccctccttggagttgtactccatggtgaacatgtagtccgtaaagatcttgccaaagcccagcttgctctggtccttcggcttctccttgaggtgcgtgttctcaatgaacttgatctcctgcatgaaaaaccatccttcctaacctgcaaaagttgattctatgatagtcctccgcgtgcgccttgtcaacacgaacaaccttttctttacaactttggcaagggaaaatcgtctcccgtctcctccacccaccggcgcaggcgctcgttgagctcgcgccgctttgcggagaagaaggaattgagcgccatgttgtgctgctccaaggggtcctcgttgaggttgaacatcaggtagggcgttcccgcgaggcagacgtacttccagccgtcgcgcgtgacgatgccgcgccaggggaactgcgtgccgtagccggtcgacgtctccacgttcttctggatgtaggcggagtccggggcgttctgcaccgtcccgcccaggcgcgcggcggagtagtccgtgccctgcatccactccggcgggcggattccgcacagcccgagcgtggtcggggcgatgtccacgtggttgatggggtagtccacccgcgcgcgcgtcacgcccgtgtagtgcgaggccccgccgatcacaaaggggatgcgcagggactcctcgtaggggtgggtcttcaggaacatgccgtgggagccgtgcatgtccccgtggtcgctgaagaagagaatgtgggtgttctccgcaagacccgtctcccagagcttgttccggatgcggcccatgttccagtccatgttctcgaccatggcgcaggccccggcgtattcccgccgcgcgcgctcctccagggcggggatgtgcgggacgttctcccgcatgcgcagggtctgcgggttaaagcgcgccatgtactccggcggcgcgaggtaggggtcgtgcggcggctgcacggacagcaccgcgaaaaacggggtctttgccgcggcgcgctcctccaggtgctccagcaggaggtccgtcaggcagtccgtctcgtatcccggcagccgacggcaaaaggccgtctcgccctgcccgccgtggacccagcagtcgtactggctgttgttgttctcataccccacccactgctggaagtggccgcgccgctcgggcgggaccgtgtgcagggccgcgcgcccctcccgctcgtggaagccgtccaggtgtcacttgccgaagtacgcggtgtggtagccgttttcgttgaacacatcggcgatggccggcatctccggcggcatctggtactcgtggccgggcacgcactcgtgcgggtagcggctggtcagcatggacccgcggaacgggcagcagagcggatacccgctcaccgcgcgggtgaagttgacgcccatgtccgccagggcgtcgatgttgggcgtgtgcacattggggtccccgttgcaggacagcatcatggcgcgctgctgatccgtgaggacccagatcacgttgggctgcgtctgtgccattggtcactccttctctgcccccgttgcggaggcgtccgcctcgtcccaggggccgtagtcctcctccaggagcagcggctccacgcggccgaggctcgcctccacaagcccggccagaaaggccggcgcgtcctcctgcttgacggacacgtcgtaggtgacggaggcggcaaagtcgcgcgcgttcacgcgcacgggctgaaacttcaaaaagtagtcgagcttgcccaccatggcgtagtccgcgtcgaagaggtagcggtgcgtcttgtgcatcacgaccacgcgcgcggcgtccagcgcggccttgctcccctgcgcataggcgcggatcagcccgcccgcccccagcagaatcccgccgaagtaccgcgtcaccaccacgcacacgtccacgacggcgcgggccttgatcacctcgatgatcggcgcgccggccgtgcccgagggctcgccgtcgtccgaataccgcgcgatgccggcgttgcggccgatgacgtaggcgtagcagttgtgggaggcgtccttgtgctcgcggcggatgtcggccaggaagtccagcgcctcctcttcggtcctgcagggcgccccgtggccgataaagcggcttttgttgatgataaactgctcgctgccccgggcgagcaccgtgcgataggcgtcctgtccgctcaagcttctccctctcctttcgccgcctccggcggtctttcgcgcacctgcaggaggagcgcaaggcccggcaccgtgagccccaggcacgccagggccgaaaactcatagccgatccagtcgatcagcgcgcccgtgatcatcgaggccacggccgccgagatggtcagcgccatgttgatgagactataataccccacccgctcctcataggggcagaggtggaagaccatgttgcgcgaccccagggcgttggccgcgttggccaggccgtagatggccgtcatgatgtaggtcaaccaggcgtcccgcgccaggaaggccagcaccaggtagagcacgaaccccgcctggccgatgagcaggctcggccggtagccctgccggtccgcaaaccatccccagagcaggtttcccgcggtctgggagacgtagaggatcgtcgtcacgatgccgagctgcccgcccgtcagccccagcgcgtccttggactgcgcggtctggaagttgaagaacgacatgccgatggtgatgaggaacatggccgcgacgtagcgggcgaggttcttgtccgcccggatcaggcgctttgcgtcggaaaagaagctgggccgcgcctcccggccgccctcgtcctgcgccgtgcgcacgcgcagcgcgggctccaccatcgcgccctgcagggccacggagatcatgtccagcacaaaggcgattccgaacagcacgccaaagcgccgcacatccccgtttgcggcgatgatcgcgccgccgatctgcgcgcccacgatgcccgccgccgaggtaaacgccccgcgcacgccgaagaagcggcccttgacccggttggggatgaccttgttcatcatctgcgtgtaggtcgaggacgtgatgccctggcagagcccgttgaagcagtagat

SEQ ID NO: 207 - DNA, 4611 bp, Unknown
  16S sequences of unknown bacteria
gtgccgctggctttcttttgcacacttttctttcgccaccgaaagaaaagtgtgagcgccccttgggacggccagtccctatccgcgccggagtcggcgcgtcaagccccaccgggggctggggattgcgcctgcgggcgcactgggggctttccgctcgccccaggccccttcggatcgccacccgaaacaatagagcgccccatagggctgcaagcccttccctcgcgccggtatcggcgcgtcaggccccgccaaggggaattgcttacggcaaagttgtcgtttatcgatgcaagcagggggctttccgctcgccccctgcaccccttcggggagtcggcgtatccacagggcgggagtatgtgcctgcgggcgcaccaaagggccttcctcggggaaaaacaatcggcgcggcccgcgctgccgtacactccgcttgttgcttctctgatttcaaggttctaactacactttcggcattggtgtcaattagcacgatttccttgcaatagctcccctttccttctttactaccatcaaaggagtgttatcatccccatgcagcttccttctactttcttcggctgggtccgcttcctgctagaacagtacggccccctgtttctgagcggcgtcggcgttacgctgatcgttgccatcaccggcacactggcgggcttcctgctgggcctgctggtggcgattctgcgcacgattcccacgtcgcccaaagaccccgctgtgaaaagagtcccgctgaagattctttcgtggctgctgggcgtttatattgaagtgttccgcggaacgcctatgatcgtgcaggccatggtgatctattacggcggcatgacggtgggcgttcgcctgcccgtgctgaccgccgccatcctgatcgtcagcgtcaataccggcgcgtatatggcggagatcatccgcggcggcatcatcagcgtggataagggccagaaggaggccgcccacgccatcggcatgacccactggcagagcatgatctacgtggtgctgcctcaggccgtgcggaatatcatgccctccatcggcaatgagttcgtggtcaatatcaaggactccagcgtgctgaacgtgatttccgtcaacgagctgttcttcatgtccaagtccgctgcgggcacgtatctgcgctactttgaggtgttctttatcaccgcgtgtatctacctggtgctgaccttcaccgttacccggctgctgcggctgctggaacgcaagatggacggcaagaccaattacatcatctacggctcccagagtgattccaaggcttccatcaagatcgaaaaggaagaaggtgtgccccgtgactgacctgaacgcattggaaaagaacgtccccattctcagcgtggagcacctgaagaagaacttcggcgagcacgaggtgctgcgggatatcaccttcgatgtgccgcagggtgacgtagtcagcattatcggctccagcggcagcggcaagagcacgctgctgcggtgcatcaattttctggaagaacccaccgacggccggatcctgttccggggaaagaacgcagaaaccgaatggacccgggcacagtaccattccaaggtgggcatggtgtttcagagcttcaacctgttcaacaacatgagcgtgctgaagaactgcatgaccggccagatgaaggtgctgcaccgggggcgggccgaatcggaagaaaaggcgctgttctatctggaaaaggtgggcatggccccctatcgggatgcacggcccggtcagctttccggcggacaaaagcagcgggtggccattgcccgggcgctggccatggacccggaggtgttgctctttgacgaacccaccagcgcgctggacccggaaatggtgggcgaggtgctgagcgtcatgcgggagctggcggattccggcctgaccatgctggtcgtgacccacgaaatggcctttgcccgggatgtgagcaagcgagtcatctttatggattcaggcgtgatcgccgaggatggcgcgccggaggaaatcttcacccatcccaagcagcagcgcactcgggagttcttgagccgggtgctggaaaagaaagcgtaattcgtttccgggcttttcgaaaaggcccggattttctttttcaaaaaatgggaagaaacggcagtccgcgttcgttgaatcaaaagacggctgacagcgccgcctgaaggagggtgtaccgatgaagaaatggctggtttttctggtgagcctgtgcctggcggctctgtgcgtcccggcacgggcggcctcgtcccggcccacggcctatgtggatggcggaacggtggatcaggtccatctgcgtcaaaagcccgcatcggatgcacgctcgctgggactttattttacgggcaccgaggtggaatgctggtcggaccccagcgagacctgggtgcatgtctccataggcgcggaggacggctacatgatgtccaaatacctgtcgctggaggaagtgccctcccgtcagccggagggcatcgctcacacggaatcgtggctgaatctgcgcaagctgcccacgaaggactctcaacgactgggaacactccatgagggagacaaagtgaccgtgttgggcgaaacagcctacagctggtactatatcaacgcaaacggcgtgtatgggtatgtatacgaacgctatctggaattgggcaacgctgcgggcagcgctgccgagcagccgcttgccggagaagaattgccgctgctgcgggcggcgctggaaagccgggcaacgctgcggctgaacggtgaagagatactgctgtcacagttcatggagcaggccgacgggcagctggagctgccacggctgacggtgctggacttggacggcgacggtcagatggaagcggtggtgaaggaatatcgccgcggcgtcgaggacacagagcttggctcgctggtgctggacgtgcagcacggcgtggtttacgcctatgatctgaccctgcgggccttcaacgagctgcgggcggacggtacgttcatctattccagcggagcggcggacaacgggatcgcgtcgctgaagccggaagaggacagcagcacgtatcagattctggcggaatcccgcacggacagcgccgggggcatctcctatacggtggacggtctgaccgtcaccgggacggaatacagcgccgcgttagaccggcaggcccagaagccggaggctgtatggtacgaatggaacgagacgaatctgaatttgctgtttggttccgtgacggcacggagtaacggagaatcctaaaagaggatgaaaaagaccctgcaggttgacaaaacctgcggggccttttgacttggaggtgtggaaaaggttttatgatgatttaagatgcgggatgatgccagtggaattttcccaatggggtgatccttgaaggagaaaacagctcggcgtttgggcaaacagcaaacggagcgcatggcagtgcaaaccgcgttgattgactgccccgggaaatttgtgtcgttggtggagtggctcggaagggtgagagcttccggcctttttgttacttcgcagggtgagaggagaggaagtaacgaatggcggttttgatcgcgccttgtttgttcggctggctatcgagccagctcagaatatcctggtcggtgttgcggttgagcttcagcccgaaaaactgtgtattcttcgcagcgtatcgggcgttcgcgtccttgtaaccgtcttcaatcttctttctacccgttgactttcacctgccttctgtggtagaatcaagggcgaaggggtcgcctgttgccgcaggttggctcatcttccgacagtttagagctgttaaatggccgttcctttagctgggggcggttatttcttttgcatcgtgctaatgatgccgaaagttacaacggcgattagtgtcagaagttcgagtatctcggatactgtcattctttcgcctcccttcttttgtgaaggaagatcagccgttacccttcttgcccttggtgctttcggtttcccttgagcacgtgaatatcatgacatgggtttcatccattgtcaaccataggggatttctcacccatcagaaaaaggctttgaacgcctgttttgtcggcagggctcgcaacatcatacgggctctgggggatagtgaacactaatacctgtgcgcgtttgcgctcgtcattttttgccgtcaaatggataggttttttctctctgacaccccacgccgcagctggcgtggggcatacccaaagaagtgctggttgggatgctgtaaggtatcttgggtgatttcgcagagcagaaaaacaggcttgccttttgccctgcggatggtgtggagcaaacttaaataaagcgctgggatgaagaggtgtgccttggatagctcgcaacgcaaaaatgccagcgtggttttctgatcacgttggcatttttatgtgagccatgaggcccgtcgccgaatggcggtctgtactgtttaattaacagggaatcacaccagaccggcgagccgcggcacctttcgtgccacggcggtaaaatccaggccaagccgcat

SEQ ID NO: 208 - DNA, 3935 bp, Unknown
  16S sequences of unknown bacteria
acccgccgcttagtgctccgcgcacttgaagcgggggaatgcttatctgcgttcattttacttcagcccgtgtacggtacctgtataaaaatgactgaaaagcggggatggcatgctccatccccgtctccctcctgacttattttacgctcgcaacaaaccgccggaatgcttccttgccttccggtgtccgcttgtagacaccggcatgctccagcaccttcataaagacaatgccgacctcgtcctcgataatcttgtcgatcgtctcatcggaaaagctgccatatttctgcttcagctcctcgacccagtccgcatgcttgccaagctcctcgtcgtcccggatgtcgcgtccgctgaccatcgcgcgctttaaatgctccagttcatccttcagacgggccggaagtacagccagtcccatcacctcaatgagtccgatattctcttttttaatatgatgcagctccgcatgcggatggaatacgccaagcggatgctcttcggtcgtgatgttgttgcggagcacgagatccagctcatatttgccgtcccgtttccgcgcgatcggcgtgatcgtgttgtgcggctcgccgtcggtctccgcatagataaacgccgcctcatcggtgtagcctcgccatgccagcaaaatcttatccgcaaggtcgatcaggcgctctggctgcccggaacggatccggatgacagacatcggccactttacgatccctgcttccacatcctcatagcccgcaaacgaaattgtctcctcgaccggcgccttcgccatcgcaaattcataatggccgccctggaaatgatcatggctcaggatcgatccgcctacgatcggaagatcggcatttgaaccgacaaaataatgcgggaactgcgaaacgaaatccagcagctttgcaaatgtcgcacgttcaattttcatcggcacatgcttcgaattgaatacgatgcagtgctcattataatacacatacggagaatactgaaagaaccactgactgtcgttgatcgtcaccggaataatgcggtggttgccgcgtgccggatgattcagccgccctgcatagccctcattttcccggcagagcagacacttcggataggatgtctgcttcgcgagctttgccgccgcgatcgccttcggatccttctccggcttggacagattaatcgtgatgtccagatcgccatactccgtcggagccagccatttgcgatccttcgcaatacggtaacgacggatatagtccgtatcctgactgagtttatagtaaagatcggtcgcttttttcgggctctcctgatacagcatcttaaatttatggatgatattggaagggcggtccacaagaagcgacatgacctttgtgtcaaacagatcacggtagccgacggtattctcctcaataatgcctttgtcgtatgcataatcgcagatatcaccgagaatcttttccagtctgcctatgatcgcctcatctgcctcggtctccatgatggctgcctcggtctcctcctctaaagtatccatattcaaaagaccgagcagacggttcgccgtataaatggcatcttctttttcaatcagcccggtcgtaaggccatactgaactaattttgcaacgctttcctgtatcatttcttttcctcccaaatatttgtttttgctgcacaaactgattttcttcattatagattatagcggctctgcagacacaaatcaacattcttatcaaaatgcaggaaatatcttttgcgaatgcccgttttacaactgaaaacaggctgaccttatcccggccagcccatttatacggtaactattttctactatatttcgtgtttagtgatggaacagacggatacctgtaaacgccatcgccatttcgtatttattgcaggtcgcgatcacatcctcatcccggacagagccgcccggctgcgcgatgtaagccacaccggacttgtgcgcccgctcaatgttgtcgctgaacgggaagaacgcatcggagccaagggtcacaccctgcagctgatcgagccatgcgcgcttctcctttgcggtaaatgcctccggctgctcggtaaatactttctgccatgcgccgtctgcgagtacatcctccgattcgtttccgatataaacgtcgatcgcattgtcacgctcggcacgtgtgattttatcagaaaacggaagtgccatgaccttcggacactgacgaaggaaccagttgtccgccttctgtcccgcaaggcgcgtgcagtgtacacgggactgctgtcctgcgccgataccgatcgcctgtccatccttgacatagcagacggaattggactgcgtatatttcagaatgatcagcgcaatcttcatatcgcgctttgccgactccggcacatcctttttctctgtgacaaaatttgcaatcaacgcatcgtcgatcggaagctcctgccgtccctgctcaaaggtcacgccaaatacctgcttgtgctcaatcggagccggccggtaggacgggtcgatctgaatcacattgtagttgccctttttcttctgcttcaggatctccagtgcctcatcggtatagcccggtgcgatgacaccgtcggatacctcccgtttgatcagcatcgccgtatcgcggtcacatacgtctgagagcgcaataaaatcgccaaaggatgacatgcggtcggcacctcttgcacgtgcatacgcgcaggccagcggtgagagttcgccctgatcatccacccagtatatttttgccagtgtctcatcaagcggcaatccgactgctgctcctgccggagagacatgcttgaaggaggtcgccgccggaagcccggtcgcctctttgagctcctttacgagctgccagccattaaacgcatcaagaaaattgatgtagcccggtcggccggaaagcacctggatcggaaggtcgcttccatcctccataaaaatacgggacggtttctgatttgggttacatccatattttaactgtaattcgttcataccctgctccttttcttctatgtcgcttttatttctggtttttattcacaatgcggctctcatagcttccggtctcaatatcaatatagcgaacaaacagcgataccttattgtccgcattcaggctgctccagaggagctctgtaaacgcatcaatgtcatccgggattgctaccagcttcggctcaccctcaaagctcgggagcggattgccatcgcacttgtaagtgtgaatgaaatgtccctcgcccgccacgcagttgctgtatgcaaaagtatagcggttgcaggccgacgggtcgccgttgttgctctttaaaatagacatcgcatagctgtagctgccgttttccacatgcatgacaccggaaatacgcggcgtatagttcggagcgtccggctcaaactcacggctgcgtaaggactgctcgaaggtgagctgatgatccattccctcgtaaatcgtatcggtctgatctccgtttgtgacgatggtcttgttgccaagcacacgcaccggtgcgtaaatgatcaggctcggatcggtcagcttcgatggatcaaatgcctgtgtacggatgccctctccgtcttccacaaaaatacggttgcggctgttctcgcttcttcccataataaaataagcagtgactgcctttttcccatctgcagaacggccgatcacaatgccgcgtcccgggtaactgtttgcttgcagctcctgctgcagtgaaattttttccataagataatcgctccttttttatgcggacgaaggttcatccatagccccgcctgctccgcatgctacttgacactctggatttgtaaacaaagcggatattcgcaatccgcttcgctacttgtaggatcacaaggaatcttcccg

SEQ ID NO: 209 - DNA, 17095 bp, Unknown
  16S sequences of unknown bacteria
tcaacctctcagtccggctaccgatcgtcgccatggtgggccgttacctcaccatctagctaatcggacgcgagcccatctttcagcggattgctcctttggtatacagacgatgccatccgtatacgttatgcggtattagcgttcgtttccaaacgttatccccctctgaaaggcaggttgctcacgtgttactcacccgtccgccactaagatgattaaagcaagcttttttcatctccgttcgacttgcatgtgttaggcgcgccgccagcgttcgtcctgagccaggatcaaactcttcattccttgtatcaaaagcccgaaggctcctaatcaaatgaagtttgtccaagctgattccgaacatctagctttcgcttcgttctggaattacctgcttgattaaaattctttttgaatctcaagggtagtttcaattcgtttcgaatgttgttcaattttcaaggttcctccctgcggttgcagggtctttattctaccatctcttcttcggtttgtcaagaactttttttccttcatccaagaagttttttcgctcccggcgtcccccgcgagacagcttcattaatatatcatactccttaccctaaagtcaatacctttttcttgattttttgacttttttttcgtatgatagaaatgttcttgatccaaacagcacaggaggcgcttaattatgccaatttgtatccccaattctttgcctgcggcgcaggtcttagaatcggaaaatgtttttgttatgtccgaagaacgggcttcccaccaggatatccgccctttaaaaatcggtattctgaatttgatgccgaccaaaattgtgacagaaacccagttgctgcgtcttttgagcaacacaccgctgcaagtggacatcgaactgctgcaaactgccacccatacttctaaaaatacgtcggctgaacatttgctgaagttttacaaaacctttgctgatattcaaaaggaacgttttgacggtttcatcatcaccggtgcgccggtggaacagatgccatttgaggaagtggattactggccggaactgtgcgcttttatggattggacgaaaacccacgtttattctacatttcacatctgttggggcgcccaggcagcgctctatcatcattatgggattcccaaatatcctttgccgcaaaagatgttcggcgtgtttgaacatcgaacgctggagccaaggcatcctctggtgcgcggttttgacgaacttttctttgccccccattcccgccatacaacagtccgcaacgaggacattctttcctgcccgcagctgacgcttctggcatcgtcggaggaagccggcgcctatttgatcgccagcgaatcgggccgccaattttttgttaccggtcattcggaatacgaccgggaaaccttggccggcgaatattttcgagatgtaaacaaaaatcttcccattgaaattccacggcattattttcaaaacgatgacccaaaacaggaaatcctttaccgttggcgcggccatgccagcctgctgttttctaactggctgaactattttgtataccagacaacaccgtacgatctttcctccctttcccacgtctgatagggaacagccctccccggcacatgtagcaactcctacatgtgtcgggttttcttttatattccaaccgttaggaggacttacattgaaaaaattttctcgtttctgtcttttttctctctcgctcgtgctgatctgcggcctgtgcgcctgcgcgccggacatagacaaaccgggaagtgaagtttcgttttcatcatccggcctgcaatcttccgaagccaccgggccacaggaggaaatttctttttccagcccgccggagagcgcaccgtttgatccagcaagcagtcttttcccccaagccgaggccttgacttaccatattgtcaatctggttttcacccgggatcatattgaaaatgcccagccttttcgcgatggggacattttccgctttatgatttccctgctggttcaaaatgagaaccgcttatctgccttttatcccgactgcgtgtcggttgacgaaagtggacgcgctaccttcccgctggcagctgtccagcagatggtcagcgatgtctttggtgaaagcagctggttcgtagaggaccccagttataatgcccggcaaaatgcgtattgcatggataccggatttggcttaagctctgtctattcctatgaggatctctccctgtcctgggatgccgcagaaaataccgtgatcgccgatttttctctgattgatacgcccgcttcccccggggaaggagactatggagcctatcgaatcacctatcgggcccttaccgaaaacggccggacttttctgcggtacgccggcgttcagaaagtcgacaagtgacaaaagagttccttctaaaaaacagattctttccgaatattttcactggacaaggcggtattctcaaaaagggaaagaaagcggcatttcgctttctttcccttttttacaagatgttttcccctattgcttcgcttttaaatatcgaaatttttcccaaagcgcctgaaaatcgccatgctcccagctgtccagcaaaaagccatccgtcaaaatcggcgtttcggttaaaagaaagacctgcatgcccagtgcttctgcgcacaaatcctctttcacatcgtttccgaccatcaaacaatcttccggcatcacccccagcttttccagcacgtcttttcggtaatagtccagattcggtttgcagtgcctactattttcataggtggtgatcagcgcaaaatctgacggcgaaagccccgcccattctattcgcgcccaggttgccgcctgcggaaacagcggattggtcgccagcgctacccaataccccttctcccgcagcagatgtacacagcgcgccgccaccggatggcagacagtcgctttcttcgccgccgcaaactcgttgcggtaaaacgcgtcaaaatccgaccgatagacgagcgcgcgttctcctgccaacccggtaaacgcctgtcaaaacacatcttcattggttttgctcccatcattttcctgcatggctttcatacccgcccaaagtccctgaatcagcttctgcgggtcaaaaccatacggttcaaacttttggctcagagcgccgaaatacaaacgaataaacgcttcctgatccattggcagcagcgttccgtccaaatcaaataaaacggtgttcatcgtttcctccttttttatttcatagcgcaatccaaaaccaccgaatccgttccggctggccatcgtctcccggcacctgcgcttctcccgcagagattccgccacattttcggatcgtgcgctctgaagcggcgttgtcggcccggcaatccagcaatacccgttccaaaccgattttgcggcaaaaatccagtgccagcgtcagcatctgtgatgcatatccctttttccgttcgtccggccgcacgccgtaaccgatattcccaccgctgcggcacagctcgccggtcaaccggtgccggatctgaatggttcccacaattcgtccatcctgttcccgcaccgcaaaaaaggtggtcgccggagtatgctcttgcgataccggcagtttttgcagagcgttgattcgatccagccattcgctgtagaccggataccgctccattgcgctgctgccgttgatatggcactctccgctatccaaataggcctgccggtaatcctccgcctgtctttcccacgcggggtccggcaaaaccaaagtcaaacgctccatttggcactcctttacagaaaaaaggggcggaatctcccttccgcccctcaacaaatttctcaaaaccttacagtgcaatatcctgtgcaatcttcaaaagattcatgtctaccgactttttcatgctcaaggcttccagaatatcgtagtcggttacctttccgtctttggtcactacaacgcggttgccaatccctttttccagcagttccaccgcataataccccatctcactggcaaccacacggtcacgcagggtcggggaaccgccgcgctgaatgtgccccagcactgtggcgcgggactcaacgccggttttctcttcgatttccttcgccagctcgtgagaatggccaactccttcagccaccataacaatgaaatgctgttttccggttttttgcgaggctttgatttttgccacaatatcccgatccacatcaaagggaatctccgggatcaaaatcgcaatagcaccgcaggccaggccagtattgaccgcaatatgaccagcgtttctgcccatcacttcgactaccgagcagcggtcgtgagattgggaagtatcacgcaggcggtctacgttctggacgaccgtattcatcgccgtatcataaccaatggtatagtcagaggaagaaatatcattgtcgatggtgccgggaatgcccacacagggaatcccgcgcaaggacaagtctctggcgccgcggaaagaaccgtcgccgccgatgaccaccacgccgtccagcccagtttccacgcaggtctgtttggctctttcaatgccagattcttctttaaactccaagcagcgggccgtatacaaaatcgtaccgcccttttgcagaatatccgaaacggaacgcaaattcatttcaaccatatcgccgttaatcagaccgttgtaaccgcggcggatacccaacacccgcattcctttaccaatacctgcgcggactacggcacgaatcgccgcattcatgcccggcgcatcgccgccgcttgtcaaaacgccaatggtttttacctgtttcatattcttaacctcctaatgataatcggaagatttgcacaacctgttttataatgtcataaaaccaaattcaaaatctattatagtataatcagattttgatttcaactgttttgggcataaaaagcatgattttcacgcaatttttacgggatacgttaaaattttaccgttttttctgttcacggctcatttttattccaccagctttacgttgctttcacccaaaacctctgccaactggcgcagcagcacatcatttgggaaaacccacatggagcggggagcaaggctcaccttctgggtatcctcgaaaaaaacataaacaggagtttcccctccaaaaatttccaaaaggttctgcactttttccatcgccgtcccccgccgtgacggtactttcaggtacagcccaggtcttttgccgccgctcggcgcagaaaccgccttgcgcgggggcagaccgtttcggaaagcgagcctgtcctcaatggtcataaccttttcgcacaaaagcttggcgtcctcttcctcccgtacgctgatgcgtccagagatcaccactaccgacccgacagtcagcaactggccataccgctgcaaagttttggggaaaaccagtgcttccatagaaccggtagtgtcttctaccgtcaaaaaggccatcgtatccccgctgcgggttgctttagactgtctggcgccgacaatacaaagaatatccacctgcttattgtcgtattcttccagcgctacatgagaaatttttgcggttcccagccgcggaatcaagtcggcatactctcccagcggatgaccggataaatacataccggtaacttccttttccagattcagccgctccataaaaggaaaatcctccatcgcagggaatacatattcttcccggggcgcgtcggccatggtgtcgaaaaagcccagctgtccctccagatttttctgctttaccgcgtccagcccgctggaaatcacttcatatcctgccaatagctgccgccggttgggattcatccggtcaaaagcgccgcatttaatcaggctctccatcgcccggcggttgagatcccgaccgtgcatccgctcgcagaaatcgttgaaattccgaaatggagaagactccctttcccggataatatccgcgatcacactgcggcccagatttttgatagccaaaagtccgaaacggattccttcgtctgacacggtaaagcccatgtcgctctgggcgatatccggcggcaaaaccgggatcttcagccgggtgcattcgtcgatataaccggtgaccttggaagtggaatccagtacgctggtcaaaagcgccgccatgaattccttgggataatggcatttcagatacgccgtttgatacgcgactactgcataggccgccgcgtggcttttattgaacgcgtaagatgcgaagctggacatttcaccgaaaatatcgctggcgatttcttcgctgacgccgttgtgcacacaacctttgacctgacaggtaccgtcttcctcgtacaggccataaataaaattctgccgctctttctgcataacatcggcttttttcttgctcatggcccgtcggaccagatcggcccgcccataggaaaaaccggccagctcccggcagatctgcattacctgttcctggtaaacaatgcagccgtaggtcacatcgagaatagaagccagtttcggatgtttataggtcaccttctccggatggtgccggttttcaatatacttgggaatcgaatccatcgggcccggacggtacagggaaataaccgcaatcaaatcctcaatggactcaggtcccagtcccaccagcacgttgcgcataccaccggattcaaactgaaacaccccctcggtcaggcccgccgatagcatctgaaatactttttcatcgtccggcggaatttgcgaaattgcaaaatccggctgacggcggcggatcatcttttccgcatcgctgataaccgttaacgtgcgcagccccaaaaaatccattttcaaaaggcccagctcttccagcgtcgtcatggggaactgggtcaggatagcttcttcgtttttctgcaccggcacataggtgtctaccggatcgcgggtaatgaccacccctgccgcgtgagtggaggcgtgccggggcatcccctccagctttcgggccatgtcaatcagttcgtggatggtgggatccgtatcatactgctgcttgaaatccttcgatgctgtgagcgccttatccagcgtcatgtgcagttcattgggcacaagtttcgctaccgtgtctacctgtgcataaggaatcgccatcgccctgcctacatcccggatagcgcctctggccgccatggtgccgaaggtgatgatctgcgccacatggtcggcaccatattttgctactacatagtcaatgacctgctggcgtttttcataacagaaatcaatatcaaaatccggcatagatacccgctccggattcaaaaagcgctcaaagagtaaatggtagcggatcgggtctatgccagtaatgccgatgcagtaagcgcataagctccccgcgccggaaccacgccccgggcctacaggaatatcgtgggtttttgcatagtggataaaatcatacacaatcaaataataatccacataacccattttgatgattacgtccagctcgtattccagccgctcgcggatctgctgaggcggttgctctccataatggagcgccatgccctcataacacatgcgcttaaaataggtcacattattttcttcggtaggcgctttgtaaaatggcagcttggtcacgccaaaagtaaaatccagctgacattgttccgcaatttttaccgtattgtccagcgcctccggatgggcggcaaaaagagtttccatctccgcccggcttttcaggtaaaactcctgggtttgaaactccatgtccgatttatcgttgactgtatggttggtttggatacataccagtatgctctgcgcctgatgatcttcctgccggatataatggacgtcgttggtcgccaccagcccaatccccgtttcctctgacaggcggtacaagtcgggcaaaatttgcttttgctctaaaatgccgtggtcctggatttccagatagtaattttccggcccgaaaatatcccggtacaaaagcgcagtttccttggctgcatcataatccttttccatcagccgccgcgggatctgtccggccagacaggcggacaggcagatcagcccctcgtggtgcgcctgtaacagctccaaatctacccgcggtttggaatagaacccctctactgacgctttggataccatggcgatcaggttctgatagccgatttcatttttgcacagcagcaccagatgatacgggctggtgtcaatccggtgcactttatcaaaacgggtccggggggcgacataaacctcgcagccgatcaccggccggattccctgttttttgcattctttataaaagtcgatcacgccgtacatcacgccgtgatcggtaatcgccagccactgctgtcccagctccttcgcccgcgccaccagcgccgggatccggcaagcaccgtccagcaggctgtattccgtatgtacgtgcaaatgagcaaagttttccatggaaagctcctttttccaaatgccggtgccaagccggattttatgtgctaacgagcgcttttgtccccgttcctctcattctttgctagcttgtccggattttttcgttccaaaagctcggtataaatttttgaaagtcgcttcaggcggtggttgacccccgagcgtgtcagcggttcagataatatctcacccagctcccgcaaagacatttccggattttccacccgcagttccgcgatttcccgcaagtcctcaggcagaaaggacagtcccttctgttccagaatatattcaatctccttgacctgcacggcggaagcgctgatggttttttccaaattggcaaattcacagttctgtgcccggttcacctgatttcggatgcttttatatatttttacattcatgatttcaaggcccaaattcccggcgcccataaatcccatcagatcttcaatttctccgctgtcttttaaataagccacaaagctgctccgccgctcaaaacttttggggaagatgcgcacagaggagagaacctgaatcagtccctcacagagctgccgatccggcactacaaattccagatggtagctctttccggggtcaaccatgctgccgcaggccaaaaacgcgccggcgataaacgcacccagttcctcatcactttgaacctgctccaaattcatcaccggcgcaggcgattggtcataaccaaaaaaacgcaggatcttctcccgatcgttctgatcgtccactgttgcgcagaaaaaacttttgccgttttgatttttatattcatttacggaaatcgtcgcgtccaacccaatcaagccgaaaatactgtcggcatactgctcggccacattcttattttccgtctgcagcagcattttctgcggtccaaacgctttggaaaaacgcagcaggccatgggttctggcgcgcagctgacgcagttcatcgtaccgaaggttcagcagctgctgctttagtttatttgcaaaggacatgccttttcctctcctcctgccgcttttatgcttttcgcacatcccggtggctgacaaacacattttcctcctgggctttgagcacctgcgctgttctccacgcaaaagagaccgacctgtgcttgccgccggtgcagccaaatgccaccaccagctgccgcttcccctccttttcgtaaaggggaatggtgaattttagcaggtcttcgatctttcggtacagctgctgggcttgctcatgagaaaaaacgtaatcccgcacctgctgatccaaccctgttttatatttgagttctggaatataaaacggattgggcaggcagcgcacgtcgaacaccaggtccgcatcagagggtatgccgtatttaaagccaaaagaggtgcaggtaatcagcattttctctttcttttcctttagaaacagcgccgccacctgctctttgagctgcgctgcgctgagtaaagaagtatcgataatataatccgcctgatccctcgccggtcgcaaaagttcccgctcctgtttcagcgcctcctgcatactggggtgcttttcatccagaagcggatgcttacgccgggtttctttgtagcgggtaacgattacatcgtcccgggcgtccagataaagaatggtataggaatatcccatctgttttaactgctccaacccgcggaacaaatccgtaaacatccgcccgccgcgggaatccaccacaatggcaattttgccggggaactgactttcctggctttggcgcagctgaaaaaagtgtaccagcagtttaggcggcatgttgtccacacaataatagccgatatcctccaatgcgttgaccgcttgggattttccggcaccggacatgccggtaacaaccacaaagcgcatgaaattcccctcctgatttttcttacagctgacgcagttcgcactccagccggtatccggtttgttcctccaccgtgttctggatttctcgaatcagccgggccacatcccgggaagaagcgtcccccagattgacgataaatcccgcgtgtttctcactgacctgggcgccgccaacccgccggccttttagaccacactgctcaatcaaggcgccggcataatttccctcaggccgtttaaaaacagaaccggcgctggggtattccagcggctgtttggatttgcgccgttccatcaaattctccatggtccggcggatttcggctgggtcgccgggtcgaagctgcatttttacttttgtaatgcaccaatccttatcagaaaaaacactatgccggtaaccaaactgcatttcagaaaagccgatggtcctggcattgcccattccatccacataatcggcagacacgacgatatctttcatttcaccgccgtaggccccggcgttcatgaacagcgcgccgcccacgtttcccgggattccccaggcaaattctaatccggtgagcccctctttttgggcaaaagccgccgccgcagacagggaagcgcccgctgcgcagatgatttctccctctttcaaagattttcggatataagaaaaattggaaccaatttgaattactacgccggatacccctccgtccggtgccagcagattagaaccgtttccgatcacctgccagcgaatgccgttgaccgcgcagaattgaatcagcgccgccacttggccttcgtcatacggacgcaccagaatgtcgcaggggccgccgatctgaaaggtggtgtaatctttcatcagcgcgttcaaaatatactcgcactccagattctgacatagagaagtcaatttcaaaaggtctgtcattcgccgttccccccatcaagacaaaatttaccgggcacggtttaaaaacgccgcaccgatcaatccggcgtcgttacccagcgttgccagcactatacgggtctgcttttccggcgtgcggatatacaactgcgggcgcacgcaatctaccagcgggcgcagaagattttctccctcgttgctgaccccgccgccgatgaccagaatctccggtgccagaatgttgatgatgctggcaaggccataacccaactgttcgatataagcgtttaccaccgactgcgcggcggtatctccccggtccgccgccagaaaagcagtccggccggacacatttccgccgttttcagccgccagttcccacatcagggaatccggcgccgcatccattgcctctttggtgctgcgaatcagcccggtggcggaagcataagcttccaggcagccccggcgcccgcaggtacactttcttccgcccagtacgattcccatatggcccaattccgcaccgccataatgaaagccggtgaacagtttgccgtcgatgacaatgccgccgcctacgccggtccccagtgtgaccgccaccgcgttggaagcgcccttggccgcgccggccaacacctctcccagcgcagcagcgttggcatcgttggtgatatctatttccttattcagctttttctgcaaatatgcccgcatgggaacattctcaaacaacaggttgttggcatattccaccacgccggtttcctcattggccgttccgggtacgccaatgccaatccgccgaatcttttcccaaggtactccggcgtctgccgccgccgctttggcacattcggccatggcatccatcacttcctcggcggggcgcggaatcccggtttttgcctttgccctgcctatgatgtggaacgcatcgtccacaacaccagctttgatgttggtgcctcccagatcaattcccagataatattccatataaaaccgctactccttactgattaataggcgtcccaatcattgggcccatcgccctgatcgatcatacccagtttttccagcagctcctgtgcagcgttgtatcccatttttttctgacggttattcatggccgccacctcaatgataatggcaagattccgccccggtttgatgggaatggtcaaagacggcaccgaaatacccaagatttccgtctgctcgttgtccatgcccatccgatcataaaccttatccgggttccaaggttccagctgaatcaccatattgattttttcagtttccttaatggaacccataccgaaaatccgccgggcgttgatgatgccaacgccgcgcagctctaaaaagtggcggatattttccggcgaggttcccaccagagtccggttggatacgcggcggatttccactgcgtcatccgcaatcagccggtgtccgcgcttgaccagttccaccgctgtttcgctctttcctacgccgctttcgcccaacagcaaaattccttcgccgtatacctcgaccaaaacgccgtgacgggtcacccgcggggccaactccgtagccaaaatgcctaccacgctggagagaaataccgatgtggactccggcgtgcgcaagagcggcactttatatttttgagcgcactccagcatctgggggaaaatttccaactcccgggaaacgaccaccaccggaggtttgagcgcaaaataagaatccaatttctgcatcagggtatcttcgtcaaattttttcaaataggcatattccgacaggccgatcaactgaatccgggagctgtcaaaatattcgaaaaatccgcccagctgcaaaccggggcggtttacgtccatgctgctgatttttacatcattcagatcatatggagaataaatcaactccacatccagatctttgacaattttggagagtttaaccgaataagcgtgttccatgtttgattctcctatcccggcagtttttttcttccgccgtttttcacctgcccgaggggcgcggcttgctgtcctcgtcccggccgggaaatagcatacctgccgggatgtttgatatttattataccccacagcagtcggccttgcaacaaactttctgtaaaacaaattctaagaaattcccgccggtttgaagtatttcggtcacctagctctttttaattggcagaggatatgctataataatctcacagcgttatcggacattaaaggtgtccgccgcctgagagaacatggaagcatgaatcgtccggtggcagtggcgcctaccgtgttttagtgggcgtttcccgctgtgatcatgctataataacctcacggcatgattagaaatcagagatttccgacataaaaaatgaaaacgtattgcggcaaaaagttttttacaaatcgatattcatagtatcggaggacagttatgagaatcgcattatttaccgaaacgtatttgcctcatatcaatggggtagtgactcatgtaaaaatcctgcgcgatggtcttttgcagcagggacacgaagttctggtcgtcaccgcggattaccagacccgccatcattatatcaaggacggaattcttcactgccccgccatcaaaagcaaacgcttttacggatatggtgtagcctctcccttcagcaggcgccgtctgaagctggtgcaggactttcatccggatatcatccacattcacaacgaattcggcattggcctttcgggcatttttgcggccaagcagctgcatgttccgttggtttatacgctgcacacgatgtatgacgactatttatattatgtggcgccccgccatctgctgcgggctgccaaaaaagtcagccacgactatttccggctgctgggcaacgccgctacggaattgaccggcccttcccccaaatgtcaggaatatttccagcaaatcggcgtaaaaaaagatgtcaacgtgatccccaatgcggtagagctggacgatttcagccccgaccggatttccgcggaaaacaaagctgctttccgccgccgctatcaaattccggacgatgtgatgatcgcctgctttgtaggcaggctggggcatgaaaaaagcgtggatgtactgctggattattgggcgcgcaccattacgccggaggataaaattatgctctgcatcatcggcggaggtccggttcaagaggagctggaacagcaggcaaaagacctaggaattggttccatggtagtgttcaccggcgcggtgccgcatgaccaaatgcctccctactatgcttcctgcgatgtatatgtgaccgcctccctgtctgacaccaactctatttcgatgttggaaggcatggccaccggtctgcccgtgctgcgccggtatgatgcgctgaacgaaaatgtagatcaggtacgcgacggcgtaaacggttatatttttaattcccctgaggaaatggccgcagagcttcgccggatcaaaaacctttcgccggagcagttgagcatcctcaaagcttctgtcatcgaatcggtcaagcggtccggcgcagaggcgctggcgaattatacctataatgtttaccgcaaagcaatggcaagcgcatccaatcccaaagaaaaataacagaatgattgtataatccctgcactttttccgcaaaatctttctgatctgtgccccggtaaaagccggggcatttttgtacctcttccccgtacaaaactgcctgtaccataaattattttctgaattttccggaaaaactatggtattttcagacgcatatgttataatacgtatcagaaataatccgaaaggacggtgcaatatgaaatattcgtttgtaaaagattttccgggaatcggcgcatgcgacgcctatgtcggcgcgatcgtttccggtaaaaaagaaaaaaagaacggctgtattgtctgtgagctactggcggctgtggatgaaaaacgcttcagcggaaaagaggggcagcttttctcagcaaacctgttccacgagggaaagttgatgacctgcgtttttgcgggattgggcgaaaaagcaacgtctaaatcggtagagactgctttcgccggtgctgtaaaagaggcaaaaaagcaaaagcccggcacggtaggcatcttggtgcatccggattttgccgataaatgtgtcgaggccgtgctgttggcagacgacgagtttgacgcgcacaaatcagaaaaagcagacgaggtttcctatgtgttctatggtgtggaagaggtacaggccaaggagggaatcgtcttgggagaggcagtgcgcaatgcccgccgcctggtcaacgagccgtccaatgtcatgacccccgcccagttggcgaccgaggcgctgctggtcggcgcggacagcggattccatgtcaaaatttatgatcttgcggaaattgagaaactgggcatgaaagcttttttggaagttgcccgcggcagcgatcgggaaccgaaggtaatcgccatgtcttactacggcaatccggaaagcccggaggttttgggactggttggcaaaggcctgtgttatgacagcggcggctactccctcaagccttccaccggtatggagaccatgcacaccgatatgggcggcgccggtgctgtgatcggcgcaatcagcgccattgctaaaatgaagagaaaggtcaacgtcactgcagtagtagccgcctgtgaaaacatcctctctgctcacgcctatcacccgggcgatatcattgattccatggcgggcaaaaccattgaaatcaacaacaccgatgcagaaggccgcgttacgctggcagatgcagtgacctttgccattcgggaacaaaaagccacccacatcattgatgtggcaactctgaccggcgcggcaatcactgctctgggccatgaaatcacagctgcggtcagcgatagcgacgcgctctgggaaaaaacgcagaaggcggcggagccctcttgcgaaaaagtttggcgcctgcctgtggatgaggttctgggcaaagcgctggactccaaggttgcggatatgcgcaatagcagcggccgggcggctggaactatctgcggcggcatgttcatccaaaaatttgcggaaggtttgccctggctacacttggatatcgccggaaccagctataccgacggtacggcggtatgtccgtttggggctaccggcgtaggcgttcggctgctgtaccatgtggcaaaaaattgcgaaaaataatgattttcagggagtctttcggactccctgaaaaaaacgcgtgtagtaagctcaggctaacttttcaaacaaaaggagacgataccatgaaaaaaatcctcaagatcggtacgttggaagcgcgtgccggagaaaaagtacacggcttttattcggtagctgggacggatttgaccataccggtcacattgatcaacggcagcggagaaggaaaagtactgctgctgactgccggcgtccatccggacgaatatccggggattgcagcggcgatccagctgtcacaggaactgcagccggaggagattcacggcggtgtggtcatcgtccccatgaccaattacagtggatttcaggccaaaaaaggctctcatattccggcggacggaaaaaacctgaaccgcttgtttcccggtgatcccaacggaaccgagggggaccggctcgcttgggc

SEQ ID NO: 210 - DNA, 29844 bp, Unknown
  16S sequences of unknown bacteria
acatggtatattggccgtgttttcggttgtcccgcttgcgggacgagaaaacggccgcaaaatcagtataatagccgcttgcggctattataccccaaacaaaaagaaagcgcaaccgctggggccgcgcttttgggggactatctgcctctgcgtctggagctgcgcttttcgccgaacgcgcgggaatcggagattctgctctcgctggcctgcatgaaatgcttgagcttatcttcaaaggaaagatcgctggttttctgcaatgtgctgcgcaccggggccggcacggcctgtcgggggcgctggggccgctcggggcgtttttccggcaaggcttttttgatggacagattgatccgcccctgctcgtcgatggcgatcaatttgaccttgacctcctggccttctgtgaggaactgcttgatgtcctccacataggtgttggcgatctccgagatgtggaccatcccgcttttgccgccgggcagcgccacgaaggcgccaaacttggtgattcctgtgacctttccatcatagatggttcccactgttaactccatatccgctttgtaaccctctccgttttatttgctagcaatgtccacaaagacccgttcgccaggggagacatagcccagctgttcccgggcgatgcgggccacatactggtcggaatcctggctttccaaaagagcctctgtttcggcgttgcgaagctgctgctcttccacctgctgttccagctgggtcttttcttccttcttctggctgatctgcagctgaagggacaccatggtaaaggtggcatagacggcaaacaccgccacggcgatcttggtgagaccgcccactttctttttctttttcattggccattcctcagtccggccggggcaaagggcgccccgataaatggatgttgcgttccggcccagggccgcatggaaaaaagcgcatccatcctccttgggaagatgcacactataataataaaaaaaattcacaaaaaagtcaaatactttatttggatctgcgccggtgttttccctgaaaacccccgaacttcccctggaaaaaggcaaaaaagccctgaatcttccccagtactctatgaacggagggggagaacaaaacggcatacagcgccccgcccaggatggcccccaagggcagatatccccggatgacgccccggctctccccaaagaccagcaggaaaaaccccgcggcccccatgagacagaaaagcagatccaacagagcggtgagaaacaccccaccgccgcctaagcggcgaaagaaggccagcacatcatacaaaagccccaaaagcagtcccagcaccgccgcatggagaaaggcctgggtctgctgggccagcaccacctccatcatttaaaacagccgggaccagaagccccgccggcgcagctgatcttcctcatagaccatggcctcaatctgtccggcgatggcgatctcccccacctccagattgagcttttccacatgaagctgctggccgcccactgtgaggatgcccatgctggtcaccagggacacctggttttcgtcaaagctgatgacttccgatacccccgacacactgagatgctcccggttttccaggatcacattgtgcggtgccaggtccattcttctgtactcttcgtttttcatatacggccgcccctttccagattcataccacaactatatggaacggaaagggcttttagaccttttttctttttactggatctcctgatacagcagctcggcctgatccttgcccacatgctccggcgtctggagcaccttcaccttcagggtgcgctggccgaaggccagttccagcacatcccccaccttcacctggtagctggctttggccggtttgccgttgaccatcacccgccccacatcacaggcgtcgttggccacggtgcgccgcttgatcagccgggccaccttgagatatttatccaaacgcatttttctttctcctctctgtgcaaaaaggcagcccggtttcccgtgctgcctgagcgtgtcaaaaaagcggcaaagccacttttttgagtttttgcaaggggctgcatgcacgcctttggcgcacactggccccttgataggtgcaaaaagctgcgcacaggtcgcagctttttgcgaattgattcgtggtagagcaaacatatccctcacacgaaagttttccacaatctgaaacagtccggtctcccacactgctttttgcggggttcttatttggccacctgatccttcagagccttgccggccttgaaaacaggatacttgctggccgggatcttgatctcttcccgggtcttggggttgcggcccacacgggcggcccgctccttcacttcgaaggaaccaaacccgatcagctggatcttgtcgccctgaaccagagcttcggtcacagcgtccaccatggcgttgagggcggcttcggcgtcctttttggaaagttcggctttctcggcaatggccgcgatcaattctgtcttgttcattttaaaactcctcctttatgcttccgtctgctgatcggtcttgcagacggtgctccctgtctcctgccacagccgggcctgctcctgagaagaaagctggctcagaggggctggagcaatgttttccagttcctcaaatttttccacaaaccgcctggcctcatatgtcagcgcttcttcggcggaaagtccctgctctccggcctgaagggctgccgcaaacaaaagccggcccagagcctgctccgtttgctctcccttccccagctgctgcatcgcctgctccatctcctccatggggctttggatggacgccagggaaaagccgccttttctggcccggctctgaagcttctgtgcatacatcagggcaggcagggccgtgggcacttggcgcagcgtgtcggacacactgttctgccccttttcctgccgcttgatggcgtcccagtttttcagcacctcttgggaagtattggccgaaacggtgccaaaaatgtggggatggcggcgaatcaatttctgacagacctcatccagcacatcctccagcccgaacagcccttcttcccgggcgatctgagcatggaagaccacctgcatcatcacatcccccaattcctcccgaaggttcgctgtgtccttatggtcgatggcgtccaccgcctcatagacctcttcgagaaaattgtttcggatgctttcgtgggtctgttccctgtcccagggacaaccctccggcgaacggaggattgccatgatctccaccagatcttcaaagccatagcgatcttttggattaaaatttatcatattatgccttcctttgcaagcattatttcctgattttactgttttttgccgattttgcacggtttttcacaaaaatccgatgactggcctccggtttatttgaggcggagaacctttgccaactttttccctcccggaagcagcaggatgtcctccctgggcaaagctcccaccgccagcagcatcaatccataaaaggccgcccctgaaagggtcagggccgcaaatccccaccggggccccaaagccccctccaccggcaagcggagaaagaccagaaacgcccccatcagccctgcggccagtgctggccggaaaaataccttatcccaggaaacccccatcccggcccggtgaagagcccgcagattgagcagagtgatcagtccataacagcacaccgtgccccagggagcgccgccgatgtggacggtgggtttccccgtgagcacataggtgacccccagtttgcacagagccccggcggccagggtataaaccggagtgcgcatccgccccatggcctgcaaaatggcgttggtcatggtggtcatggccacgaaaaacaccccaggccccagaatggtcaaaagaggtgctcccaaggtgcaatcctggggccgggcaaaatagatcagctccagcaaaggccgccccagcagacaaaagcccaccccggcaggcagggaaagcaaggcggcaaattccagggccgagtcggagagcctgcgggccagcatcctgtttttccgggaaagggctccgctgaggggtgggatcaggctaactcccagggccgtgatcagggtctggggcagatgaaacaaggtggtcaccatgttataagtgccataaagcccgccggaagcctgctgggaaaagccgatgtcctgcagccggttcatcacaatggccatatccatcagattggaaaggctgagcaccaaagacccggccatcaccggcaaagaaatggccaaaagccgcaccaggcaccttcccgcagacagtccccggccgccgatgccttcctcctcttcccggggatggagaagcagatacaggcagcccaacagactgcccaccgtcacgccgccgatggccccggcggaggcctgggccggagagcagccccggttgagcaaaaccactgccgccccatatcccaccaccagcttgcccacagcctccagcacctgggacactgccgtgggtaccatatcccccagcccctggtgatagccccggatcaccgccgctatggacaccaaaaacagagaaggggccaccgcccgcaccgccggggcagcctggggactgcccaccagcgccgctacctggggtgatgccacccacaacccagcggaaaggagcagtcccaccagggagaaggtaccgagggccacccgaaaaatccgttttccttctcccgggcatccccggccccgggcttcggccaccattttggagatggccaccggcagcccggcggtggacaggaggaacaaggcagaataaatctgataggccacggtgaaggcccccatgccgctgccccccaggagattgcccaacggaatcttgaagaaggccccgatgagccgtgtgaccacaccggacacccccaggatcagtgccccttccacaaagctgcttcttctttttgccacagccaccactcccccggccaccatcaggcctttttcaccattcatagtcccgggggcttgttttttatgcctggcggccggtcatgcggggcagggcgtaatttttcatctcggccatggcccgctccacatcaatggttttgaattctcccttttcatagaggatgcgtccccgtaccatggtgaggacaacctcccgcccggtggcgctatagcacagggcggacaccggagagtgaaccggctgagtggctacgcccgacaggtccaccagaatcaggtcggcatccatgccctcttgcagcatgccgcattccttttcccggccctgggcgaaagcaccgccccgggtggcccaggacagagcctgctgggcgggtaccagccggggatcaccctggatgcccttttgcaaaagggcgctcagcttgatctcttcaaacaggtcgtggctgttgttgctggccaccccatcggtacccagggccacattcacccctttttccgccattctggccgccggagccacgccgctggccaatttcaggttgctcaccgggttgtgggccaccgtggcctttttctccgccagaaggtccatatcctcctctgtgatccacaccccatgggccgcggtgacccggctttcaaacacgccgtgatcggcgagaacccgggccggagtcttgccccatcgggcgatgcactcttcctgctcctttttggtctccgacagatggagatggatgttgagcccatgcttctgggcataggcggcgttttgctcccacaccgccggacaggaggtatactctccgtggatgcccacatccagccggatacggccctcatcggccatgtgccagcttttcagcatttcctccatttccagggtctctccggccttgtgaaagtcataggacgccggatcaaagcacatggccccattgcacagattggccttgaccccggcctggaagcagacctccgccatggtgggcatcttgaaatacatctcagtcaccgaagtggtgccgaaccggatggattccgccagccccagcatcatgccggcctgaacgcaccgggcatccagccgtccttccgccgggaagatgtgatcctgaagccactcctgaagggcatagtcgtcggcataaccccgcagcagggtcatgggcaaatgggtgtgggcattgaccagcccaggcatggcggcgcagccctggccgtccaccacccgcccggccttctcctccggcgccttttccgaaagccaacagatctttccctggtcaatgccgataaaacagttttccaccaccggatttttgggggccatggtgacggtggtgacatttttgatgagcagttccattttccgtatcctccttcttccctttttcttttacagccggggcagacaggcccgcaccaaagcggagaagccgtcccgggcccgctctgccgcctggagcacatccaccccatccaaacgctgatccagcacaccggcggccatgttggtcaccagggagaagcccagcacccgaatgccacagtggttggcgcagatcacttcgggcacggtggacattcccgccgcgtctccgcccagcacccgggcggcccggatctctgccggggtctcaaactgaggaccggggaaatagaaataaacgccctcctgcaaggtcatgcccagcttgtccgcttcctctttcgcaatcttgcggcaggccgggtcataggcataggtcatgtcgcagaaccgggggccgaactccggcaggttgggccccaccagaggattgggatcgaacaggcggatgtgatcggaaatgagcatcacatcccccacctgatagctcttgttgatggcgccgcaggcgttggtaaccaccatggtctgcacccccagcagctttgccacccgtaccgggtaggccgcctggtaggcatcatagccttcgtagatatgaaagcggccatccatcaccatcacccggcgtccggccagcgtgccgcacaccagccgcccggcgtgatccggcgctgtggaacgggcaaaatgggggatctctccataggggatgaccacggccccttccacttcaccggccagaaaacccaggccggaacccaggatcagcagcagctccggctgaaaatcacccagccgcttctggagaaaagcggcgctttcttgatactgttcgtatgtaaacatcttttttctcctttttgtagtaatattcccttccaaaacagaagagcagggcgccccgggaagaccgggggaaccggttctttcccttccggggcgtcctgctcttgattggttttccgactacagccgctgtccgcagaaacggcagaaggcatcttccggctggcaggctttgccgcaggcggggcatcttttccccggccgctgccgttccagctcttcctgcaagcagcaaaggcgggccaccttgtcatcgatctgggcgattttgccgtcgatctcctgggggtctacggtctctccggtatgggccatgtaaacgctgcgtcccacctctttgtacaaggcttcgatgtcgtttttcagctcgaagatctgcagattcaccttggtagagctgaccagctcattggtctttttgctggcaacatcggcggctttccccatggcctgcgcagcctgggcggcggtttggcgcatcctttccaggacatcattgactctctgatccataaccatcggtcactcccttccgcaaaatcgaggggcctccccctctccttttatcctattctcagtataccagaacggtccgtctctttcaatcggacagccgatcaaactccagctccagtttttgttttccttggcagatggcatcgctgtgttcgatatactccttgggatatttggggtttgtcagccgggtgatgttccggccgccgtctgcacagatcttggtgacccctccggcccccaaagccaccaccgggcacagttcttccatcatcaggatgttgtaccggcaaatggtgtcccctttggcaaagcccacattttccagattcccggcaatatacttctgccggtacagataatagggggcgtaaccggcctgttccagcatagcataggcggcgtccagggtctcggcgggaagctgtccctgggggccgaaccgcaagggcgatccttttttccgggccagacagtggatggtgatgttttccggctgcaagtcaatgagccgtctcacgctttccagcagtcccgcttcgtcatccccgggaaggccggcgatcaagtccatgttgatctcaaaattccccacctgccgggccatgcggtagcattcctcgatctgctgcaccgtgtgaagccttcccacattctgaagcactccatcgtgcatactctggggattgatgctgatgcgtcccacgccgtgacggtggagcacctccagcttttctctggtgatggtctccggccttccggcctccacggtgaattccctgggatggggcagatgctgctgaaccgccgtcagcagacgatccatctgtggggccgtcagagtggtgggagtgccgcctcccatatagatgctgtccagcttccagccgttttgccggaagccctccccggccgcttccacttcgcgacacagagcatccagatagggcgggatcagatggccccattgggcagtactgccgctgacaaaagagcaatagacgcatttgctggggcagaagggaatgccgatataaagggcccccgtctgttccggcagactgcgttccagctgctgggccttctgggcgcagcggatggccagcttccgccgggatgaagcgatgaaaaaccgctctttcaaaaattcgtctgcttcttcttcctcgatcccctggggaaaggcctggcgcaaaggcttggccggcttgacgccgctcatggcgccccacacaggaggctggggcaaaaagcctaccacagcccgatagacggcggttttcaccgcccgggtctccacccgcttttgctccagcgggctgtccccttccggcggcagacggcattctcccgttctttcttcaccgccccgcacagcctgtacccggcaaaggaagtctcccccctcccgcgcgagagagacggtgaccgttcccccctcagcacagtcttccgtaaggccgtggcgctcttcgggaagcagacagaccaaagtttcatgcaccgccgtctccaaagcggtgccctgtaagatcatttgcatcgtttcatcgcataggtcatgaccggattggtctggcgttcgtgttccagggtggtggcctcctcatggccggggaaaacccggaagtccccctccaaagccgccaggcggcggaggctgtcatacatctgatcggcgtcgccgccgtccagatcccaccggccgcagccgccgcagaacagagtgtccccggcaaacatagcgtcctcacacagatagacgcaggagccctgggtgtggccgggagtgagcatcaccttcactgtcagattgcccacctgcacggtgtccccatcttccagcatccggtcggccagagcctgccggtaaccccgggctgccagggccttccaggtactctggtattcttcggtgagcatgggggcatcgtttttgtggatgcagatttcggcaccggtcttgtccttcacatcccgcaaagccatcacatggtcaaaatggccatgggtcagcaggatcttggtgcatttcatgccgaactcctccagagccgggaagatcttccgctcggcctgggcgccgggatcgatgatggcgcactcccctgtctcctcgtcccccagcaggtagcagttggtagccaacggccccaccgggatcacttgtatcttcatgggtatcccctccctcttattttttcttcatcatctggtcggtgtccatgatgatggtcaccggcccgtcgttcacatgatcgatctgcatatcggcgccaaagacgccgctttccaaaggcacctccagccgccgcagctcctggaggaaaaattcatacagcggctccgactgggacggcttggccgccgccaggaaatccggtcttctgccgtgggaacaatcggcatagagggtaaagttggacaccaccaacatctgcccgcccacatctttcagcgacaggttgagctttccattttcatcctcaaagatccgcaatccggcgcatttttccgcaagatatgtggcttccttctccccgtctgtctgggtcacgcccagaagtaccaccagcccccggccgatgcgggcatgatcctgcccgttcacccgcaaactggctccgcttgttcggataacaaccgctcgcatggtttcctcctctgttctgtgcttagtttttctccgccatggtgcggcttacatcgatgacgccgctgaccttgcggatccgattcataatattttccagctgctcccgatcagagacctccagggtgcagaaataattgccctggccctggctgtcccgcacattcatctcggtgacattgatcttcatcacgctgcacacctggagaatatctgccaggatgcccacccgggccttggcccggatctggataccggtgctgaatttgaacttggtataggggtcccaggccacccgcacccagcggccatattcctcggtgttctccatgcccttggccacattgcggcactcggtgcggtggatggacacaccatagccccgggtgacaaagcccacgatgttgtcgccgggaataggggtacagcacttggagaacttcaccaggcagttgtccaccccttccacaatgacgccgctgtcgctggtggcccgcttccgctgcaaggtcaccttgttggggtcgttcttgtttttctgccggttgatgcgctccacttcttcctgcaccttggtgaggatcttggcgcagctgacgccgccatagccgatgctggcatagaggtcgtcctttgcggcaaaattgaaccggcgaagcaccgggccgtacacttcttcccgctggaaatcgttgtagagcagggtcagtttcagctcccggtccagcgcagcctggccctgctggatgttctcttcccgacgctcttttttgaaccactgcttgatcttgttgcgggcctcggcggttttggcgatctggagccagtcccgcttgggaccggcggtctccttggaggtgaccgcttccacgatctcgccgtttttcagctcgtagtcgatgggcaccagccggccattgaccttggctcccaccatccggttgcccaccgccgaatggatggcataggcaaagtcgatgggggtggccccggccggcagattgatcacatcccccttgggggtaaagacaaagacctcgtcgctgaacagatccaccttgatgttctggataaagtcctcggcctgggtgtcctgctgggattccagcagctgacggatccaggcaaaggtctcttcgttctgtttgcccttcagcccatctttgtatttccagtgggcggccacgccgtattccgccgtgcggtccatttcccgggtgcggatctgcacctcaaaggggatgccttcccggccgatgaccacggtgtgcagcgactggtagccattgggcttgggggtgctgatataatccttgaagcgccccggcaccggccggtacaggtcgtggatgaaccccagcacattatagcagtcggccagctcttccacaatgacccgaacggcgcagatatcgtaaatttccgaaagattcagattctgggtgtacatcttccggtaaatgctgtacacatgcttgacccgggccttcatctcacaggggatgcccatgctcagcaatttttcgctgatgcgctttttcaccccttggaggaagtcctcatactgctggcccttgtcggccatctggctcatgatctccccatagcccaccgggtccaggtacttgatggagatgtcctccagctcccacttgatgttctggatgcccagacggtgggccagaggggcgtagatctccatggtctccagcgccttatcccgctgcttctgctcgggaagatattggaatgtgcgggcgttgtggagacggtcggccagcttgatgatgatgacccggatgtccctggccatggcgatgaacatcttccgcaggtcctccatctgggcctcttccttgctgctgtaaacgatcttgcccaggcgggtgacgccgttgaccagatcggccaccgagcggccgaattccttttccagcgtggtatatgtggcgctggtgtcctccagacagtcatggagcagaccggccacgatggaatcggtgtccatgcccagctcggccaggattcccgccaccgttaccggatggatgaaatagggctcgccgctgcggcgcttctgcccctcgtgggccttttcggaaaaatgataggcctttgtgatcttctccatatcggaaaggggcgagtgctccttcacctttttcagcagggtctccaagctataatccacctggcccaacggctcctggccgccttccagttcgctttgaaacggggcaaagcccccgttgttccgatccatttcactcatattgcaaccacctgctctatccctgggatttgctggcttcggccagccgtttcagtatacgggagccgttgatatcggctttgtccttgcgctccagcacccggatgtccacctgttcatctccacgggcgcaggagaaaatgtcaaattcttggaacacatccagacagatgagcagcttgcccaaattcatcccccggcaagcctcataacgcacctgacggtacaatgtgcggggagagcagctcaacccctgctccccggcgtgggccttcacatggcggaacaccgccaccagatcctgacgggtggggatcagccccagcgcctgatatggctccagtgctcccccttcctgaaagatgcggtacacctcccagaaatcccggtcggcccggtcctcttctccggaccaaaggagatcccgcagcaccagctgcacgctctcccgtccccggtaccggttgatctccaccgaaaaggcgccgtccacctgatccccgcagacaaagggacagttggcgctgcccatgccgaacaaaaaggcacagaagctctttccatcccggcccagctgaagcttggtatgccggtcctggctgatgggggtgatctcttcaatggtcagcccccgcatacagaacatgggctggggattgcccatgccgaacggctccagcacttccagggattccaccgccggaatcgtcagatcccccggctccaccaggcagtccaccggcaaaacaggctgcacctggttttgttccatctgccgggcggcgtaggcctcaaaccggcttttgaactcgtccagatgggcgcgctgtaccgtcagccccacggccagctcatggccgccgtatttttccagcaggtcgccgcactcctccagccctccatagagatggaaaccgggaacgctgcgcccggagcccttgccggtatccccatccagagaaatcaggatggcgggcacgccgtaccggtcggccaggcgggaggccacgatgcccaccacgccattgtgccagttttcgccccacaaaacgatggacttgtcccgctgcgggtcaaactggctggaaagccgccccaggatctcctggaagatctggttttcctcctgctgccgctgccggttcagctggcacagctccccggccaattctccggccaactgacaggaatcggtcaaaaacagctccaccgccttgtccgccccgcccattcttccggcggcattgatccggggagccatggtgaagctgatggccccggcggtcactcccttgtcttccacccccagcttctgcatcagggcacgcaggccagggtttttggtgttttgcagatattgcaggccccaatggacgatgctccggttttcccccaccaggggcatcacatcggccaccgttcccaccgccaccagatcggcgtattgcttcatcagctcttccaaaggacggcccttttccatggcgcagatcagcttgaaagccacgcccacgccggccagctcccggaagggataaggggaatcgctgcgccggggattgaccaccgccagcgcctctggcaaaacctctttgcattcgtgatggtcggtgatgaccactcccatccccagactctgggccagaagggtttcctccacggcggtgatgcccgagtccaccgtcaccatcaggcggcagccatcctccgccaacttgcggatggccccggtgttcaggccgtagccctcgttcatccggtcggggatataatactgacactctgctccccgggagcgaaggtaccgaatcaaaatggcggtggcggtgacgccgtccacatcgtagtccccatagactgcaattttctctccccgcccgatggcttcctccaaagcggccacggccttgtccatatcaggcagcaaaaagggatctcccaaccgatccagagaagagtccagaaaccgggcagcatcctctccacaaagtccccgggcagccaacacctgagctgccagatgagaaagccccaactgcgtttccaggcgccgggcctcctccgggcagggcggggcgatattccattgttttcttctcatagccgctcccccttttgaatttttattaaagaatattataacaattttagatgctgcttacaacatatccatggcaaaatcatgtaaaaaaccggttttcgccggtaaaaaccggctttttccttacaaaagaaaaaattgcggcgcggaatgccgcgccgcctggtttttcacacttcatcctctgggaagccggttcgtccccttcctactccagccccggttcccgatgccccatcacctcagaaaagacgatctgggtctgggtcttgccgaacttctgcaccctggccacaaaagcatccagctgctgggtgtcggggaaacaaactttgagcagcatggaaaaagcccctgccacatggtaacactccaccacgcccgggcaggaacggacacaggcataaaaatcctcctgccgctccggcggcagcaccacattgacaaatgcggtgatgtgatagcccagcttttcctgggccacggtgacccggtagccggtgatgatgccgctgctttccatccgctcgatgcgggccgaaacggccggcggcgacaaaaacacctgctcggcaatcttcttcaaaggaatccgggcattctgccccaaaagagataagatttttttatcgatagcgtccataactcgctcccgttgcctatggtttgggaaagtccttcccttttgcaacagtatatcagtttcgcctaataaaataaagtctcatttttgttttgctttgcaaaatgaagcccaggggctaattttttcgatttcttccgtattttcttccccccctttaccccggggggcaaatcgtgtatccttgtgcccgaaaagaaaagccgcttcggcggccaatgaataaagtgagggtcttttttatgaacacaagagtcgaagccgattccatcggcaccctggaagtgcctgttgacgcttactatggcgtccagtccctgcgcggccatcagaacttccccatcaccggccatcccatgcatgagttgctgatcgtcagcctggctcagatcaagaaggcctctgccatggccaacaagcatgccggcactctggatgccaagatcgccgacgccatcatcgccgccagcgacgaagtcatcaacggcaagctccatgaccagttcatcgtcgacgccatccagggcggcgccggcacctctgccaatatgaacgccaacgaggtcattgccaaccgggccatcgagatcctgggcggccagaagggcgattattccatcgtccatcccaatgaccatgtgaacatggctcagtccaccaacgatgtgtatcccaccgccggcaagctggccatcctggctctgctgcccggtgctctccatcagctgaaccgtctgtatgaggctctggagatcaaggccaaagaatttgacgatgtggtcaagatgggccgtacccagctgcaggacgccgtgcccatccgtctgggccagtccttccacgcctatgccagcgccatccagcgggacatcaagcgtctgcacaaggcttccaaggatatgtgcgttgtgaacatgggcgccaccgccatcggcaccgccatcaatgtttccgccgactacctggatcacattgtggacgatcttcgtgaagtgaccaagttccccctgatccagtccgaagacctgatcgacggcacccagaacctggacggctttgtgaatgtgtccggcatcatcaaaacctgtgccgtcaccctgtccaagatgtccaacgacctgcggctgatgtccagcggcccccgtaccggcctggctgaaatcaacctgcctcccaagcagaacggctcttccatcatgccgggcaaggtcaaccctgttatccccgaagtgatgagccaggtggccttcaacatcatcggcaacgatatgtgcatcaccatggctgccgaagccggtcagctggagctgaacgccttcgagcccgtgctgttctacaacctgttcgagtccatcgagaccctcaccggcggcgtcaagaccctgatcgacaactgcatcctgggcatcaccgccaacaaggagcactgcctggagctgctggagcacagcgtaggcatgatcaccgccctctgccccttcatcggctacaagcgggccagcgaaatcgccaaggaatccctgaagaccggcgtgcctgtgcgtaagctggtggttcagaagggcatcgtctccgccgacgaagtggatgagatcctcaaccccttcaagctgaccttctccgagaaggagcgggaagagctggagcagttcacaaagaagcaccagaacaagtaagtaaccgctgcaaaagctatcaaagcccgaaagcacatggcttccgggctttctttttgaatccatcgaacagacacaagaaggggccgggagaacattctcccggccccttctttcactgtatgatacttgcccgaacttattcttcggtatccacgaacttgctttcttcgatgaccttctgctgtaccgcaggaggagcttcctcgtagcgctcaaacttgtaagtaaaccagccccggccctgggtgatggaacggagggtaatggcataggaaccaacttccgccatgggcacttcggccaccacttcctgctcgccgccttcggtggggttcatgcccaggatacgaccccggcgcttgttcagatcgccgatcacatcgcccatgcagctgtcgggcacatagaccttcatcatgcccataggctccaggatgcagggattggcctggggaataccggccttgtaagccagacgggccgccatcttaaaggaaagctcgttgctgtccacatcgtggtaggaaccatcggtgaggatggcatggagtcccaccaggggatacccggccagaacgccgtgctccatggcttccttgatgcccttatccacagcgggatggaagttcttgggcacgctgccgccaaaggtgcgctcttcaaagaggtaatcgccctcagcataaggctcaaaggtcatcttgacatgaccatactggccatggccgccggactgtttcttatgcttgccttccacgcttaccgacttgcgaatcttctcacgataaggcaccttggggtcctggaggtccacttccacgccaaacttgctcttcagcttggagcagatcacatccagatggatgtcaccggcgccggaaatgaccatctgatgggtctcggtgttgttctgcacggtaaaggccgggtcttcatcccgcagcttgttcagaccagcagccagcttgtcttctgtgcccttcaccttgggagaaatggcctgggaatagcagggttcggcaaaatcgatgccgtccagtgtgacgcccaccgaaggatcggccagagtgtcgccggtcttggtgtcaaccagtttggaaaccgccgcgaaatcgccgcagcagacttccttcacttcggtattcttcttgccgttgacggtatagatatggctcatcttttccatggtgccggtgcgctggttcttcagctgcatatcggctgtgatcttgccggagaccactttgaagaaggagaagcggccatactgatcggcaatggtcttaaagacgatggccagaggcttgccgttttcgtcgaacttcacttcggtctcttcgccgttttcgtccacgccgtgctcggccaggccctcataggggatgggagcgtagtcgatcagggtcttgatcagctgcaaagagcccacgccggtgaacgcactgccgcagcacaccggggtgatggcgccttccagcacgccctgatgcaggccgtggatcagctcttcttcggtgaactcctcaccggcgaagtatttttccatcatctcttcggaattggtggcaacgctttccaccagggaatcacggagacggtccaccttgtccatcttctccttgggcagctggacttccacgatcttgccgttttccgctttataggccttgcgggtaacgatattgataacgcctgcgggacggttgccctcttcaaagaaggggaacacaaagggagcgacgctgttgccgaactggccgcgcaggttctcatacacattgtcgaagttggcgttttcctcgtcgatcttggacacatagaagaagctgggcagcttcttgccgcgaaccatacgccaggctttttcggtgcccacattgacgccgtccttggcggagaccacgatcaggccgcagccggccacgcgaagggcctgcgccacttctccggcaaagtcaaaatagcccggggtgtccagaatgttcagcttgtagccctgggtctccagagtgaccagtgtggtctgaatggagatcttccgctttatctcttccgggtcgtaatcgcacaccgtggtgccgtcggcgatcttgcccagacggtcggtgttcccggtcatatacaacaggctctccaccaaggaggttttgccatccccgccgtgtcccagcaggcagatattcctgattttttcagttgtgtaggccatgattgaatctctcctttatgtgaatatgaactgcttctgttagtcattatacagtatatttaacacttttacaatgaatttctttgggcattttcacataaaaatagagcgatttttttaatatctggacaaaagggagctgtagagccacacagggatataccacaaaatcaggtacaaaagcacattccagggccctgcggcatgaagattgcctgtgctggacagataatacatcaatgcgatgccgatgacggagcacagaagggacaccgtcagattaaaccggacggcccgatggagacgccgggcccctgtaacacattcgcaaaaactcagcatggtatttcgtgacagcagcgccaggggttttcccttgccccgcccctcctcctgggccagggccacccgctcctccacatcgggaaaatcggtgcggccggggcggagatcaaatttgtcctccaccatcaaaggagtcacattgaaatcccgggtggccagcagcggacgcagccgccccacccgcagcacccggaaggcggaatagctctggggcggagtgctgtacttcaaggcaaacactccggcaaaggccccattcaccgccacaaagacgccgcttttgatgctgcggccttcgctgacatggatacccatgcgcatcaggaagctggccgtgccgcacaaaacgctgtccgggccgatctgggccgagatgcctccggtctcaaaatactgtacccgggccggttccggcacaaagatatattgctgcttggcaaactccaggaaggcatggctgacgccgcctcccacggcccgcagagcaccggcggcaaaggccaccaccttttccatgctcatgctccgggcgattttcatgccgctgatggccacgctgcccggcgggaaaatatcgctgtcggtgatcacggccagctcgccccaggccagttctctggcgctgcgggcgctgagcagagcggaaccgccggtgaacagctttttggaaatacgcacccccggtgttgcagtggacaaaagcagtcccatgggagccagcatagcggtaatcgccgccaaagcagggaaaaactgctgcggcgctccggtgccgaaggaggccatcaccgaaagggccaaaacggccacgatggccagcggggcatagatgcgggaaaaggccatggtggcatcaggggactccacctgggacaggtcggcctccttggcccctttggccttataaaccaaagtacgctctttccggttttccttggtgcacacggcggccgggtcggtgctcaggctggcagccttataggtgcggcgcagcatcaaaagccgtccccgtttgctgaggatggcaaaaaacagcgctccctgcgccacgcagatatagggcatggcggcatctttttgcccaatgctccacaggccatgggccagggccgccagggccgaaagcagcaccgccgagtccaatgtgggacgcaggcggcacagccgataaagtccggcaaagaccacatccccggcggatgccatggaaaaggccagcaacacacacagggtgataaaataaaaatgaggtactgtagcaaaagaataggcttccgggatgggaagggccagatcgggcaacgcggtgacgcccagtcccagcatccagaaaaagaaggccagcaccgaccgcagccgcagccggcgcagttttttccccagattggtcagggttttgggcagatcctccagatcggcggcaaaaaggaagtcataagggatcggctctttgggctcctcttcttcgtattcgtaatcttcgtaatcctcatattccgggtactccggctcttccaccggctttttcctccggcctttgaagaaagaaggcttctctttccctttttccggcggtacatgctgttcctccaccggaacatctttctcccggtgctgaggctttttcttttttgccccttccggcggctcttccatttggtgcgccggagggccagagggttttctccccccagagcgggaagccttcccgctcttttcctcctgctgcaccttggccgccacccggctggtgatgtcgatcacccggctctctcccggctgaagcggtggaatcgctggagcttttttctccggctcctccttcgcttcctcctgggcggtcccggcctcttccttttcctccggctctggctcttgttctttctcctcccggctctcctcttcggtgggctccggctggggtttcttctcccgacggggcatggggatgggggccgggaccggctcttccggcggcgtaagttcgtcaaatacaggggcgtccgcttcccgctcctccggctcccgcagctgggcatttttaaattcggcgatgatctcgtctaccgaatattcttcctcttccggtttccaactcacacttcgctccttgtctgctccatccgctgccgcaccgcttcatacagcaaaattgcggcggcgttggaggcattgagggatgagatccgccctttctgggggatccgcaccacataatcacattcttttttcaccagggcggaaataccttccccctcgctgccgatgacaatggccgcaggccctttccaatcggcttcatacagcgtccgatccccgtccatatcggcggcaaagaggaaaattccctcttccttcagccggaagatcaccgaaggcaggttgttgaccttggccaccggcaaatattccagcgccccggcagccgctttggcacaagcgctgttcaaggtggcgctgcgccggcgggggatgatgaccccatgggccccggccacctcggcagtacggatgatcgctcccagattatggggatcggtgatgccgtcacacagcaccagcagcgggtcctccccccgctcccgggccagagccagcatatcctccacgctgcgatagggcacagcggcacacagggcgatgatgccctgatgggagccggtgatgctcatggcatccagcttccggcggtcgatttcctgggcagtgatgccctgcttccgggcctgggccaccagatggcccagggtgccgatggctccttgggcaaaatagatcttgtcgatttcccggccgctgcgcagggcctcggtgacagcgttgcgcccctccagcatattctcatcggaggcgccggcgggggctttcggccctccacggaagggacggcctttgtttcctcccttgccgcgccaggcgggggctccccgtccatcctgccctttgcgtccttccggctgtttgttcatgcctctttcctccattgtttcttctaatttattccatttctcaaaaggttctttccctagtattcctcattataacagaaagaccgaaaaaaaataaccgtttgccctgggaatttcgacaaatttcacattttctttttgtcctaggataaaaaaagccccggaaaggacgaatctttccggggacaaactatgatagctgctgaaatctctgtgacaagttcctgcaaaagcttaccgaaagaaatcatgcggttcccttgcaaaccggcccggaacgggccaacacgacggtccgggcaccgggcttagcgggccatgccgtccttttcgccgaaaaatttgtcatgtaatgcctacatggtttccccatgggagacaagctcccctgggggccccgatttgaatagatccctccggcaaagccgaggggatcatacgcccaatgggcgcgggcctgtgggcccgtcagcgggccatgccgtccttttcgccgaaaaatttgtcatgtagcgcctgcatgctttccccatgggagcctggctcccatgggggccccatttgaatagatccctccggcaaagccgaagggatcatacgcccaatgggtgcgggcctgtgggcccgtcagcgggccatgccgtccttctctccgaaaaatttatcatgtagcgcctgcatggcccgctgggtatcctggcttttgatgatcaccgacactttgatctcactggtggcgatgaacataatattgatccccgcttcatacaaagcctggaacatatcggaagccacaccgctgctgccggccataccggctcccacgatagagatcttgctcacctccgggtccatggacaggctggcatattccacatccttctgctcccggatgatggccagcgcccgctctccctgacgcttctgcacggtgaagcaaatatgtttgcatccgttttccccggcagactggacgatcatatccacgctgatcttttccttggccagccggtcaaaaatctgataggcaatgccgggcacatcggcggtgccggtcaggctgatgaccgccacatccagatcccgggcaatgccgctgactgttctccgttccatggtctcctccctcactgccgttcccggcgcatcggtaaagctggagcgcacctccaaaggcacgccgtggcgtttggccatttccaccgaccggttgtggagcacctgggctcccatggacgccagttccagcatctcgtcataggtgatgtcatccagtttccgggccccttccaccatccggggatcggcggtatagaccccatccacatcggtataaatgatgcatttttccgcgcccaatgcagcggccagggccaccgccgtggtgtccgagccgccccggccgatggtggtgatatcctcttgttcatccagaccctggaagccggccaccaccacgatctttcccttttccagctcctctttcagccgggcgttttccacaaaacgcacccgggccacggtatgctggctgtcggtgcgcaccccggcctgccagccggtgagggacaccgccgggcatcccagctgatgaagggccatggcgagcagggcaatggaaatctgctctccggtggaaaggagcatatccatctcccggggcggcagatcgctgccgatctccgctgctttttccagcagttcatcggtggtatctccctgggcggagaccactaccaccacctgatggccctgctgccaattctttttcgcaatggcggccacatggaacaggcgctctttgttccccaccgaggtgccgccgaatttcaataccatcaaagacacgctatcgtcctccaatatctgaggcgcgggccaaagcctatgctccggcctgccgattcattaccagtatatgagcctccgtgccaaagggctgctcttcctctccacattttaaaggggcttcctgtttttttaaagggcaatgttacataatatttttaaagcggcctgagagacttttgcccattgtcccacaaaaggagtgaaaccctgtgcatctgcatgaaaacccatccattgacctgctgctcaaactgatctatctcttgctcatcgccggaggggtgtggctgtttttccactatatcttcggctgggtgctgccgctggtcatcgcctacctgctctcccggctgatccagaagccggtggccttcctgcagcaaaaatgccggcttccccggaatatggccgccttcctttgcaccatcctcaccgtgggacttctgagctggatggtttattttgtgctgtcccgccttttcacagaggccttcgcccttttccaggccctgcccgcctatctggacgacctgcctgaaaaactggaccgtgccaatctggccttacggcaatgggccgcccgatggcacctgtctttcatcgacccagcccttttgtccttcgaaacccttctggcccagatcaagccgccttcggtggatgtaacccagattctgagcaccctgggatcggcggcctccggtctgccttcggtgcttctcaccctggccttcatcctgctgggcacctacttcatgagcggagaacaaagcaagatctccggttttctggcccaatgcctggggaaaaagggcactcagctgggccgtcagctgcgggcctttctttatgaaagcgtgggaaagtggctgcgggcccagtgcatcctcatctgcatcaccttctgtgagctttcggtgggctttttcctgttaaagctgccctatgccgggcttctggccctgctcatcgccttcattgatgccttgcccatcttgggagcgggcgccgtgctgctgccctgggctttgttttcctttctcctggggcaaaagggcctggccctggggctggggctgctttatgccgtgatgcttctggtgcgcagcctgctggagccccgcatcgtgggccatcagctgggtcttgatccctttgtcacgctgctgtgcatctattttggcttccggatcgcaggttttgccggaatgttccttctgccggtagtggtgctcaccgccttcaaactgcgggaatggggctatgtatccccggaaagaaacactggctcttcccagggaaaagaataaaaaagccccttttgccctggcgacaccggacccgtagtaacctgcgctttctgcaggtgggtccgctcttcactgtttcagcgcttccaacttccgactctccaaagagggcgggaggcctgcaatccgcagcgaaatacgcggtcccgtttcgttactttgtgggttaaaatggatccggcgccgccagcgcgaaaggggcggcaaatcttatgatatggagaggaaaagatcaatatccctctttccgggcttcttcttcctcttgttcttcgtaataatcctccaggcgctgggagaagatctcaaacaccttttccagcagctcctcatcttccacggtggccaggatctcttctcctgtctgctcatcgggctccacccgcagaatcatcagttcgtattcatcggacagggacatctcggcgggaatgaaggccatataggtctccccttcgtattccaaagtgtccaggtgttccagctccagctgattgccctcatcatcggtgagagtgaggaaatcgttgccgtagccgtcttggttttggctcagtgtgctcataaagcatctatcctgccggaagagccggcttttcctttcggtttcgtttttactattataccacaatcggggcaaagaaaaagagttgacacaaaaagatttcgctggtatactatctttggtaaaacaaagcagggctgaccgccctcaccctcatggctgacagaaagggttaagactgggtttctctttccttttggggaaagagcggtttttgtagcttaggcggtcgctttgcgcctgagcttttttcattttcaaggaggtgcttttacattagcatcatggaacatcaaatcaacgaggaaatccgggaaaaggaagtccggctgatcgacagcgagggccagcagctggggatcatgtccctccagaaggcgctggatgccgccgaagaaaagggactcgacctggtgaacatctcccccaaggccaatccccccgtctgcaagatcatggactatggcaagttccgctttgagcaggctaaaaaagagaaggaagccaagaaaaatcagcgcattgtggaagtcaaagagatccgcttttctccgaagatcgatgtgcatgattttgaggtgaaagcccgcaacgccaccaagttcctcaccggcggcgacaaggtgaaggtcaccgtccgcttccgcggccgggaaatggctcacacccagatcggtatggatctgctgaagaagttcgccgaaacctgcaaggaagtgggcaatgtggaaaaagagcccaagctggagggccgccagatgatcatgttcctggcccccgtcaagaaaaaaccataacggctgtgccgtttgttttaagagaggagtttcaaaagctatgccgaagatcaaaactcatacaggcgccaaaaaaagatttaagctgaccaagtccggcaaaatcaagcacggttccatcaacagacgccatttcaacaatggccatggctacaccgccaagagaagacgccagctgcgcaaggccgactatgtggattccaccaaggccgcccagatcaagcgtctgctgccctacaactaaacaaagcatacacaggaggctgaaatacaatggctagagtaaaaggcgcgatgatgacgcgcaaaagaagaaaaaagaccctcaagctggcaaaaggctattggggcaataaaaagaaccattacaaggttgccaatcagcaggtgatgaagtccctgaagtatgcctatgtgggcagaaagctgaaaaagcgcgacttcagaagactgtggatcacccgtatttctgcggcttgcgcccagaacgacatcaactattcccgtttcatgaacggcctgaagaaggcgggcatcggcctgaaccggaagatgctggccgagctggctgtgtccgacatggctgctttcacctccctggtggaaaaggccaaggccgctctgtaaattttatctttttaaaaaaagcgagacaagcgtctcgcttttttcttttgcaaaaacgggaacttttccctgaggcctgcgtctaaagagggcatgaaacccaatgagaccgaaaggagactgtaacccatgaacaaaaagcattacctggcccggcctgcggctgcggccctttcccttaccatgctgtggagcgccgttgctgccgctcccctcagcgacatccagggccactgggccgaggagaacatcacccgctgggtggaagccggcaaactgggcggctatgaggacggcaccttccgtcccgacaacaacatcacccgggcggaatttgccaacatcctggcaaacctgctctcccagccggcagaaactcccgaaagccccttctccgatgtgaaggaaggcgattggtattattccgccgtcaccaaactgctggcctatggcgtcgtctcggaagatgaaaccttccgcccctcccagaacatcacccgccaggatgccatgaccatggccgggcgcgccttccgcatcacctcggccaatgacgaagtgctggataagttctctgacggcgatcaggtagccgcttatgcccaggcttctgtggccggctttgtggaaaaaggctatctgggcggctatcccgacggtaccctccgtcctctggccaacatcacccgggccgaaagcgtcaagctgttggattccctgggtctggtccacgatgccgattctctggaagggatcattgagcgcacctatgccggtctggaagatcccgatgtgatccccatggtaaccaccacccccatcaccgatgagaccgccgaatactatctgggtctgaaggatctgtcccaggtggaagaagcggtggcttcggaagcggccatcggctctatcccccactcggtgtgcctggtgcgggccaaggacggcgtggatgtggaagctctgaaagaagaaatccgcacttcggtgaatccccggaagtggatctgcgtgggcgtggagcgcgaggagatcgtcatggccagccagggcaacctgatcctgatggtcatcaaccccgatatcccccagcagatcgccgacagctttatgaagctggacctttcccccaaactcacaccggacgccaacggcctgatccagtatgaggactattatatggatgacatcggcactctgcggcccgattcggtgaaaaactttgccgcgaagatcgaaaacctggctgccgatcagctgaaagaagcggccaacctgtactattccgtcatccccagcaagtcctattttgtcaatgacaagctggagacctcctttgactatgaccagatgaagtccattctgggcgagaatgtgaagagcgctcagtatatcgacctgttcggcgcacttcagctggaggactactacaagaccgatccccactggcgccaggaatgcctgcagggtgtggtggatgctctgggtaatgtgatgggcttctctgttgacctgtctaccttcacccagaacaccaccatcgaaggcatcaccggccagcacggccagggcaaggatggcttccccaccgagaccttgacctatctcacctctgccgccatggagcaggtcaaggtggataactgggatgaaaccgctcccgctgccatttacgatgtggccgctctggaaggagactccccctacgatgtgttcctctccggccccacgcccctggtaacgctggaaaaccccaacgccacctcggataaggagctggtgatcttccgggattcctattcctgcagcctggctcccctgctggtggagcagtacaagaccgtcacactggtggatctccgctacatgatgagcagcctgctgcctcagtatgtggactttgccgggaaggatgtgctcttcctctataacgagcaggtggtcaaccacagcgaaatgctgaagtaaacaccaaagataccatatttctctcccgccgggtcatgctgctggagcagctctaccgggcgttcaagatccaggaggggtcc

SEQ ID NO: 211 - DNA, 28529 bp, Unknown
  16S sequences of unknown bacteria
ggaccagatgatgctttgacatttcgatgactatacctttcgtactactttcgatgaattattcgtttttatggaacaaaaaatatgccgcgcgcgtcttttaatcagaaggcgttccggagtggtcgtcggggatatccgtttccggagccttttcgggcagcgggtcggcgtatgcctctacacggtttatcgtgaagccgcgttcggaaaagttcttctcgtactcggtcatgacgttatccgcgttgtattcgctgttatgaaggtcgtaggttatgtcctcaagccgccagccgcactcgcggaactcctcgagcgagaagtcgaacagtcctcggttgtcggtcttgaagaagatggctccgcccggcttcaggagtcttctgtactccgagaggaaggagcggtaggtgagcctgcgcttcgcgtgaccggctttcggccacgggtcggagaagttcaggtatatgcggtcgatcgagccgtccgtgaagttttctgcgagtttcgcgacgtcgcctatcatgaacctgacgttcgggatctccgccgccttgcatttttccatcgcgatcatcgcgacgtcggagcagcgctcgagagctatgaagttgacatccggctccttcacggcggttccgcgtatgaaggcgcccttgccgcagccgatctcgagccgcagctcgccgccgcgtccgaaatccgccgccgcgccgtcgcgtgttacggggagtgtctttataaggagctcggagcaagcctctatccgctccgcgccgtgtttcttttttctcattcgcattgtggtatatcctcgcggtatataaatatagtgacacatggctgttccgccgcggtaaagtatttttatgtgacaaatctttcccgggggtattgaaatcttcatgaatttctggtataatattgctgacgccatgactctcatactattataacacacaatgcggcgtgaatgaaagccttattcgaaaatatttctgaattttttacatatgacaggaggttgagacaagccttgacagacaaacaggattttctcacgaaactgcgggcggctcttgtcgagcgcgacgtcgccgagagcgacatcgatccgtatatagagcgcttcgaccggttcttcgaccgcatggtccaggatccggaaaaggacaatctgctgtccgacgtcgaacacatagcggacaacatcgccgaacagatctccgagagatacgacgagatgaaccgcctcgccgagcgcacgctgactgtcgaccgcgtgaaggacgacacggagcagaacggcgcgagcgaaggcgggggcgcgggtgcgggcaccattgaaccgaaaaagagcgcgtctgacaccgctcccgccacgtctgacagaccggagtcgtcggaaaagactgacagccccggcgcgcaaggtgaaagcgccccggcgcaggaacgggtgaaagctcattcatcccacgcgtccatcgacgccgcgccgcgctcagaagtgccgccggtgccggtggctcggcgcgcggatcacggatatgagaatgatggacagatgaccgatattccggacgagccgcgtagatcgcagataccggagtatatcgacgaggagccgtccccgaacagcaggatgttctggatacttttcgcggtcagccttccggtcacgataccgctcgcgatccttgggttcgccgtgttcgcggctatgtgggtcgccctcgcggcgctcatcgtggtggcggtcgtggctcttgtcggagtcgtcgcgggaggtaccgcaacctcgctcgtcggggtggtttacggtatcacaaagctgttcagctctttcccggtcgggctctatgagatagggctcggggtcatggtcggaagcgcggtcatgttcgctgggatactgctgtataattttgcgatacgccttctgccgtggctgatgcggctcgtcgggcggctgttcatgtacgtctgccgacagctcggcgtgctgttcaggttcctcagaagggagtgtgctaagctgtgaaaccgacatccataatatttctgatagtctcggtggcgctcgctctcgcggggcttgtcacaatgaggatagccgagggaataggcgtgagggaaggaatacaggtcgtcgcagacacgacggacgatggcgacagcgtgtttacctatgatttctctgaggacagcatcggcaagatctcggtctctgtcgggaccgccgacataaacataatcggcggcgcggataagccgtatattgagcttgtcaacttcgccgacggtctctacgagttctccggcgcgaaccgcgtgctcactgtcagcgaccgcaccgatctcacggatatcgacggaatcgccgcgttcgcgatgaatttcaagggtctgcgcgggctcgtgaactacgtccacgtgcgcgggaaagagaagacggtcaatatctatctctccgagaaatacccggtgaacattgtctcctgtgaggttgagagtggaaatatcgccgcgggttcatccgggttcaagactgattacgatttcacggtcggaaccggtacgataaccgtgagcggcgtcacgaccggctccgggctttacttcagcgtgactgacggatcggtgacgatctccgacagtgacgcctctaatctcgtcataagcgattccggaaaatgcccggtcgagatcatctcctcgaagattcgcaaaatcacggcggagacggaggagggcgatttccgcttcggcagccgcgacaggatgtccgcgttcaacctcgatctcttcaccggagtcggcagcgtgaagatcgacggcgaaaatcacggcggatactacgagacaccgcagtatccgaccgacgcttcattaaagataactctcggcaagggcgacattgtcctcgcgtcggatatgcagccgacgacgtcgaacgatacatccgtggatgacacgtcagctgacaccggagagtgaaaattatcattaaggatacactgaataaatcgggttttcgcagaaaaaaggcttggatttatgggcttttttctgcgaaaacaaccttaaatcagtgtttccttaaccattgattgaaaggatagaagtctgaaaataaattttcagaccaaactggtttgaggctttcacgacattgggtcgtgaaatttgaaagacggataagccatctttcaaaaccgcctcaaaactgtaagttactacgaaaggtatggtcataaatatgagacaggaattcattctcgacaaagagtggcgcttcctcccgtctgcgggagttgtagaagcgcagaagacgcattccgattcctacaactcctccaaggcggggcaggagcgcggaataccgaacatgaactttgacgacagcgattggaaagtcgtcgacctcccgcacgactacatgacagagtcggagttttctcccgacaacctcatctcgcacggctacaagggcagacacgacgcgtggtaccgcaagtcgttcgttctcccttctgagctttccggaaagcatatcatgctctctttcgagggcatggcggtcacggcgagggtgtatgtgaacggttctctcatgggaagatcgttcagcgcttacgctccgctcgacatagatatcactgaccgcgcgttcttcggggacagggtcaacacgatcgccgtttacatagacggtctgtccaccgagggctggtggtatgagggctccggcatctaccgccacgtccgcctttatgtgaaggaacccctgcacatcgcgcagtacggcgtgttcgcgaagcccgtcctcgacgagaagaccgcgaacgactgggatctcgacgtcggcgtgacgatcgagaattcctcctacacccgcggcgcctgcacggtccgcgctgagctgtgggacggtgagacgaagctcgccgacaccgaatccgccccgattttctgtgacggcgacgcgaaggctgaggcaaagtgcacactccgcgtcgagaacccgcgccgctgggacatcgacacgccggaactctataccgtaaagacgatcctcgccgatatgaacggaaatgtcatcgacaccgactcggtgaagaccggcttccgcaccttcaccgttgacgcggacaagggcttcttcctcaacggcagaccggtcaagctcatgggaacctgcaaccatcaggaccacgcgggcgtcggcgtcgcggttccggactcggtgcagtactacagaataaagcgtctcaaggagatgggcacgaacgcgtatcgctgctcgcacaatatgcccgcgaaggagatcctcgacgcctgcgacgagctcggtatgctcgtcatggacgagaaccgccgctttgagtcccgccccgaggtcatcggacacgtcgagaagatggttctccgcgaccgcaatcacccgtcggtcgtcatgtactcgctcttcaatgaggagcctatgcagggaaccaaggagggcggaaacatcttccgccgcatgaagagcgcggttcttcgcctcgacgacacccgtctcatcacgggcgcgatgaacggcggacagaacaacgccgacggcgcttcgtccgatatggatgtcaccggtatcaactacaatgttccgggcggcgttgccgagtatcacaggctttacccgaagcacccggtcgtcggctccgagaacaacagcgcgatctcgacccgcggctgctacaagaccgacaacgagaagcaccagctcgcctgctacgacgaggaggtcgtgccgtggggtcagcttataaagaccacatggaagttcacgcgcgagaacgactggttcggcggcatattcatctggaccggcttcgattaccgcggagagccgacgccgtatcagtggccgtcgatcggctcgcagttcggcatcatggatacctgcggcttcccgaaggactcgttcttccagaacaaggcgtgcttcacgaaggagccgatgctccatctgctcccgcactggaactggaaggaaggcgacaccgtccgcgtcatgaccgcgtccaactgtgaggaggtcgagctcttcctgaacggcgagtccctcggacgcaagaagagcgactgctgcgctcccgcagagtgggaagttaagttcgtccccggcaggctctccgcggtcgcttataatcagggaatgatcgtcgcgaaggcggaaacctggacgaccggcgctccggcaagagtagtcattgagccggaccgcacgtatataaacgacgacggaatggacacggttccgttcaatctctcggtcgttgacgccgagggcaagacggtcgagaccgcgtctgatctcatgaacatcgagcttatcggcgacgcgacgctgctcggcgtcggaaacggcgacccgaactgcctcgagagcgaccatgagccgcgccgcagcctctttgccggtcacgcgcaggctctcatccagtcgaagccgggcgctgagaaggtcgggataaaggttacggctgacgggctcgagagcgccgtctgcgagcttgaggtgcgccatgtcgcgcgtccggcgtatatctacgctaccgagtgccgcgacatctccgggttcaccgtttcctcggagacctatgagagcgagccggatccgctcatggagatcgccgacaacgacatgaactcgttcgagccggtgtccttcgacccgtggcatatttccggcggcttcaagtccggatacaggatattccgcgcgttcatgaacatcccgaagtcggcggacccgacgaagaacggcgagttcgagctcgacgtgaaggagctgttcgcgtccagcgcgaaggtctttgtcgacggcgtgtgcgtgttcgacggggaaactaagtccggcgcgccgctcgcagtgtcgttcagaccgggcaggaccgggaaggcggagctgcgcgtcatgctcgaggcggcgaaggacggagattccggaatcaagggcggagttatgctcaggatgaagtgatcatgatacgtccggacggcggaaaatcacggttttccgccatccggcgcgtgtttcgcggttttctctgaaagcggaatctgattctgcttttaataaattaaaattataaaaccgcgattttgccgcgaatatagaattccagctttttggttgtgcattactgccaaaatctatggttgaaatttggggaaaaaaactctttcaatttgcgggaaattatgatacaatattatgcgtaagataatcggaatccgggcggcgggcgtccatgctttccgtgcctgtttcggctaacataatcaggaggattataccactaatggcaagcttatcactcagacatatttataaaaagtatccgggcggagttaccgccgtttctgacttctgccttgagatcaaggataaggagttcatcattttcgtcggtccttccggctgcggaaagtccaccactcttcgtatgatcgctggtcttgaggagatcaccgagggcgagctcttcatcggagacaagctcgtcaacgacgtcgctcctaaggacagagatatcgcgatggtgttccagaactacgctctgtacccgcacatgtccgtgttcgacaacatggcgttcggtctgaagctccgcaaggtgccgaaggaagagatcaagagaaaggtcgaagaggccgctcgtatcctcgatatcactcacctgctcgacagaaagccgaaggctctgtccggcggtcagaagcagcgtgtcgcgctcggtcgtgctatcgtccgtgacccgaaggtcttccttctcgacgagccgctgtcgaacctcgacgctaagctccgtgcgacgatgagaactgagcttaccaagatccataagagactcggcaccaccttcatctacgttacccacgaccaggtcgaggcaatgaccatggctacgagaatcgtcgtcatgaaggatggtctcatccagcaggtcgatactcctcagaacctctacgacgttccggtcaacctcttcgttgctggattcatgggtactcctcagatgaacttcatcaacgcaaagcttgagaagaagggtgaggatgtttatatcaacttcgcaggcaactcgctgaagctcccgaacgataaggcacagaatccggctctgaaggattatatcggcaaggaagtcattgccggtctcagacctgagtgcatccacgatgagccgatgtatctctccagcatggctgatcatgtcatcacctgcactgtcgacgtcaccgagcttatgggtaatgaaatattcctgtatctcgcagctgacgaggagcagtctctcactgcccgcgtttcgagccgttctaccgctcgcgcaggcgatactgtcaaggtcgcactcgatatgtcgagaatgcatatcttcgacaaggatactgagcgctgcatcgttcactaaggtgttgccgcgaaaaacggcatagtccgctgtcgcgccgataagcgccgactgacgaaggtaagttaaatattaaggatccccgacaaattatatggcaaagtacatatggttgtcggggatcttttacaaaatgaaaaataaggtatcccgttatcataaactgaaaactgaattacacggaggatgtcatgcgatgaaatgggcacattcgattggtcttatagcaatatcccttatcctgagttcacttgcagcctgtgggagcgccgcgccggaaggtccggtcacgacgtccgtaggcgatacgacgacagaggtgcccgtcgacacgcgcactgagcttgaaaagctcgaaggcgcggattacgacgggtatgagttcggtatcctgctcaacaaccaggacgacagattcgtcgacgtgatgacggtcggcgagatgaacggcgacatcatgaacgacaacgtctacaagcggaacctcgctgtgcaggagaaatacggcatcgtgatcaagacggagcaggatgagtataagaacgtcaacgaaacctgcaagacgagcgtcatggcgggcgacagcgagtatgatctctatttctcgaactgttatgcgacggggcttgcctcagcgggttacctttatgagctcggagggctgccgggaatcgatctgtcgaatccctggtgggacccggcggcgcttgaacagctttcggtcgggggaaagatttatctcgcgaccggcgatataagtccgacgtcgctcatgacctcttcctgcatggtcttcaataagcgtctgctcgattctgtgcagatggaatatccgtacgaggcggtgaagcagggaaagtggacgctcgatatgctcgcggagctgacgagcgacctgtcgcgggacatcaacggcgattcgtcgatgactctcgaggatgatcttttcgggtacacgagctggatgtgtgacagtccgtactctttcttctacggcgcgggcggaacgctttcagtcaagaacagcgaggatgtgccggaggtgtcgtatgacatggacatgatcaccgaggtctacgacaagatttaccggataatcatcacgaacagatcatacttcgttacggacgccgcgaaatacccgacgttctacgagtgcttctcggacggaaaggcgtatttctccgagatgacgcttcagaagatagagatgttcctcagagacatgaaggacgacttcggaataatcccgataccgaagcggaacgagacgcaggagaactacatcgcgtgcgtcaacggcgcgggcggattcgtggtcgccccggcgaacgccgagaacccggagcgtaccggacgtatcatggaagcgctcgccgccggagcgtatgacggcatcacaccggagctctacgacgtcataacgaagacaaaggtcgcgagagacgaggagtcggcggagatggtcgacctgataatcgagcaccgcgtctttgacccgtactatataaatcttgtgaaaaactacgacttcatgcagtccgccctgtcgtcgaagaaagagagcgtgacgtcggtactcgagtcgggaaggtcggcggcggagcaggctatgacaaagcttgccgaaacttacgcggagaacaccaagtaataaaaaaacagaccgtcgtcggcggtctgtttttcggtgattattcggtttttccggtggagccgctctctgacggagccatgttttcctctgtctggagtccgacgcggcggattttcttcgaggtcgtcttttcgaattctgtgcttctgagctttatcttgagaaccttcttgtaggacgggagtgtcttgttgagctcctcgacggcgttcttgatcatcgtgttgcgctcctcgaccgacttgccggcgagaagctcttcgttcgggtagatctcggcacagagtgctgtttcctcgccgctctcgtttctgacggcgtagaccacgacctcgctgacgtacgggatgttctggagatagccctcgatttcctcagggtagacgttctttccgttcttgagaacgatgaggtttttctttctgccggtgatgaagagctgtccctcgtcgttgaagcggccgtagtctccggtgcggaaccagccgtcctcggaaagaacctcggcggtcgcctccggcttcttgtagtagcccatcatgacgacgtcgcccttgacgcatatctcgccctcgccgtcctcgttcggctcgtcgatcttcacctcacagcaggggaggctcacgccgaccgaacggtaatccgagtaataatcgcggttgaccgagacgagcggtgagcactcggtgattccgtagccgttgatcaggtttattccgacggcgtcgaagaatccggcgagctcgggtcttatcggcgcgccgccgcagacgagctttatgatctcgccgccgaagacgtcgtggaccgacttgaagagggtctttctcatgtcgatgccgaccttgcgcatcgcgttcgacgtctttatgagcttttcaaacgcttttgccttgccctttgcctcgatgccggacattatcttcttgtagaggttttcgacgaacagcggcacgagaaggatataatccggtttgaagaatttcatgttctcggcgacgtgtctgagactgtcgtttacacagatcgtcgagtggtgatggagcgaaacgagtattccgcagaccgcctcataggtgtggtgatacgggagcaccgacagacatctgtcgaacactgtcgagacctcaagtccgtaatagacgcttgagacaaggttgtgctgtgagagcatgacacccttcgcgataccggtcgttccggaggtgtagacgagcattctcaggtcctcgtccttcggctcgagcgacgtaaaggcgttgtctccggctgctaaaagctcctcaccgtgcgccatgacgctcttcatcgaaatgaagcgtccgccctcgtcctccgcgttcatgtcgatcccgacgaaatattttatccacgggagcttgtcggcggcgtcgcggaacttctcctcgtagtgcgacgagaagaagacgaccttcgagtcagagtgcgcgaggatattcagtatctccgggaacgggagctccttgtcgaccggcacccagacgccctcggtgcagagaatcgtgagatacgcgaggatccactcgtagcggttttccgagaccatcgcgacatggtcggcggtgataccgagcgcggcgagccctgtgccgaggcattcgacctcgtgtctgaattcgtgatatgtgatgtcgcgggtctgcttctcggcgtagttcgtgtagtaacggatggcgagcttgtcgccagcctcctcgtcggcacggcggagcatatccttgaaatctgtaaagctctcaacttcgtagagcgggtaattcttgttcttagccatgataaacctcgatatataattcagtgaaatatgaattggcatagatctttttacagttgattagtgtgaatatttttgaaaaggttacagaaaccgaaaaaaatctttccggaacttttttgtgatgtgttgccgttccggacattatctgttcacaaatatgtgttataatgtttttagtggtgctttcaccattttataaaagtgtaattcgagggataatatatatgccgaaccatttcgattacgagattcgtacgcttaacacggatgatgtcgatcagtataacgcgcttttacgctattcgtttcaggtcactgagcaggagctcgcggagaccggctggcaggacgacgagataaagcagtcgaagttcccggtgctcgagcgcgcggacgtgctcgggtgctttgacggggacacgctgatctcgcagttcgcggtctatccgctcaagatgaacgtctacggcgcggtcttcccgaccgggtttgtcacgagcgtctgcacatatccggagtacaccgggcacggtataatgaagcgcctgatgctccagagcctgacgaatatgcgcggcaaggggcagtctctcgcgctgctctatccgtactcgataccgctctaccaccgtctcggctgggagatcgtctcgaacaaaatttcatatacgataaaggacaggcagataccggaaaaggcgtcggcgcccggctatgtaaggcgtgtcaagtgggagaacacggatttcaagaatctccactccgcgtttgccgctgtgacgcacgggtgtctgttcaggaactcgctcgcgtgggaggagtactggcgctgggatgaggacgacacgaacgtcgcggtctattactcggagcatgacaagccctgcggatatatggtatacctcataaagacggatatcatgtatataaaggagatgatttttctgaaccgtgaggcacagctcggtctgtgggaatacatacgcgcgcacgagtctatgatcgacgaggtgaggggaaacaccttcttcagcgagccgatagcgttcgagatggacgacggcgacatacgcgagatgataaagccgtactgcatgggaaggatagtcgacgtcgcgcagttcttcgagaaatatccgtgcgacccggacgagaagccggtgaagatcgcgtttgagctcgacgacaatatgctcgagtggaacaacgggaccttcgttgtcaggtttgagaacggtcactgccacgtctgcccgcacggcacgcacgccgattactcggtgaagatgaacatagcgacgctgacggcgctgctgctcggatacaaaacggctgagagactttacgagcttgagcggatatccggaagcgagagcgcgatagaacgtctcgacgacgttctctttcacaagataccgtacatttcggactatatatagtcagacccgcgtatcttggcatccagccgccgtcgagaacgcccgagtttctcgaaaactgagagagccgccgtccggtgcggagttgtcaaccgagccggacaaataccatgaaacaaaaaaagcaggctgtcgtgcggacacggcagcctgtaagttattttactcgtttatttggaattgatagcttccattactttatctatctcggcaactgttgagtccttgtaagtagcaacgatcgatgcggctccgccctgtccgctcgtgattgcatttgcaagactgcttctcagtttttctccgagaccgaacgcgtaagcagtgtagtaggttctcgaatcacggattatgtcaagcatctcacttgtctcatcgtcacggatgtgcttgagctggagtacaacatcatagtacttcgggactatatcacgatacgaaagataggacatggcatcaaggatgatcgccgtctcatcaagcttggtattcgttaccggaattgtcaggaagtaagtccagaccgcgacagggctgacgtaatcgtcattctcatcatacttcggcatcggtacgattccgtagtcgtccttcatatcagagaactttcttccgccgtctccacccttgatctccatggcacagaacatcgaacgtccggctgcgaacaccatctcgtagtggcttccgtttgtcttgtcgttggagaagaaggcagttcctttctcgccgaagaccttcgtcagcttgtctgcaacgtcgtagaaattacccgtacctgccatcagcttcgccttgccatcttcaaactttatctgcttgtttcctgtgcagacgaatgcctgagtgatgaagtcaggctgcatcgaggtgaagccgtagactgaatttccgtccttgttccaatcccagctctcgtcgccgttcagattcgcgccgaccgatatgtacttgtaaagctcgtcaaatgtccacttaccagctttgactgtgtcgtatggtaggtcaagctgatgatcttcaatcatccgacggttgaaatagaggcaccacgacatctcaaaattgtggagcgtcagatcgctgctggcaaaatagagcgccttgtcatttccgacatatgcgtcagccatgacatcctgatcccaccacggctgctcaaactggaatcccgatatctttgaaagatcctgaaggattccctctgttatcagcgtgcccatattgtaggtcagcgggaaagcaacatcgcagatataatctccggcggcaacggccgtttttaccactgcggcaacgtcagattcgcgtctttctacgattttgacattgaacttatcctcaatggttgcgtttcggctccatatcgcgtcgtcaaggatatctcctgtctgtgtttcgacccagatgtcacggtaggaatcgcctctctttcccatttcaccctgctgaaggaagacgaattcatcgccgttcatgttgagttcaggaaaggagtattcagcgtttgtgtctgtttctgtagttgtctcgcccgagatcgtggtttcggtctgagtctgggactctgatccgcacgatgtgcaggacatcaggagaagtgccgcaagaatgagtgtgagtttgtttttcataagaaaaaactccttttttataatactattgacattataacgcaaatagtgtataatatcaatgacaataacggaaatattggtgacagaaaaggagattcggcatggaatgggaatatgaggaatggcgtgataaaatagtcataccatactgcgagctcgacaggaatgacggcgtgaaaaagcatcatatcagatgcgcgcatctgcatcataatattgagatgctttacgttgtcgagggcggattggggctcgaccttctgagcgtcgacggtgaggagacccggatggtgctgcgtgagaacgacgttatcgcgattaactgcaatatcatccacgctacctcgccgaaaaacagcgttgcctattacgtcgggtttgttcccccgaaatgccttatgacgcctctgcatattgatatcggtaagacatacatgaagccgtatcacgatgagaacaggcttctgcgccagtttttcgacaatatggcgatgttttcgcgcggagagggcggaccggcggaaaaggacgctcttatgacctcgctcgcgaacagcgttatggctatacttcttccgcgcatgagcgaggggttggcggagctgcgcgggagcacggtctggacggatatgctgacatacgtctacaagaactaccgcaaccctgaattgacggcggattcgatctcacgcgcgttcggatattcgaagcgtacgttgaccgatatcttcagcgagagcatcgggaacagcgtcaagcgctatattgactcgctgagggtaaacgacgcgaagacgcttctcctgacgacgtcggcgagcgttgagagcatagcgtatgaggtaggctatgactgcccgcgcaccttcttccgtgtcttcaaggtgcacacgggaacgacgccgaccgcgttccgcgagagctcacgaaaataaaaatgtcccccggagagatgccgggggacagactttttcaggttattttccgaacgcggagaggactttttcgaggtttgcttcgacctcgggctcagcggcggcgatggtagaggcggcttttccgtttccgttaaggacgacatcctgaagctggttattcagcttgtttgttataccatatagatttgagacctgagttgagcgattgtcccgcacgatctgaagcatttctattgaatcgtcgtttctgaggcctttctgcgatacggtgacatcgtagtatatcggaaggcaattcttgtagctgtcataggtaagggcatcaagaattattccggtgcgcttcatgtcggggttcgttgtcgggatggtcaggaagcaggaaatcgggtttacgtatgtgatgtagttctcctgtgcctcgtcgtatttcggcatcggcacaagtccgaagttcgactccattgtgcgcatcataagcgcggttttaagctcagccgtgatgaacatcgcgcggttattcatgaaagcgtaatagtaaccggttttcgttgaaaggtcggatccattatcggaatacgcgtttccggactttttgtcgagaagcgcggaaaccttttcaattgtcgaatacatgcgctctgtagccgcggtgaaggtgaatgtgtcaccggatctggtcatgagcttattttccgcgctgaacaggaacgcgtcggtgcttgagatgtgatttgctatcgcgtagacggagtttccttcgccgttccacttggtgaaggattcgtctccattcagagacggtacccctgctatcatcgtgttaaacgcgtcaagcgtccatttgccttctctgacaaggtcatacggatactctatcccgcggtcgtccatcatgttctcgttgaacagaagcacccacgcgaggtcgagcgacatgaactgaagcggtccggaggcggtgtagagatgcccgttgatggctatttcatcgtttatgacgttgtcccaccacttttcgccgagcttaagctccgggatagtgtagagatcggtgagataaccgtcagtcacgatcgcgggctggaagtatatcggaaggtaagcggcgtcgtagtcgctgtcccctgccatgaccatctgagtgatggttgagagcatatttaactgacctgtgctccactccgaggcgtccgctttgacctcagttatcttgcagttgaatctgtcctcgatgcggcggtttctggcgtatatctcatcgtcgagctgttctcctgtttgttcttcaatgtcaacgcggacgttacatccgaactgctcgtcggggctgtaaaaagtgaattcatatccgccgaaatcctcgtcaggataggtgtattcagggggttcggactctttggatgaagtgtcggctttatttgtctcagtgtccttgacggcgctgtcgccgcacgagatgaccgatgaggacatgatgagagctataatcagagaaacgaatcttatctttttcatagaacaacatcctttatgtttcattttttttgaaattgctattgacattataactcaaatagtgtaaaatgtaaatgacaaaaacgcatgaaaaagtgactgttttacggagaggttaccaatgggtgagaataactatgatctgataaaggatcttggtggattgccaacgtgtatattatctgattatatagatttcgtggatacacactttcactacgcgatggagctcatttacatggtcggaaatcgcatgacgatatttatcggaacggaaaggatagctttatcgagcggggaatatatctgcatcaacagtggagtcgcgcacgcgaccgagaatatagacggcgaccgttattatttatgcgcaattccgaaatacactttgatgccgtcaatacagatgttcacgggcgactttgttgttggcagggacgatgaaaaaggcactgttcgaagccttttagagtgtttcacgcgcaagaactggtcaaaaaataacgtttttgtgacttcgattacaaactcgataatgtcgctcatactggcggaaaagtatggcagccggatgttcgtcaagcgctctgacccgttcctcgagatgatctcctacatctgtgacaactattatgacccatcgctgacgaccgcctctctcgcgaagcgcttcggatacaccccgaggatgctttccgacctgttcatggcgaacctgaagaccggtgtcaagaggtatatcgatattctgcgcgtgaatgacgcgaagtacagacttttgtcgactccggacagcgtcgaggttatcgccgcggcggtcggctatgactgcccgcgcaccttcttccgtgtcttcaaggcgcacacgggaacgacgccgaccgcgttccgcgagagctcacgaaaataaaaatgtcccccggagagatgccgggggacagactttttcaggttattttccgaacgcggagaggactttttcgaggtttgcttcgacctcgggctaggtattttcttcggtgtaaaccgcctgcgagagcgcggttttgttatccgtttcctgccacacctcgggtacggtgtccgcgaagaggatgtttctgacgataagcgttccctcgtcaacaaaggttgtcgcgcggtcaaagccgccgacacgtacgatactgtatttattgaatcctttgcccctcacggtaaggtcgctgccgtcatattcccatccggtcattattactggatgcgtgccgaaggtcatgtcggtgcgctcatacggggagcctgcgtcgtcatacagctgcgagtactcgagcattttgagcccgtcgtcatccgtctcgcctgtcctcagctcgaccctgtgcagacgcgatatcgcgccctcgtcgatcgagcacagctcctgtatgtacgccgagagcatatacgcctcaagatcacggtcgagcgagtccgggtcggagccgaagatgtccgtgttcgtccagaccgcgtactcggtctcatagagactgccgttcgtgaggtcgttcgccgtcagggtcagcgccggcatatggtcgccgtagaagacgacgacgcagggctcgccgcgctctgtgagcgcctcgataagcgcctttatgaagttgtcggtctcgcgcagctcgttcacgtaatacgtgagctgtgagagcatcgccgggtcatccgtgccagagatggttataagctctccggcgctgtcatagctgtccggcgcctcgtaggaatcgccgaacttgtccgggtcgagaggctcactcgggtatttaccgtgcccctgtaccgttaccgtgaagacaaagtccggactgtcagtcgagtcgagtgccgaaataatctcaccggtcagaacgtcgtcacgctcccatccgagcgggttatatgtaacgccggtcatcatctcgacaggagtgaaggtctcgaatccaagactcgaatacgcgacattccggtcatagaaaacagccgtgtggttgtgtatcgcgtgggtcgagtagccgagcgtcttcagattctgtgcgatactctcgcaggcgcgggatttcagtatcgtcgtgtacggatattccccgaatccgaagtgatcaagattcatgccggtcagaacctcgaactcggtattcgctgtcccgccgccgaaattctccactgtcagataaccagagacgccgtttttcagcgagttgaaggtcggcgtcggatcctcggaacagtcgagccaccttatatgactgacatcaaagaaggactcaagctgaacatatatgatattcggctgttccgccggctgacctgagacttcagccgtgtccccggaggtaaccccatccgtcggcgccgtgtcagtggagtcaagtgactcaagcagctcgcccagaacgtcatggtcgtagtcctccggcttctcgaccccgtgcgagacgaggctgcgcgtgaagcagtagacgaagccgtagtcgctgtatgagtcggcgagctccccgtccggcgtgatcgctttggttttcgcggcatagagcgtgcatccgaggacggcgagaccgaccgagaccacgaccccgatggtccgcgggtacgagacctcgcacttcgggcatcttatgttcagaaatatcataagcccgatgaacgccgccgctaaaaccgcgatgaggacgatctgccaccacgaaagatatatcgagaacatcccgagcgccgcgcgcacaatcagaaaatctatcgccgagagcggtgacgacctgaaagtcagcacgatgaagtttgtgaccccgagcgcgagccacagagtcgagacaaaaaacagcgccgtaagcctttttttggcgataaggcagagggacagcgtgaaaaggattataagcgagttatataaaaacagtatcggatgctcagtcatgaacccgaacgcggcgataagcgagcgccgcccgagcgcttctatcagcagatccatgaacagcgagagaacgattaaaagcgccgcggcgtatccgagcggagcggtcgagaggcggtagatgaatcggttctttgtttttgcgggaagatccaaagccagtccccctttcgtgttttccggtatcatcgacggatattataccatatctttgtgaactgggcaatcgtttattttttacaaaacgatgacgcgcaatttgccgcgcgggcagtgttcttcgtcataatagacaaatgacgacagaccgccggaaaatctgacagtctgtcgtcaaatatgatttttctggagtctcagatttcgtattcgcgaagcagctccggatacgtggcgcggaagccgagcttttccgctttgttttcgaccgccatcgccttgtttttcgcgaagtgtatgacgaaaagcttcttcgcgccggtctccttcgcgcaggagaccgagatgccgatgtccgagtgcaggcacgccggagggttttcctggtcggtctcgctgtcggcgagcgcggtttcgtgaacgagtgtgtcgcagccgctcagaaattcacgtatcttcgggtcgtagaacgtgtcgccggtcagtccgagaacctttcctgcgcatctgtccgtgaaacggtagcagagcccttcaaccgggtgtctcgacgcgcagacggatatttccatatcgtcagtttttatgctgtctcccggcgaaagctcattgatgaccggataaccgagcccgtgatagaacagctcgtcgtcccccgcctgaagaaacttcatcgagagcccgacgacccgggcgacatccgccttcggaccgtatatattcagctcgtcgagccgctttccgctttgcagataccggaagagaaactgcggcagaccgagatagtggtcgtggtgcatatgcgtaaagaacagacgctttaccgaggtcggatcaaccccggcggagagcagcctgtcaacgacataataacccgtgtcgacaagatatttcctgtcgacaagtatcccggaagcgtcgttccccgccgcagaaaggcacgcgtcggtgcccagaaacattatcttcattcgaactcacctaggaaccataccttcgatttgtcgatcgaaaagctttttccgttaagataggcgagcgcgcccgaatctgtcctgaaacggaactcgaggcggtaggcgtacagcgcctgaaatttatatccgagctttttgtcgtcccggttcacgccgtactttccgtcgccgaggagcggatgacctatcgatgagaaatgcgcgcgtatctggtgcgtccgccccgtcacgagctcgacctcgacgagcgagaggctattattctcgtcgagcacccggtattttgttatgatctccttgtagccgggtttcttgacagtcgagatatcgacgatattgttcgcctgatccttgcgaagatagccgtgcagtgtgtccgcctttttcggcatatgtccgtggacggcggcgagatagaacttcgagagctcgtcgttccttatcttttcgttcattatacgaagagcctcggcgttcttggcggcgatgacaatgccgcctgtgttgcggtcgatcctgttgcagagcgccggggcgaaggactgttcgtcctccggattatactcgcctttgcggtagagatacgccttgacatggcttatcagggtgtttacgtcctcctcgtcgtccgagtgtacgatgagcccggggcgcttgtcgagaagcattatattctcgtcctcataaacgatatcgagcttcggagtgagcttcatgaaggcgctgtctgacgcgttatccgaaaagaactcttcggaaatgaaaagctcgacggtgtcgccctcttcgaggatatatcctatttccgcgcgtttgcggtttaccttgattttctttgtccgtatccccttgtacatgagcgatttcggcattgccttcaccgctttcgaaaggaacttatcgagccgctgaccggcgtcgttcctgtttattatcagtgtgcgcatatggctcacctttctgtgaaagacagaacgccgcatggattatccgtgcggcgttccgaagaattactttgttccgaagagacggtcgcccgcgtcgccgagacccgggattatataagcgttctcgttgagatggtcgtcgagagccgcgatatagatatcgacgtccggatgatcctcctggacctttctgactccctcgggagccgcgacgaggcacatcagcttcaggttcttgatgcccttcgccttgagcatcgtgagcgcgtcggacgagcttccgccggtcgcgagcatcgggtcgaccacgatagtgattctctcctcaatgtcagcgggcagcttgcagtaatactcgaccggcttatgtgtcgccgggtcacggtagagaccgatatgtccgaccttagcgaccggaacgaggctcagaagaccgtcgaccatgccgagacccgcgcggagtatcggaacgattgcgagtttcttaccggagatggtcttcgcgatcatcttggagacaggggtctcgatctcgatgtcctcgagcgggaggtcgcgggtgatctcatagcccatgagcatcgcgatctcgttgagcagctcgcggaaatccttcgagccggtctccttgcggcgcatgatggtcagcttgtgtgtgatcagcggatggtcgataacgtgaagagtactcatttttttaaccgttgcctccgccgacagttcatcgccggtatgaaggcgtcctttccttgattaaagagcgttgcgttttcgcatgacaaggcgcaggcgagaggcatatccccgcgccgcgccgccgcgaatattctttttcatataatattataatcccgatcccgccggattgcaatacatatgttgaaaattatttccgaaaggatcggatttcggcgtattcaacaaattccgcccctgttttttgggcgttttccaccccgcttggcgagcaggcgcacccgaaaacgagatcgtcgtcgaaccggacgtaaacattccgcgtgtccgcgagcacggacggcgacgacgtcatcccggagagcccgtcgcctgtcatcttgacatagctctccttcgccgtccatatctccggaaagcgtatgcgcggcgcttccatgacatatcgcgtctcgtcctcgcggaaccatctcgcggcgagcctcacaagaagcccgtccgagcgttccgggagaaaagatctcggatcctccggatcggtgtcccgccgctcgatgtcgacgccgacaagtctgtccgagaccgccgcggcgcagactccgcgcgagttcgatatgctgacgaagagccgcccgccgacgacatacggctttcccctcgcgtcatagacgagcgactgagccacgccggagaccttacgcagagcgaacagagcgaggtcgacgcctcccttgtgctccggtatctccggcggcagctttgtcaggaatatccgcgtcatcaggagttcagctcgccgcggtcgagcgtcataccgaacttcttctgcgacttgtccgaccagattatctttctcgggcatttcgcgacgcactttccgcagcctgtgcatttgtcgtagtcgatcgacgcgacaaagtcgttcacgctgatcgccccgttttcgcaggtcttctcgcagagcttgcagctgatacacccgacctcgcagtaggagcgggtgacggctcccttgtcgaccgacatgcatccgacccagcagtcggcgtcgtagggaatcagctttatcagctgcttcggacaggcttcgacgcattttccgcagccgcggcattccttgtagtcgacggcggcgatgccgttctcgatgtgtatcgcgccgaacggacataccgacgcgcaggtgccgagacctatgcagccgttgggacagagcttgtccccgccgccgagcttcgacgccgcgagacagtccggcgcgccctcatagacgtatttcttcttcgcgaactcggatgtgccggagcacatgacctgagcgcgcattcttaccggcttttcggcggcaacgcccatgacttccgcgatggcggcggcgatttcatcaccgccgacgacgcaggcggacggctttgcctcgcccttcgctattgcctcagcgagcgcgtcgcatccggcgtatccgcatccgccgcagttcgcgccggggagctgttcgcgtatcttcgggactttcgggtcgaccttgacctcgaacgccttggaggctatcgcgagcgcggctccgagcgcgccgccgaggatcgcgaaccacatcagggcgaagagtatgttttttaagttttccattgccatgtcctcctcagaacgacatcccggagaagcccgagaacgccatcgcgatgagccccgccgcgaccatcgctatcggtatcccgcggaaggacttcggcgggtcggcgaaggatatacgcaccctgacgcccgcgaagatgacaatcgcgagagtgaatcccgccgccgacgagaagccgtaagcgagcgactcgacgagatcatacccgttctgaatattgagaagagccgcgccgagcaccgcgcagttggtcgtgatgagcggcagatatatgccgagcgcaccgtagagcgacggtatgaatttcttgaggaacatctcgatgaactgaacgagcgcggcgattatgagtatgaacgcgatagtctcgagatattcaagcccgaacggcacgagaatcccgtgatagacgccccatgtcgcggcgcttgagatcgtcatgacgaacatgacggcaaagcccatgccgagcgccgtctccggcttctcggacacaccgaggaacgggcagatgccgaggaacttcgagaagatgtagttttcgatgagaaccgctgtcagcatcaggagaagtatgtggacgaggtaatctgtattcattcgttcgtgccctcctttttctgctttttgccgtcgcggacgctcagaagcttgttcatcagcgcgatgaggaagccgagcgtcaggaacgcgccggacggcagaatgaagattatcgccggttcaaacgcgtccggcagaactttgaagccgagaagtgtgcccgccccgagaagctcgcgcacggcggcgaggacagtcagcgctatcgtgtagccgacgcccatgaacagcccgtcgacggcgctcggaaggaccggctgcttcgacgcgaaggactcggcgcgcccgaggatgatgcagttgacgacgatgagcgggatgaagagcccgagcgtccggttgaggtcaggcagatacgcctgcatgagcagctgcaccgcggtcacaaagcccgagacgatgacgatgtacgacgcgatgcgtatctcggacggtatgaactttctgagcagggagatgaacacattcgagcagataagcaccaccgtgacggcgagccccattccgagagcgttcgtgaccgacgtcgtgacggcgagggtcgagcacataccgagcatctggacgaggacggggttcttgtttatgatgccgtccgccgcctgattcctgaaatctttcagagtgtatttcatgagttgcctccgtccgcgatggcgtcgttttcggtgaagatccgcgagtacgccgagagtgcgcggtttgccgcctcgagaaccgctttcgatgagattgtcgagccggttatcgcgtcaataccgtttccgagcgagagagttccgctctttcccgtgtactgcgagaggtagtccgggtcgtcgacgcggcttccgagtccgggtgtctcagagtgtgagacaatcttcattcccgcgatagtcccgtcggagtttacgccgaccatcatgtcgagcgctcctccgaagccgagcggactgacgctcgccgcgtagccgagaatgtccccgccggaggtcacgagccatactccgttcactccgtcgattgtaacgtccgcggactcgcttgaatccgagtccgggaagatcgcggcgattgctgcgctcttttccttcgcgtcgttttccgctatcgtgtccttcgtgagagcgttcactccggagagcagcagggcggtcacggcgcttatcagaaggagcttcagcgccgtcgcgacgacaaatttcgtgtcgaagccctttgcggcctcgtcattgtttttgtttctttgcactgtcggcacctccgaatcttaccggcttcgcgtatctgtcgagataccagacgagcaggttcattatgagtatcgagaatgagacgccatccggatatcctccgaatctgcggatgaatatcgtgagaagtccgcacccgagggcgtagatcgcgcggccgcgctcggtcataggcgaggtcgaataatcggtcgccatgaatatcgcgccgaggaaaagacctcctgaaaggacttccgacgcagcgtagctgaacggcagggtgctccgcgccgcgaggtagccgtagacgagcacaacgccgatatagatgaccggtatcttccatgtgatgaccttgcgtatcagcagatagacgaatcccgcggcgagcagcagcgccgagacctcacctatacatcccggcgtccagccgaggagcatatcgaatatcggagtgtcagagagagcgccggttttcagcgtcgagagcggcgtcgcgctgacgatcgtatcgggaatgtcggcgtttatcgcgagcgccgacaggcgctgtccgggcttcgtgaataccgtcatgtgagaaggccacgcggtgaagaggaacactctcgcggcgagcgccgggttcatgaagttcttcccgagaccgccgaagagctgcttcacgacgattatggcgaacatcgcgccgaccgcgggcatccacagcggaaccgagaccggaaggttcatcgcgagaagcattccggtgacgaccgcggaaaaatcggtgatggtcagcggctttttcatcagcttctcgtaggcgaactccgagagcaccgagaatatcaccgagacaagcgttatcgtgagcgcccggagcccgaacgcgaagattccccagatgagcgccggggcgagggctatgcacacgtcgagcataatcgaccgtgtcgtgtcctccgtccgcacatgcggcgacggagagacgatcagaaattccggaaagctgaatgacggcttgtccggtttgctgtccggggcggcggtttccttcgggggttccgccttcggggtttcgttttccttactgtccggcgtttttccggtcagcttttcgtccttgttttcggacgtctgattgttcatgtccttttaccgtcctttcgctcagtttgtccggctctgcgagagagcggcggcagcggcgcgttttctgtcgtttatctgacccttcgccgcgcgtatatactgcacgatcggaacgtgtcccgggcagctgtaggagcagctgccgcactcgatgcagctcatgacgtcgaactgctccgccatgtcgagctttccttcgctcgagaacatcgcgagatagctcggcatgagccgcatgggacaggctctcacgcagcgtccgcagcgtatgcagcccggcttcaggtcggtcttgttctcgacgtcctcggagaagacgagtatcgccgacgttcccttggtcacgacgccgtccttgtcccactgcgcgatgcccatcatcggaccgccgtttatgatcttcttcggcgtcttcgtaagaccgccgcagtagtctatcagctccgaatatgaggttccgagagggacgagtagatttttcgggttcctcacgcagtcgccgtcgaccgtcacgattctctcgatgagcggcatcccacccgcgaaggcgctgaaaacggcggcgcaggtctccgcgttgaagacacagcagccgatgtctgctgggagctttccggtcgggagctcgcgtccggtgagggcatagatcagctggcgctcgtcgccctgcgggtactttgtcttcagcacctgaacctttatcagcttcgacccggcgaggcgctcctcaagcaggttaatcgcgtcgagcttgttgtcctcgacggcgatgattccctctctcagcgagagagccttcatcagtatctttagaccgtttatcacggcgtcggggttttcgagaaggaggcggtggttcgccgttatgtacggctcgcactcggcgcagttcacgaatatgtgctccacctttccgacggcggagcttatcttcgcgtaggtcgggaaggtcgcgccgcccatgccggaaatgcccgccgcgcggacgatatcgattatctcctcagtcgaggtctcggagagcttcttgtgccacgggtgtatgtccggggacagacggtcctcgccgtcgttttcaatgactatcgacctgacttttctgccctgcgcgttgttgtgctcggtgatcttcagaatctttccggagacgctcgagtggacaggcgcgccgagaccgtgttcgaccgctccgattacctgaccgcggtctacgatgtcgccgggcttcactgtcggctcggcggggactccgatgtgctgggagagcggtattgagactgtttttggcggcggcagcttctcgaccgggcatcggcgggtcgatttgtgctcgtcgatgtgtatgccgccgtggaatgtgtgtgccacttgcttcacctcgtgtactacaattataacgcatcatgcggatacgtattaataatattatacatcatatttttgaacattacaatcccttttgacaatattgcgccggattttaacgattttttcacatgaatgtgtgaagacgacatttttttgtgacttttggcgggctatgaccggataacaagacagctgagcgccgcgagaccagccgcgacgacgcccgagacgagttttctgaaaaagaacccgcgcatcccgagccgcccgccggtcgccgccgagacctgcatatgtacgcagatcccggagaaccccgccgcgaacgtcgtcagcggaatggcaaccggcagtccgaaccccgaagcgagccgcgccgcgctcgttatctcgcagaacgagaccgcgacagc

SEQ ID NO: 212 - DNA, 3151 bp, Unknown
  16S sequences of unknown bacteria
tcgcctgattttaaaaagaatcaaaatgtgattctttttaaagtgcaaggtttttcgcaaaattgcgcaaaaaccttgcacctgaacaattcaaaagtttacaccaacatgctaggctgaggtacttttgaattgttcagcaggcattaaataacaatacaggactgtttaagtaaactggcaagccctttccttcatatatttttattatgaaggaaagggtgtgtcagttttgtttttcagtctgttaatgaagattgcatcagccgtttattattttgcgctgcatgttaaaggcgcgggggcttttcctccgccgctctctgccgagcgcgaggcggagctgcttgaaaaaagccggaacggggatgatgacgcgcgaaacgagcttatagagcacaatttgcggctggtggcgcacatagtaaaaaaatattacaacaccggcgccgaccaggatgatatgatttcaataggcacaatagggcttataaaggcggtatctacctttaatgccgataagggcatacaccttgccacatacgcctcgcgctgtattgaaaacgaaatacttatgtttttccgcaaccagaaaaaaaccgcgcaggacgtttttataagcgacccgattgataccgataaggacggcaacacgctgacgcttatagacgttattgccgataaaagcgatattgccgatgaaatcgatacaaaaataaaggtggaaaagctgcgggtaatactgcccgtttgcctgaccgagcgggagcggcttataatagaaatgcgctatgggctttgcggcagagaggagcttacccaaagggaaattgccaaaaagctgaatatttcaaggagctatgtttcccgcattgaaaaatcagcgcttgaaaaattaagaaaacaattttaaaatatatttataagtataaaaatgtaacgtaaggttaaaatttcctgtctttacagatgagggggaagaaaaatggaagatagcagaattaccgagctattcaccctgcgggatgaaagcgcagtaaccgagacggaaagcaaatacggcgggtattgccataagcttgcgtttaatatacttggggaccccaacgacgcagaggaaacggtaagcgacgcgctgtttcagctgtggcaggcaataccgccggaaaagccgaaaagccttggggcttattttgcaaaaatcacgcgtaatatagctcttaaccgaattgaacgcagcagcgcgaaaaagcgcggcagcggcgagcttccccttgttttggacgagcttgattactgtgtgccctcatctcacagcaccgaggcggcggttgacgcgcgtatgctttcggctgttatcaaccgttttctttcctcgcaaaaggagactgcgcgcgcaatatttttaaagcgctactggtatatgcgcccgataagcgaaatagccgccgaaaccggcttttccgaaagcaaggtaaaggtaacgcttatgcgaacgcgcgacgcgctgagagagtatcttagcagggaggattttaacgtatgacgaacagggatattttaaacgccttaggcgatattgacgaaagctacattaccgaggcaaacggcagaataaaaagcaaaaagggcattattataaggtattcggctatggcggcgtgccttttaatagtagccgcgggagcatttgccgcagtgaagatgataccgcgcggcaaaattaaaaacagcgccgccccgagtgaaacatatgaagaatatgacggaaatgttgcagactatgatggcgattacagcacaattgaaaaaaccgacggcacaaaggcaaacggctctgctaagggaaacggcgcgtcatcatcggaaaattatattgcctatgttaaaagatgggacgaaaaaacaaacaccgaaaaatttcccatagtaaaaataaacggtacggagtacagtgtggcaaaccgcccgattccgtccgataaaataggaaacagcataacaaggcttacggtgttaggcagagatgaatacacaaacagcgaatacgccgcaaatgttgaaatttatgaaataaagggtatctcatcagagtgcgccgcggcggtgaaatacgatgcggacggaaaatactacgtctgccgcaactcacactacaagcccgaaacgctggggcagtttatgaatgatttaagtcttaaagaaaaccttacctttgtttcctttggcggcacgcaaatgaaaaacggtaaagctatttgcgacgttgaatatacaaatgtggataaagcgaaggtatgggagcttttgttttcggacgccgcagccaaagcggtaaaggactatgactctatgaattttgaaacggcggcggatataggcattgatttaaagcttttgggctatgagaatatatcgctcgccgttacccgcgacggatatttaaccaccaatattttagatacgggcaaggcgttttatataggcaagcccgcggcggagaaatttttaaactaccttgaaaaggactgcaaaacaatcgtaaagcagcagtatagttattcagagcccgcaggcggcggaagctcgggtaattccgaaagctacagcgtaagtcactcggtgggaagtaattgacatgtcggagcggaaattgtgcaaagcggcggtaattacggctgtacttatactgattttatttcttattcccgtgaaaatcaaatataacgacggcggcacggtgcaatataaggcggcgctttatacggtggtaaaatggaatcgcatttcagacattgaagatgaaaattatcaaaacacctcggtttatttgtttcccggcagcttaaagggcatagacgagctttggaaaatcgaacagaaaaagaaaggggtatgatttatgagcaacattaaaaattcggcgataaaaaacattaccgcagcgctgctttgcgtggcgcttgcaatcggcgcgggctgtatgataaaaatacacagggataaaaaaacagccgtaaatttaaaaagcgcggaaacctatgacgaggtttacaacaaaataaacagcctgaagcttaaaaccaatatcatttacggcttgaaaaacggtatggcaaaaggcagcagccggaatgaagcgatagatttt

SEQ ID NO: 213 - DNA, 16874 bp, Unknown
  16S sequences of unknown bacteria
gggtttaatctgcagattaaaccctccggtcaccgcatccagatcgagcacctcgcctgcgaaatacaatccggctgcttttttagactccattgtcgtcggattcacttcccggatactcacgcctccacgcgtcacaatagcttcattatagtctcgtagaccggtcaaagtcaatgaaaactcacgtgtgagtgtcacaagtgcccgacgctcttctttggaaatgtcatgtaccggtttctcttccggaataccgctgcgttcaatcatgaccggaatcagctttgccggatacaacgccccgatcacatttttaaactgcttatttttcgccgcctcgaactctcttaagattctggcgtccagctgttcctccgtaagcgccggctttaaattgatccgcatcgtaagcggatgcgccgccagctttttctgtacgacactgctcgccgtcagaatgagcggtccggtcactccataatgcgtaaacatcatctcaccaaactcccggtacagctccttttttccatccagaatcgttacctccacattgcggagggacaatccctgcagccgtgccgcccagtcttctgctgtctccatcggcaccagggacggcgaacactccgtcacctgatgtccggctgcctttgcaaaccggtatccgtcaccggtcgatccggtcgtgcgataggaaatgcctcccgtcgcgacaatccccgcatcagccgatatcctttttccatcctgcaatactacgcctgtaatcctccgcaccggtgcttcctcctgtttgcggttcccttttccacaaggcgcacctttacctgcttccccttcacaggcgatctgcgcacccggcagtgcttccatcagaagctcctttacctctgcatgcagcatcaccttcacgccgctctttttcagtctccctgataacgctgcgatgacatccgaagcatggtcggatgctggaaagacacggttgccacgctccgtcttcgtatgcatgcctgactgctcaaaaaagtcaatcgtatcctgacttgtaaatccataaaatgcgctgtacaggaattttcggttcacacagacagctgcgagcaattcctctacctcacagttgtttgtcagattgcatcgtccctttccggtgatatacacctttttcccaagcttttcatttttttccagcagtgttaccgtatgcccgttctcggcagccgccactgccgccatcattccggctgcaccgccgccaacgactactaccttgctcatcttttttcctctttctaatctaccttccgccagtctgcatcgtcgcggacattttcctcgctgtgctccggcagctgtacctgctcctccggtacagcctccgcctcaccaccaggcatactgccgcttttcaaagtaaaccagaatgccacgccattctcacagtttttcacgccatattcctggtgcaatgcctccataatcgcttttacgatcgaaagtccgactccgctgccgccgtactcgcgcgtccgtgccttgtcaaccttgtaaaatttatcccagatctgaccgatatctgcctccggtatctgttcacctgtgttaaatactgtgacgcacacctttccgtccgcctcttctaccgtcacctcaatccgacgctcaccgctgacatgattcaatgcgttactcaaataatttgtaataacctcttcgatcttaaattcatctccccaggccggaaccgagtctgcgccatgatacgtaatggcagcctccttttgctgtgccagaatcgaaatcgactggatcttattgtgcaaaagcgttgccagatcaaaccgctccatcacgatctggtcattgccgaattccagctgattcaaggtgagcagcttctgtaccataccgttcatcttagccgcctcatccataatgacctcgcagtaaaaattcctgctctcctcatcgtcattgatacactctgccagtccctctgcatagccctgaatgagtgcgatcggcgtcttaagctcatgtgatacattggagagaaattcctttctcatgtcgtcaatcttctgcttcttctcaatatccttctgaagctcgttgttcgccgtcagaagctcagaatacgccttctccagattctcggacatgcggttaaaatgctcgccgagctgaccgatctcgttgcttccgccacttgtgtacttggcatcaaaatcaagctctgccattcgcttggaaagctccgtcagttcgtgcagcggctgcgtcacatgccgtgaaatcagccagataatgactgccgccagcgccataccggccaggcagatatattttacaaactcattggaaacacggacatcctctgccacgccctccacgctgaaccgcatcaggaaggaataaccggaatccagaacgccccacatctcaagaaattcctggccggcttcctcgtcataccgcctctggatcgtataatcatccgtatgctgcagcaccttgacatcatcgacatcgattcccatctgatatccgtttaagcgtgcacgcatcaggcggatctgatcatctccggtccagatcgtgcgaagccgcacataattatcctgatcaattacaagaagtgagacaccgtttgccagacaaatattcgtcagctcttccatccgctcactgtccgaggccgtactgctgcccggagcttcatttaaaatatcataggcaccgaccagtacctcttttttcctcatatagtaataactctcaagaaaaaaagtgttcacaagataatttgccagaaacatcatggccatcagccccataaagcagaccatcagctgtctgcgcagtgacatattcatagccctgcctccttactgcgcatccacttcgaatttatatcccatgccccagatcgtcttgatgtaatcgcccttggcaccgagcttgctgcgcagcttcttgacatgtgtatcgatcgtccgtgcatctccgaaataatcataattccagacgctgttcagaatcttctcgcgcgacagcgcaatcccctgattttccataaaatacgtcagcagctcaaattccttatagctaagctcaatggactttccgtcaatcgtcacctcatgcgcggccttgttgacctcaataccgcccgcccggatcacatcatctgcagccagtccgctcgtccggcgcaaaatcgcctcgacacgcgctacaagaatcttcgggctgaacggctttgaaatgtattcatctacgcccagctcaaagccaagcagctcatccctttcatcgctttttgccgtcagcatgatgatcggcacctgcgagtaggcgcggatctcccggcatacctgccagccatccatcttcggcatcatcacatccagaatcacaagcgcgatatcctttgtcgcaaagaatatatcgatcgcctctgcgccatccccggcttcaagcacctcaaaatcctttttcaccagaaagtcccgcaccagcttgcgcattctgctctcatcatctactaccagtacctttaaacgctccatcgcgactcctcctctgtttctgtattttaaccgaatcaagcaagtcccctgcttcaattgtgcaaagcaataagcagtggattgcgaatatccgctttaattatcataacctgtttttttgtccattttgtgttttttcacgcttatacaaatttctttctgccacaagtatagcatacgatgcccgttttgactaccaaaaccgccataaaacgaattccgtcgctctgcctttatgctcatatcggagcaaaaaattccgttcatcccgttgacatttttctgaaacctgcgtatactagtatggtatgtaaatacacctttaagggccagtaaaggtttcgacgggggttatgaatctggagaagctatccgcaggtgatgcgtcaaatcacaaaattaaaattaaacgctgaagataatttagcaatcgctgcctaatggcagctgtctgactcagagcacctgcactctgtgacccaggcatcgacgatgcaggaaacgacatatgctaagctttgcacatatgggcgtatcatgaagctactaaaagcaggaggctgttcgctgtcgtctgccggagggaatgtcaaataacggactatgatagtagaaggacaggggattggctttcggacacgggttcgattcccgtctggtccactatatgtgacctgttcatacgtgagcgagaataaaaaataaagataacgacattgtatattgcagcagtgatataccatgtcgttatttttactttacacacatcaatacagattctttactttaaattccttctctacctcgcgacgctgatcacgctttgcgatatcctgacgcttgtcatagagcttcttaccttttgcgaggccgatctccacctttgcaagactgcccttgaaatagacacgcagcggaacaagcgtatagcccttctctgcaatctttccgaccagcttgttgatctctgcacggtgcagcagcaatttgcgcggacgaagcggatctttattgaaaatgtttcctttctcatatgggctgacgtgcatgccgtaaatgatcacttctccgttttcaattcggataaaagattccttaatgctgcatttccccatgcgcagcgactttacctctgtgccatgtaaagaaatcccagcctcataattgtcctcgataaaatagtcgtgatacgcttttttattatttgcaattagctttatcgactctcccattctgatttcctcccaattttctaatcaaagacccttttcacttacaagttcaaaatccaccgtctttgtcgccttatccgcgtctacgacccgaatgcgaatcgtatcacccagccggaatacccgtccggtatcaatgccatacatctcgtgagtctcctctttgtaatagtagcggtcgtcatacatgcgcgacacatggatcagtccctcgaccgtatttggaagctcagcataaataccaaacgaagtaatgcctgaaatgactgcatcgtactcctccccgatatgctgcttcatatactctgcctttttcatttttacggtatcgcgttctgcctcatctgcacggcgttcggtcttgctgcaatgctcggccactgccggaagcagctctgtgtaatgactgatccggtcttctttcatccgtccgcgcagcacctccttgataatccgatgaatctgcagatccggataacgccggatcggagatgtaaagtggcagtaatatttcgccgccagcccaaagtgtccactgcaggtcgtcgtatatgctgcctgcttcatcgaacgcagagccatccggctgatcatcggctcctccggcgtccccgcaatacgggcaagcagcttctgcagctcctttggatgtatttcctccgacacaccacgaatcccatagccaaaattcgcgatgaaggcggccagcgccctgatcttatctccctccggtgtctcatgtgtccggtataaaaaaggtacctgctgccagtaaaaatcctctgcgaccgtctcattcgccgccagcatgaaatcttcaatcaggcgcgtcgccgtattctgctcatacgcacggatttctgtcggcacgcccttttcatctaagatcacctttgcctccgggaaatcaaagtcaatcgcaccacgttttttccgtttttcccgaagcaaagccgagagcgtccgcatctcatccagcatcggtgtaattgctccgcacgctgcacgcaatccttcgtcctgatcttccagaattttctttacttctgtataggacatccgccggttgacccggatcacagtctctgcaatctgatgtgatacaatattccccttctcgtcgatatccatcagacagctcattgccagccgatccacccccgcattcagggagcagatgccgttcgaaagccggtgcgggagcatcggaatcacccggtctgccagatatacactcgtgccgcgcacatatgcttcccgatccagtgcactcttttcctgcacatagtttgccacatccgcaatgtgcacaccaaggtggtacccattctcgtcgacggtcagtgacaccgcatcatccagatcctttgcgtcctcgccgtcgatcgttaccatctgtacatcccgtaaatccagccgtccttccatatcagccggatgaacctcctgtggcgtcttctctgcctgccgcatcactttttccggaaactcattcggaagctcatactgataaaccaccgagagaatatctgtccccggatcattgatatgcccgatgatctctttgaccctgccctccggcttatgcttctcatctccataagaggtcagctccacaagcactttgtgtccctgcaccgcacccatgctgtgctcctgcgagacaaaaatatccgtcgtaatccgcgggttgtccggcagaacaaacccataggtccggctcttctgatacgtgccgatcacttcgtgaatgccgtgctccagaattcgcagaatgcgcccctcctgccgctttccggtcgaaaccggcagcagcagtacctgtaccgtatcctgatgcagcgcaccgccgacgttttcctctgcgataaaaacatcctcctcgcgcccttccacttccacgaagccaaagcctctcggatgggctgtaaatacaccggtcacggtcttcgcggtcgctctgcggtatttccccttggatgtcacctctgcctttccttccaggatcagtgcatcaagcactgccttcagctccgagcggttctcctttgggatctgcagcagcatcgccatctccttgagcttcattggcacatactgcttgtcgttgagcatgtcaaatatcacctttttacggcgctccagctgttcttctttttctgtcttatgatcaatatccaatctttttctccttcgttttgtcggaatctatacatgaaagaaaaaggaccggtgctctgctgcatcgatcctccgtctcctagaaattcaaattcagtaccactgccagtacaacaaatgcaacggcaagaattcttgtaacctgcacaagctttccttccattgatcttgacttgttcttgctccagtagctgtcgccgatgccgccgatcgctccaagccctgcatctgctccctgctgtgccagaacgattacggacaatgcaatacttaccaacacaaaaataactgtcagaactattctcacggtaaactacacctcctatgtcaaacatattcagtctaacacaggcgcggcaacatttcaacctttttttataaaaatgaacggattctcataggtcgcaggcagcccgatccagtcctcgatccgcagcaactgattatactttgcgacccgctccatacggcagggcgccccggcctttatctgtccggctccggtcgccactgccagatccgcaatcatcgtatcttccgtttcaccggaacgatgggaaaggatcgtcctgtagccatttttccgggcaagcataatcgtatcaagtgcctctgtcaacgttccgatctggttcacttttacaagcacggcatttgccgcctgccgcatgatcccttccgcgagtcgctccgggtttgtgacgaacaggtcgtcccctacgagctgtgtccgtatgccgatccgctttgtcagctcctgccagccttcccagtcattctcatccagtccatcctctattgatgcaaccgggaaattaaccgaaaggcgttccagataggagatcatctcctccgtggaacggtaaatctgtttgcccttcatccggctctcgccagggaaaaagtatgcctcacgttccgtatcatacagctcactcgccgccacatcgagcgcgatcaccacttctgtccccacctgatatcccgcctttttgactgcttcacagataagcgccagcgcctcctccgcatccctcaaatccggtgcaaatccaccctcatctccgacgccggatgccatccgtcgctcccggatcagcccatgcagcgcatgatagatctccgctcccatctgcaggccatgtgcgaaattctccgcaccgaccggcataatcatgaattcctgtaaatccacggtattatccgcatgacagccgccgttcaaaatattcatcatcggcaccggcatgacatgtgcatgcacaccgccaaggtaccggaacagcggcatatgcaatgactgcgctgcagccgcggcaaccgccagtgacacaccgagaattccattcgcgccaaaccgccttttattttccgtgccatcctccttgcgcaggatttgatcaatcatcgcctgccgatacacattttctccgataattgcatccgcaagcaccgtattgacgtaatggcacgcctgctcgacgccctttccgcaataacgttcttctccatcgcgcagctccacggcctcatatgctccggtcgaagcgccggagggcaccgcggcccgcccgacactctgatcttctgtcatcacttccacctcaaccgtagggttccccctcgagtcaaggatctctctggcataaacatctacaatcggcatatccatacacattccgaaacctcctgactgcttttcattttcccctgcagtcagtatgtcccgaatgattttatttcactctgcaaatgtccgttttataaatgggtattatttccgtaagtgtttttatttcatcacccggatgatctgccccacaactgcacgatccatgttgatggatgcatatggtccgaaggaattaaaaataaacatacttgaggtgccattatctgactccagattcttgcggtcaatcccatactgctctgtcagggctttcatgctcacataaccaccgtccgaaccgcgccccgcatcataccacaacccatttcccgcataaatattggtgtgattatagtcaaatgtccacgtacagatatcgcccgggagcagctttccctctgcaatcaggttgttcggagtgtcgtaggcagagatgatcgcgcaacgctttctcagtcgtgccgctacaccgccattgaaatggataccgccttccggggtcccccagaagttctggttttcacctaatatccccatatcacgcagtgcaagccttgccagaagcgcgcagttattataggaaataccttttgtttttaagtccgattttgcagcactccatgtttttccgtttgctcttattggaatatccccacaggcgcccggccgcctgatctgcgcgcacctgatctgaatatccctgcagaatcgacaaaaaccttttagctgcagcggtcggttcagtctggcgtttccgctcaataaccgtaatgctgcagcggactgcctgcgtcccatccgctttctgcgccgtaataaccgccgtcccggaagctgcgccgactaccgtgccctttgatacggataccacattcggatcagaactgccccatgtaatgattgctccgtctgtattcgagaccgttaaggtatggctcgcgccggtctcaagaacaagagacgattggctgatcgtcattggagccggacgtccttttaccgtgacacggcaggatgcatctttaccgcttccatccattgtagtcgcagaaatgacgacagccccggcctgcaacgcttccaaattgccggactgatctacacgtacaatattctcatcgctgctcgtccagtgtacgctcttattattcgccgacaccggtgcggcattcgccttcagcttccggatatctccttctgtcatcacaattccacggctgctcagggtcagcttggtcaccggctgcagcaccaccaccttgcatttgagcttcttccttccgaccttcgccgtgatgactgccgttccctttttcttcgcagtcacctttcccttcgcattaacagtcgccacagaacgcttcgaacttgtaaaacgcacttttttcttcgttccgcgcaccttcagtgaagcggagcgccctttcagcagcgtcagattcgtctgatttaatgtctcctttgccgcagcagtcattccgacagaaagcaccagcagacaaagcagaaacaccagcatgagcggatgatgtcgcctttgcgtgtctgtacacccgccatttgttcgtaaccttttcattttcatcagtacccccttcaagctcatcactcttattttcgcatcttattctatgatacacggattgcttcgcatttcattctatcatacttttccgataatacgaacctgtttttccatttcctgcaaaataagaaaaggacaactgcatcccctctgcagtcatcccttttcccaaactccgtcattgtgtatgtcgtcagcctttattttatcagtcgaataatataccctaccgtcgtcccggacatattcacagtcgctgccggtccaaaggtcctgaatacgaaggtgccgttctgatagccgccgaccgccccgcttcttcctgaatcataccagagcccatcgcctgcatagacatttgtatgctgatattcgacccatgtgcagatatcgcccgggagcaggtttccctccgccagcagctgattcggtgtcttatatactttgataatctcacagtgcttcagcagctgttcctttacatttccgcggaattgaataccgcctcctgccagcccccagaaatttttcgagtctatgattccaagctcccgcagtccccagcgcggcagtaaggcacaattgcaatacgtataccccttcttctgaatcgcagacagcgccgcactccacgtcgaagctgctccgctgttgctgtagcgccacactgctccgttcgcactgtcattctgaatccggtttgaatagctctgcaatacattcaaaaatttccgcgcaagggctgattctcctgcctgcggctttatgtccgccgaagcatccgccgtgctgtctttcttcgtatccgtcctgcctgtaccggctgtcacggtcaccttgcaaaatactgtcatcgccccgtccagacgtctggctgcaatggttgcggtacctgcctttttagccgacagtgttccgtttgtgacgctgacgatgtcccggtcagatgtaccccataccactttctcgccatcggaggtcgttgcttttaagatggcagtctttccttcctgcaacgtaagactggatgaatccagcgtgatggtcttgtcggtcttcggctgtgccggtgcttttacaagaattctacatgttgccttttttccactgccatcctttgccgttgctgtgatcactgccgtaccggaagacactgccttgagttttccctttgcggtcacagtcacgatacttttatcactgctcgtccatgtaaccgtgcgaagatttgcattcgtcggctttacctttgcctttaatgtgtaggtcttaccggctgaaatcgcaatgcttttctgattcaggcgtatgctcgtcaccggctgctttaccgtcaccttgcagcggtaagtcttaccatctgcacgtgccatgaccgttgccgttccttttttctttgctttcagacggcccgtcgcactgaccgttacaactgacttttttgaactcttccatgtgatttttccggaaatgtctccggacagtaccagctgctccgccgtcccttttatcatcgtcagctttgtcttatttaatccggcctgcggcgctgccagcgccgtaaatgaaatgcccatcagcaataaaaatacaaaaaacaggctgcagacccatttccttttcccggcattttccatccttgtacactccttccatactgctgccatctgcgtctgtccgaatttctgttccatacattccggtctacgcattgcttctgtcttggattatacatgatgttttacaagtctgcaacctattttttacaaaattgttaagtttttattacgttcattagagttaaaaggtgccgttgccctcgtacagcccgccgtctgcaaacggattctcctgcagctcgccctggtcatcctgattgccccagctgtcactgccgtccggctgctggctctggccgaagtcgtctgccgcagatgctgctccctgctgcagcgtaacctctacctcgcgtgcctcatagcttccgtttgtcgcactctgaacctccagagtaaccgtctccccgaccttataatagctcatctgatcgatcagatcttccttgtccgtcacgctgatgccctcaaattttgtgatgatatcacctttatgaatccctgcctgctctgctgcagatccctcggatacctcatagacaaacgcaccctgcggcatatcgtaaagatcctttgcatcgtcggatacatctacaaccgtagcaccgatgtagcctctctcgctgttggagagcttatctctcgtctcacggtttaccagctccttcaggatcggaaccgctgtattgatcggaatcgaatatcccatgctttctgaggactggcctgcctcctttgccacattaatcccgatgacttctccattcgcattgagcagcgcaccgccgctgttgccaaaattgatcgccgcatcggtcatgatgaccggcttggaaaaattgtcaatcgtaatctcacggttcagcgcactgataataccgctcgtcacgctctgtccatagccaagtgcatttccgatcgcaatcgctgcctggccgaccttcaatgcatccgaatcgccaatctttgcgatccgcagctggctccgcacggcctccggaatatcagagagctgtacagcgataacggccagctcattgtccttatccatacccttgatcttcgccggagcgaccagatcatcggtatcatccgcctctgcactgaagcagacattcagatcgcttgtatctgccacaacatggctgttcgtcgcgatcagcagctcgtcatcgttctgagcaatgatgattccggaagctgcactctctgcctcgtactcctgtgtcccgtaataataagtctcaatatcctctacagactttccggtaatagcaacgatggacggcatacagttttctacaactgcggagacatctgtcgtcacgattccgtctgataccgactttgcgccctcaatcgacgcatatgtttcttttgtctctgtttccgtctgaacctctgtctctgtctcatcatcggtctcggcttccgcagccggctctgtcttggcttccgtctcttcctcgctgcccggcttttcatcatcagcgacatttaatgtaattcgtttttctgtctccgcctctgtctccgtttcttcggaagctgtattctttgtatcactgctgtcatcatctgccatattcagcgtgatccgtgtctcagtctcctccgcctgtacggaggccggataatttttcccggatactgcagatgctccgagcagtaccccccccgccatagcgatcgcgccgtaacgcttccatgcatttggctttttatctttatttcgcatataaaaatcccctttctggttttctcatttttcttttgtcttctatcactatacggaacttttgtgtcaaaactgtgaaattaaagtgtaaaaagtaaggatgaatcgaaatctatttttgcgaaaaaaaaccatgagaaatgcaataactcattgcatgactcatggttttcattacattgctattttacaagcaggctttctcctgtcatctcttttggctgctccatgcccatcagctcgatcagagtcgggatgatgtctgccaagcggccgccctcacgcagcttgtactgcggatctgcatttacaaggatgaacggaacctgattggtcgtatgagcggtaaacggctcgccggtcgtgtagtcaatcatctgctctgcattgccgtggtctgcacagataaacatctgggcgtccacttccttcactgccgctacgaccttgcctacgcattcgtcaactgcctcaattgccttgattgccgccggaatcactccggtatggccaaccatatccgggtttgcaaagttcgtaataatcacgtcatacttgccagaagtaattgcaccaacgaccttgtcgcatacctcatacacgctcatctccggctgcaggtcataggtcgctaccttcggggacttgaccagaatccgatcctctccctcgttcggagcctcgacgccaccattgaagaaaaaggtaacgtgtgcgtacttctctgtctcagcgattctcgcctgtgtcatgtgatgtgcagccagatactcgccaaaggtatttgtgatcgcgatcttcttgaacgcaatgtatttgttcgggatcgtcacatcatactccgtaaagcatacatatacaacccgcttgcgcgcgccgcggtcaaagccgtcaaagtcatcacagcagaacgtgcgggtgatctctcttgcgcgatccggacggaaattgaagaagataacagaatctccatcctcaacggttgcggtcggcttgccatccttcataacaacggtcggaagcacaaactcatccgtcacgccgttcgcataggaatttgcgactgcctctacgccggatgccgcctgctcaccctcaccgagtgtcagtgcacggtatgccttctcaacacgatcccagcggttgtcacggtccattgcgtagtaacgtccgcttacagtcgcgatctcgccgataccgatcttctgcatctcatctgtcagtgcctgtacataatcctttccggactccggcggtgtatctcttccgtcaaggaagcaatgtacataaaccttcttcagctcatagcgctttgccatctcgagcagcgcataaagatgtgtgatgtggctgtgtacgccgccatcagaaagcagtccgtaaagatgaagcgcggtatcatgctcctttgcgttttccattgcacgcttcagctctgcgttttcaaagaaatcaccatcctgaatctcttttgtaattctggtcagatcctgatatacgatgcggcctgcgcccatattcagatgtccgacctcagaatttcccatctgtccgtccggcagaccgactgccagtccactcgcatttccccgtacaaacgggtattttgccatcagctcatccatgaccggagtcttcgcctgcgcaatcgcattaccctctgtcttatcattgagtccatatccatcgagaatcatcaaaatcgttggtctcttcatattttttctcctcattccatattgtgtattctatgcaaaaccagaagctgtcataacatcagccggtttttctgccgctacgattatagcacggctattttggaaacgcaatgccccatttacttcttataattcgcgcagacaccattttcatcaaaacggtattttccgactttgcagctctttttcattgcgccgtcctttttattaaaataataccattttcctttgatcttcgtccagccggccgcgcgtaccccgttgctcttcgtataatatttgttatcaccaaaggtaagccagccttttcgcatctgtccggtctgtgtgctgaaataataaattttaccgcgatattttgtccagcccgtgcaggcttttccagtcttcgtgccgagcaggtacttctttttgccaactgtcagccagccgtatttccgcacgcccttcttgtccagataatagcggcctccgtttacctttacccagccggttgcccgtgtaccgtctgccttcagataatagtatttgctgccaagcttcagccaaccggtctgcatcgcacctgttttctgaccgaagtaataataacggccgccgattttcttccagccgcttacgcgatagccattcgcatccagataaaatttatcttcgccgaccgtaagccagcccttctttgcccgtgtaccgtctgccttctgataccagtactttttcccgcttgccttccagccttcctgaacttttacgtcctccgaaggcttctccgtctcgctgcttccggtatccgtctttgtcagggcatgcgtccgcggagtcacgattttcgtgtaatccttataggaataatccagatccacatttgtagtaattccgctgactttccctttgtttgtatactgccacatagaaagcggccgaaaggaggtcgaggatgcccatcgtgccacccacttgtcatacctggtcagacgggtcagatcaagactatattcaagccagctctggctcgcataaaccatcggataatagcctgccttttcgatctcctccagaaatgcaattgtgatatcggtacgctgcttcgtcgtcatctttcgatgtacatcgtcctcgatgtcaaaggccaccggatagctgatcttatagccgtcaatcatatccagcataaactgtgcctctttctttgcggtctttacatcacatgcctcggaatagagatatacgccaacatgaataccatttgccagtgcatttgtaatgttataggtaaactccgtatccgggacgcgcacgccattgtggtaccgtccgattccgagcatgacaaattccacaccgctcgcctttaccttcttccagtctaccttgccctgccagcgtgaaacatcaattcccttaatcttcgtcgctgcctgtgcactccctgccgggagcataatcaacgtcagaagaagcagcagtatggatgtgccgatccgtttgatgccgtgccgtatgtgttccataaaatcctccttttccaaaaactcttccggtgcctgattttgc

SEQ ID NO: 214 - DNA, 14372 bp, Unknown
  16S sequences of unknown bacteria
cagcagcatcatcttctgcgattcatggccgtaatagttgataatttcggccatgatggagcgctggcctgcggtaaagaccatcatttcacctcttccacgcgatacgtgtgcacgccgcgatacacttcccggagctcatcgagcgtcagctctcgccctcgcatctcgagcggtaccgacatcgccacagatgtgatggtgtggcaatgcgctgccagatgcagtggcagattgccgacgacatcgcgtccctgggcgtcgtcgacgccggcatgctccatgtagtcgcagtctccgctgatgatgcccttctcccggagcagatctgccagcgccttgtgacgcgtgaccaccagcagcttatccggcttcccgggcatatcctgctcttccggctcatcaagggcgatgtatcccttcctgcctggatagatgtagtcgagcgcgctgatctgattgtctgcgcgattgtacggtttcattttcggttttcggtatgattttttcatgctcacctttctccattctcgtattgttcggccgttaggcctttctgcgcccagttgtagaggatcctgtcgacataatccagactgtatttgccgtacagcactgcctccgtgatggcatacctgatcagcggatcatcgtatctctgctgccagtccgcaagcagctggcaatctctggatgacaatgtcctgcccatctcgctctcgcataggtccagcaatgggatcttgtagaattcatccccatctgcataatcggagcgcgcaggcgcaggcgcgtttctttcttctctaaatgtttcttttacttctttatcttcttttatttcttttatagtggttagttgctggttagtggctggttggttgctggttacctgttggttagttctctggttggattgttggttagtattgcttggggaaccttggtattcatcccattttacaatggttatgatacttccacggttggttgattggatggttatttctccggttgataccagcctgtttaggcatgtgcgcagttcttgcacgcccattccaagctgtttggccatcttttcccgtccgatcatcacctgaccgcgtttgatgagttgcccatcacaatagtaatcctcgaatgcagcagacagaagtaactcaatccagacgttcagcatattcttctttgtataccaacgccacttacgtatagccctatccagtttgatgtagcccaatacttaccacatcctttacacttctttgatgtcgatcccgtggatctctttcatcatccgccgtttcagcttatacacggcggtcttgaatcctttgacatcctcgaccagctgctggccgtcctgggtgtagacgaagtctgcgatataccggatctcccggccgttgctgtttttcggaataaggacgaaggggacctggagctgcaggccgctgatcgttcctgcgcgctccatgatcctcagttgtctgtatcggttcgcttccttctttgaatcgaaccggatgccgtctacagtgaccttttcggcgtgatacttgcttttggcagcgtcttgatcgtcagatcgttcagtgcggcgatacttcctgccgtcaggataatttatcatccaacgatcgacacgctgccttcgtccaaattgaagtaagaagaacgtgcagagatatattcaacgatccttctttgcgcttcgaatctccatcggccgccatcagcctcgaacagtgccacatctccatctttgtttacgcggagcagatacatcgtttcgacctgatcgatctcaggatatgtgttcatcggtttcagccttacaattggtggcagcgtgatgctctcactatgcttgactgcggtccccgtagaagacgtcaccttttgcgagattccatcatcttcgatctccaccttgacctcagaagagagcttgctgacaaaggcaagcagttttgttttgttgtgattctcatcttcttcaaagcaggtctgcagctgaatgatgaattcttccactggcatatagcgattgaatcgaatcgttggaacgtctggtctgctttgcgcgatatgatccctcttcataaatctatccattgcgctgaacacatctaccgtattccccgtgacacgaaccatcaaaggaagatttaacatatcccccttaatcgcttcgacgatcatgatggtcagcgcgtccaaagtgttcaatgtcatgcattcacaataatcgttttcgatgcggcgaactccctgtcccttgatgtatgtttccccattgatttcttccgttatgattcccattgcttcttccttgagactagcaatgtactgtaatgcttctttgatcatttgttttcctcctcatttccattttcgatattgccggcgccatacatgatttcctgcggctcattgatgtctccatagatactgatctggccgggcgcctcgccggtgaattctcgcagcaccggaacgacctcgcctgtgcctggtacctgtgctgatgtattcagcagcgtaatcttacgcggtttgattggcagcggcgtcgccttgaccttgtatagcacgtcggcgaaatcatcgtcttcatgcgccttgacctgaatctcgatgaccagtttggctgccttgcgcttgtcggtgttgatgtcattgatgctggccatgatcttcgaaaaatcaagattggcctgttcgatcaatccgccgttgtcgatatctgtaatattcttatagatcttcttcataaactcctccaaggagaaagtttttccccttctccgccacatgtactgatgccagcgtgcattcagccacttcccttctgaaccgctctgcgtcgctgttgccgtccgacagatgcatcaggatgacgtcggacagccgcggtccattacatgcagttatgaactctttgacgtgctccagctcgaaatgggagcttctgatgcgatcagcaagcgatcgatggacatatcccgcgtcaatgttgcgctgcaggatatcttccgcgtaattgcactccaccatgatgtgatcaaccgttcggaaacgataccgcacataatatgtatctgtcgcgaacagcagacactcctctgcagatagatctgtgatgtaatatccgactggatccgcggcatcatgctgggtgggaaaagcggtaaatcggatgccatacatttcattagcgatcatcttctcgaacgatctgatcatatagggcttgggcagcgctccgatttcatgaagcgctgcctttgtcccttggctggcatagaccgagatgccgccattggcataatccagcatatactttgcgtgatccatatgctcatgcgtgaccaggcagcagatcacattgtcgatgcggtggtcgattgccttgagcagctcctgccatctcacaccagcttccaggatcacgatcccatgcctggtgtgcagaaggtagcagtttcctctggatccgcttgccagcacctgaaggcgcatcacagctgccagagctcctcaccggcaggctcaggttctcgttcggtcttagacggcgtctgacgcactggttgctcccggcgcggcgatctgggctcttgcttcggcgccggcagcggttcctccgggaagtcttcctgattggcattctcacggatctcggcttcgacatccatcgcgccgcggcggtcgatccgttcgtcttcatattcgttcaccgttgtctcattgatggactgcacgaggatatcagaatcatccgatgtattgatgtaagccttggcagcgcgattgatcaccgtacgcttggccatctcctgcggaaacttcttatgtacggattgagaagtcttcgactggctccatgacgcgtcgatctccttcttggtcatgatcgtcatcggtttatcgccatcttctttttcgacgatggcgtatgcaccaatgatcgggttatcacggttcgccagctttgtcttgtgcttcagcagataatcctttccgccacgattctcataatcaagctcatctccctcatagatgacgtttgcgtagatgtccttgacgttcgtcagtctcttgatgaccgcctgggtaccgaaataagagcggctcatctgcagctctgttccatatacgatgaagtagcactgtgtcttggccgggctcaacccttggatgaccatgttgagcagcgcgttggcgatacttggcctgctgcatacttgcagcgctggctgatggttcttgtcttctacgccctggagcacgaagaacgctgatttcagcgcattctcagctgagtaattgggaggaaggacaagtccttctcccttcagctcggtgatcttcccgatcacctcatccgtaatgtccttctgcaggatcgcaagttccttcgtcgctttctgtacctgtgtcatttctactctcctctcactgacagattgatgatctgggtatccggcgctgtaatcacggtcacggattccctgttatcgataaagatcggtgccttgacctgataatagccgatcaaggcattgatgatatccaggccggcattgatcgtcgatgcggtattgagtgcggtataatccacgccatttaccgtgatctcacatgtcgggaccggattgccctcctgggtatagttgaacatcttgaattccacgagccggaaattgtcggccacctttgcgttcagcagctccgtgcgtactttcgtccaggcgtcacacagatagatgatccgctcctggtcagcgatccgctggttgatctccagcgactccttttccagcgacgcgcagcgtgcgttgattgccttgatgtcttcctggtacatcgggaccatgtcatatcttttcagcgccgcggcagcctcatcgcgctcctgaatatatcggttcttctgcccgatgatccggttgttctgcgccgtgatctcctcgctgaccgactgctccggcggaatggaatcgatcatctcctgcagctccttgtcatcactgagatctacctggtaatagccccggtcgaccgtgacctgtgcctcaagatcgctgatctgttgtctcatctctttgatctcggcttccttctccgcaatctcagctttcagtgcaagaccgttctgatatgcctcgttgccatccttcgtcaattcctcgattttcttccgctgcagcgcccgccatttctcgatcagcttctcctgttcctcttcctgattcgggagttcctggccacatttgtcacagcacaccgcgccgaatacaggcggttcctctgatctgatcatcgtgatatgttcccgggccgccgcggtcatttcacgcacctcatccagcttctcgttgcagcgatcaacccgctcgatgtcttgttcgaccgtcatcttcagcttgctgatctgtcgctggagatctgcgtttctctggttatattcccgcaccgatgcatcggcttctgcctgcttcttcgccttgtactgctcgatctgcgcaagcttctggatgcgcacatgattggcggccatgatggcatccacgcgtctcgacacatcgccctgcagctcatccagcttctcgagctggtcgttcgccttggcaagcatctgacggtaatactcatccttgtggtccatcagttcggccatagcagcttccttgcgcgtcctctgctgcatcagctcatcaatacgcgccggatagttatcgcgctcatggatgcatctcagccgcgtgctcatggccacctgtttggtttcggtaatattcctgccggggtcaaagcttcgcagctccggatcagatccgcggatctcttctggcgtgacatcaccggccatggccaatacgatctcccggcgtctgtccggcttcaggctcgcgaagtagcgcggatccgtgatcagtttgaagagctcctcgtcgacgagctcgctgatgcgtctcttgtactctgcggcggagatcttctcgtttccgttccagctgtatactgtcttctgaccatcgtacacggcttcgatctgtcctttcggcttccgccacttttcctggtatgtacgcttcagtgtcagctcctcgccatctaccagcaaggtcgcttccacgctgttgtcggtgtgccataccggtttgccgtcaggatccagcatcttgatcttggccttctcctcactttgccctttggagtctttgccaaagagcagccagaggaacgcgtcaaacacgcttgtcttgccggtgccattggcgccatagataaagttttctcctgactgaaactcttctactcgatgggcctgacctttgaaattggtcagttcaattcttttcaagataatctctttcatgttccatttcctcttcctgtctttcgtctgtcctcatgatcactggatccaccggatcgtgattgaggtcggcgatatatgcgatgatctgctggcgtaacgtctctgcccgaagatgccagccgcgattgaacgcatcgatcatcagctcctgcatgatcctgagctctttcattgctgatccagctcccacttcaggttctcgatcaaggtctccttgacctcgacctcttcggacagcacgcgattgccctcttccagcacatctagctggttctccagcttatcgatctgttgccgggcatcgttgagctgcgcgctcttaggcacggccagaaacagccatgcccctatagcaccgatcatcgcgaccacgatgtaactggttaccatgacggccacaaccttacgaatagctgtgtcactcatcattgctcctccagcacccattcgagggcgcagatctcagcatgcagctctttggccatatcctgatacattctgatatcagacctgatgacggcctctctcactgcctcgtcacatgattccttctcaatgcgcgcttcttccaagcgctgaaggatctcctgtttacttttcattgttgttcctcctcatctcttcgaacttctgcgccaatcggtagtatctgtcagaagacatgcgtgcatcttcaagaaatcccagcgcgtacataccatctgatctatccttccaccaaagcattgtttcgtagagcgcgctctgtggtccgatatctgcataccttagcgccatgatcaactgctcctctttttcggagagttctaccattttcatctctgtttcctcccgatccgctgcgccgtgtggcgcaacctgccacatgcaaggaggagtaccaacatcagcagattgcgccgcatagcgcagggatctattttgtggtatactatgtacggcttacataagccgtggatttgggtgcactccttcttgctggcaggctgaggggtgcattttcatttgttcgttttcatcaatctcccctttcgctttaacaaccgcttccataaactctgcgcaggcaggctctaagtcctcctttgtcggtaacttcttgtaatgcacaatcactttcgcggtatcgaactcgaaggtttttgtgcccataccactacctcctctcgttcatactatgtttgatttggtttcgtgctaaaatgaaaccatggaaagcgaggtgatctaatggccaaatctaatgtcaaggtaatttctgaaacttccaccggattgaataatcgtgtcagtatcaacggaagaacttacacaaataatcaggcttatcaaaaagcaatcaaaggtgaagtacctggttatcatggtgtaaaacgctctgacggaacgaaattcatcagaagcaatccagatggtagcaagaaaaacaaccttggctaagcacagggctcgtcttcagacgggctctttgttttgatgtcaacctcatattcatccgatgtaatttccttgactgcttctccatcttcaaagattcgggtaatcaattctcctgtaccttttcgataaaccgtgatttcagttatttccattgagtgactttcacctcctcatttgattttacagatatcaacttcaaaaatattgaagttgataggcaaaaaaaattatcctttcccctgcccaaaatctaattcattcatgtccttccctgtcaatgaacatatgatagctgcattttttacagatatttcactagcattacgcagatatgtattgatatatgtttcagaaatccctaattgtgcagctacatatttctttttcaaaccggcttcggcaatcgcctcttcgattgatatcctgtccatattatcacctccatttcacctttataatacacttcaaaaatattgaagtcaatggcaaatttcaatttttttgaagttttcttcggtttttgttgaatacaattgaatttgacgatataattctaattgaaaagaggtgatgtgtgtgtcaagaaacatagtcttcgggaaaatggtggaaaaatatatgcgaatgaataatttaactatgaaagaactaggagaaaaagttggtcgaggtgaaagtaccgtatctatgtggatatcaaacaaatcaactccccccatggggattgtacaaaaattagccgacatcttcggagttacaacagatacaataatttatggcgaatctgattctcttaaagaagtcaaaattgaatttgacgactactttcccttgcattactcgaccaatttatccgccggaactcttgatgaactgctggacagcgaaccggatgctgttgtatacgtaccgatcacatttcaaatgaaaagaaatagattacatgccttcaaggtcaacggaaccagtatgaacaatgtaattcctgatggatccattgttatcgctgaatccgtcacagcaccggatagcttaaaagatggcaccattgttgttgcttgggtcaacggaacagctacagtcaaaaggctttacgccggagaccatcagatcaccttaatgccggatagcacagataaaagtcaccagccaattatgatagataccgatataaatgccgtcagtgtcattgggcgtgtcatatggcacatgaatcctgatgacatcagcaaaacatattaagtaaacacatacaagatgtttacatataggaggattggggaaatgaaagagtttgctatgtatttgggaactatttgttttgttgtatcgattgtatgttttgtctcagcatacaaaaaaaagaaaaagaaagaaaaaatcaacaaattgcttatggttggaattggatgttttgccatcgcggcagttcttgctactgtatttaaagatcctatacccgaaagcattacaatcaacaatatcgagatgtataaggatgatcaaacagaaataactatcaaagtcactcctgaagatgccgatacagatgatatacactgttcaattgatgacgaaactatagctcatctatctggaaatgaaataactgctcttcaggagggtcaaacaacctatggttgctcatataaagatgacgataacgaaattaccagtaatcaagctaccattaatgtcaaattaacagatgatcaaattgctcaaatcgagaaagaaaaagaagaaaaggctaagcaggaagaggaaagaaagaaagccgagcaacaaaaagaagaagaaagtaaaaacactttatcttcatatgaacaggctttcgcaaaagattacgctatagaatgtgtaaaaagtgcgttaaaagctccatcaactgctgaatttcccggtggttttttaaccccttatcaagactggaatatgtccaaatcaaataatttggttactgtttcatcatatgtagatgctgaaaatagttttggtgcaatgcttcgttctccgtttacaattcaaatgaaaatagatggcgatacatggtctgttacttatttcgagtttgacggtgaagtagttcaaggaacttatcaataattaaaaccgccccacggcaatggagcggttctgaagagcagcacggcaatgctgcgtaggttagaaaaagatttatccaccacgataatactttttctatacccaattctatcaaattcacaaacttttctcaagtatgcataaatttgaatggagggtattacgatgaaagctgaagaagtactcatctacttaagaaaatccagatcagacagcccagatgaaactgtggaagaggtgctggcgcgccatgaacggcaactgcaggagtatgcggtacgcagctatgggctgcccgtgcctgagcaaaacatctatcgtgaagtcgtatccggcgagaccatcgaagatcgcccggaagtgcagaaagtgctcgcgcgcatagagaatcctgacatcaaaggcgtgttgatcattgaaccgcagcgactgtctcgtggcgactgggaagatggaggcaggatcctgtccagcttccgatacagttatacgctgatcatcacaccgcataagacgtatgaccttcaagacaaatttgattataaatttttcaagatggagctttcccagggaaacgattatcttgagtataccaaagagatccttaaccgcgggcggatcgcatctgttcgagaaggaaacttcatcggcagcatagctccattcggatacaaaaaagcagtgattgataaatcccataccttggtccccgatcctcaagaagcgcctggggtagaaatgattttcaatctgttcgtacatgataacatcggatgggcaaaaattggatacgcactcgataatgccggcatcaagcccagaaaatcaaagttctggaatccgtctcaagtcaagaccattctggtcaatccggtgtacacaggcaaagtaacatggaatcattacaaaacaattaccatcgtggagaacggcaagctgaagaagagccggccaacatccgatgactatcttatcgcagaaggtaaacaccaggcgctgatcagcgaggatctcttccaaaaagcgcaggaaaagctcggcagaaacaccagagagccgttttcaagagagctggtcaatcctctggcaggacttctgtattgcaaaaactgcggtaccgcgatgaccaggcgtacttatcgacgcctcaatggcagcgttcgctctgttcctcggttgctgtgcaataatcaagtgcgttgtggaacaaaatccgcttcctttgatgatgtctactccgccctgatttcggcgctgagagagatgatcagtgatttctcattcaaactcagccatgaccaaagccacagcctgtttgatattcaaacaaacatcatcaataatttgaacaatgagctggagaatctggagaaaaaacaagatgagctctacgatctgctggaagatgggatctacagcaaagaggtgttcctgaagcgaaatgaaaagctcgctgaatctcgaagcgagctggaacagaagatcaaaaaagcaaaagaaaataccgcgcgcccgatcaactatcaggaacggatcatcaagttcgagcaagttctccaagcgttacaagacgatgatataccgccaaaagagaagaaccgcctactgaaacagatcattcagcgcatcgactactcaagagactcccccaaccgcacccgatgggataccagcaagccaaccttggagattcacttaaaagatttccaaaactgatcataacagacaacatcatgccgcagattcctctgtgccgatatcgctcagcagcgcctgaagacgggcatccggcatggtgtatcgctgtgacagatagcgcagcgccgcagccatctctccatccggaccgcccagctgtgagatgatcaccgctgctgccttcgcgtccggacatgtgatgttcaccggaaactgcagcttcttctcatagatccacatcagcattcctcctttgtccacgggaacggcgaaagtgcgtaacgcgcataatcttctgcatccgcgctgcggttgctcagcggaccatagcggcattcatattcatccttggccgccagcagcaattccagatgctcacggaaatactgcagcgcacactcatcttgaggacgcagatcgaggaacagcgcactgtcctgcacggcaaaatcaagccgcatgacctcaaggagcattttctctcgcttactcacagccgcacacccccgtaaacggtttatccagctcgcggaagatcgtccctgccgcaaaggcttcctcaagcggatacaagcagcaaaactgctgcacttcgatggaactgatcgtcagttcatcacacattatgatcgcctcccacctcatgatatgaaatggccggatatgaaaataggcagacacatggtctgccctctatgatcatctaccagctgatgccctcctcatgcaggatcagctccacatcggcatgcaaacgccgattcaatatccttcgcacattgcgcatatcgcttcctttggcgaacgcagctgcctcatgcggcatcatgccgcctcttaccttgcgctcgatcagccgcgcatacagctgcgcctcctctgcgtacagaaacatcgacacatcgcaaagcggcttcagcgaacgccaaggatcctcatcgagcagcaggtaatttccttcaaccagcaccagcggcgcgctcaccttgatctgatcatcgatcacatcgtgacggcggcggtcataccagggccaaagcagcgtatcctcctggcggaggcggaccagatgctcatgcagccggtcaaaatcaaagctctccagacatcccttcacctgtttcatcggcacattccttccctcgaccttgacttcatgggtcaggatataagactgacgatggtgaaagccatccatgcccagcgcctgaaacgggatgcccagacgctcggcctcatgcgcaaacaatgctgccagcgtagatttgccggcggccggcggcgcggcgagaaagacgatcagacgctgcttgtcctgcgcctgatcatgccagcggcgaagcagcccatgcacgcactcttccaaaaacgcccgcgagaagccggcatggaccaaaaagccattgatgtcgaaatcgtaagacaaactgtcgctcacagtttgttcagctcgctttccacgcggtcaaagacacggtcatagtccgcatccggcacccgttccatcacatactccaggaaccgttccagctcctctctggtatactcctcttcaacgaagcagtccatcgccatatcgatctcctcgcggtaagttgcctccacctgcaaagcgagccaggcaaacagacggtctacatttctctgatccattacagccacctcatccttccgcttttcattatgacatatgcgcaaagagaaggaaagtcagaaccatgctttttgcagctgccgggcaagatcgtcgggataacgctcatcgatcagcacatgcggaagatcgtacaatgcgcacagctggcgcatgcgcgcattatcctgccgcacgccttccagcgtacagtcatcatcgagccgcttctcgatgacgtccgcatgctttttgacctcatcaaaatgcgcgcagagataagcgtcgctcatgagcaagcagatgaaccggatcctgttcagctcatctgcagaaaaatctttctgccagtcccagggaatatagcacccttcgatgatgaggtgctgctcattctccagggcggtcttgatcatctcccgcacgatcggccacagatactgcatcagcgcgtcatcttcgctgagcgcgttcagccggcattgatggctgcggatcaggcccatcttcagatgatcgatggaaagatacgggatatgcaccagttccatgagcttttgcgcaagcagcgtctttcccgtatgagaagcgccgctgatcaatacgatcatcagatccctccttcattaaaggggcagcgcctttcggctgctgcccgttcacttgtccagcggatgatcctgacggtaacgcgcatagatggagcccttttcacagctgctgcagctgcctttgcatgcgccgcagccagcatctgttcttggggccgtcaaccggtatgccgcaatcaagatcagcaggatcaccagcacgacgatcacatcgatcataagaacacgctccctgcctgatagatgatcagcgctactatatatgcgacgccggtctgaaagagaaccgcaaacagcgcttccttcaaggtgcccagctctcttttcgtggcggcaaacgctgccacacacggcatatagagaacggtgaagcacaggaaggcgaacgcggacagcggcgtgaacatcgtctgcagcacgctgctcagcccggcatccgtagatgcgccggtgaggatggacaaggtgctgaccacgctctccttggcgg

SEQ ID NO: 215 - DNA, 9606 bp, Unknown
  16S sequences of unknown bacteria
gtgtcaaccatcagctttttgccgttttgcgtggtggtttccacctgcaccttcccgttgaccagataccaggtatccgctgcgtcgccggcgcggatgatgtattttccccgagcaaaggtgtgcagctcgcacagcgtggggtcgctgcggataaacggataaattgtggtgtcttctaacttcataattaacccaataccccccataaaagcctgaaaaagtttcgcttcattttctctcaaatatatgtatgacgcgccggattcatttatccctttgaaacctgtgcgcgtgacgctttgcgtttatcgacgataaacgcaaagaaagccatggctttctttgaatcgcgttaaaaacctgccgcagcggattgggtacgcgcgaacagggaaaatgcttgaaaaacgtgccggcgccggccgaaaacaaccgcgcctgcctgggcaaccaaatgcgcagaaacgaaagaaaaaggggcatccatttattttggcaaaaatatcataagcttttttgacgagaaaagcaagaacttccaatatatattgaataagtttgtgaaaaacaaacaattcttttgggcgaaaagaaaaaaatcgaaaaaggggaaaacgggcagttctaaaatagaataagaatatttttgaaagaatattcttcggtgctgtgtaaattgcactgttgattttgacggtttttcgttaagatagcggcaaagagagtggaacagaaagctgtgttttgcaaaggaggattgttatgatcaaaggtttatatgccctgccgcccgacgtgggcgcttacctcgcgcgcatcggtctggcgccggaggacttccgccgtgccatgcacccggagcttccaccgtcccccacagattacagcattccccatacaaaagagtcgctggatctcctggtacacgcacatttgtttcatgtgccctttgaaaacatcgacgggtacgatctgcaccgggaagtctcgctggaaatcccggacatttttgacaagattgtcacccgccgccgaggcggctactgctttgagctgaacgccctgttctccgcgctgctcgaggctctgggcttttcgtgctatgctgtgggtcagcgggtgctgcgggaaggctcgtttcctcctgtgagtcaccgcgtcacggtggttacactgccgcagtccggggaacgtgttttgtgcgatatcgctttcggcggcccgtcgccggtgacggccctgtatctggaccggccggaggtgcagacgtcgggcgccctgtgttttcgcatcgacacggagccggtgcgcggcctgcggcggacgctgctggtggaagagagcggcgaaacgccgctggtggtattttcggatgcgccgatggatcccgtggattttgtgccgatcagtacccatatgacctaccatgccaagtcccgcttttacaataaccgggtcatgaacctgatgcgcccgggcggcagtgtggcggtggataacggtgtgctgcgcctgcatgaaaacggcgtgctggaggaacggccattgcccgatcacgcggcgctcaagcaggcctgtatcgactatttcggcatgaacgccgaggcattggccgaattggacgcgtaatcgaaaaagattaaaaaaagcgctttcttcattctgaggaaagcgcttttttgctgcctattccaatggctctggtcaaatcagccaaaaaagccggcgcgcgtttggtgtgcaaattgcaccttctgcgcactttgtacacgaaagcaaaaatggggtgaaaatgctttttgaaactgtgcactttgcactgtctgtttgtgaaaatcgagattaggataggggtgcaaccgaggaaaacgcagtgaatgaagaaacccaaacgataaattttttaagggaggatcgacatggataatgaagcaagagtacaggaaatcttgaagagacgcggtttggacgtgactccggtggataacttcaccgaagcggacgttccagaacccaccgagcgcttcacaaaactcatcaatatctattatgcgatgaagaacacagtggacatggaaattccgtattggtacaaccgtgtctggtgggagaacgaaggcgacgtcattgagattcgccgtgcgaaagcttacggtgcggccctttcccacacgacccccacgatctggcccggcgaaaagctggtcatgaacaagaccaagaactggcgcggtgcgttccccttcccctgggtggatgcttctttctttaatgcccaggcagaagcgctgatgaacgaggcggatgcacccccgctggctgcggcggatgcagtttccgtggtcggcgccggcggcggcaacgtgaccaagaatttcggcaacgtgatttccattgcgcagaaatttggtatgcgcaaggaagagatccccgtgctggtcaaagtgtccaagtattgggacaatgcctcggtggagcgcgtcagtgaccgttactccaaaattgttcccgagtacgacaagtggaagggctatcgcgacagcgtactgatcatgttcgactcctgggccatccctcagggccgcgaggtcatcaactactacatgcctctggaatatggctttgaccgcatcatcgagatgtgcgacgagaaaatcgcagaggtgctcggcgaggccggcgacgacggtatcctcggcatgagccgcggctactattatgtagccaccaaagagatcaccaagggcctgtcccgctgggctgacaactacggcaagcgcgcggagttcctggccggcatcgaggccgacccggcgcagaagaaggattacgaggaaatcgctcaggtaatgcacaacatcgcccacaaaaaacctgcgacgttccgcgaagctctgcagctcaccttcctgtgccatctgggcgtggtcaacgaagacccgcagtccggtatgtccatcggtcgtttgggccaggtgctgcagcccttctatgagaaggatatcgcagacggcgtgaccaccgacgaagaagtggaagagctgctggagctgtaccgcatcaagattacctccatcgagtgctttgcatcctccggcgtcaccggcggcgtgctttcgggcaacaccttcaacaacctgtccatgggcggcttgggctatgacggcctgacggcagtgacgcctctggaatacctgattgtggaagccggcatgcgtgcgaagacctcccagcccacactctctgtgctgtatgacgaaaagacgcccgaggacttcctgatgaagtgcgcccgctgctgcaagctgggcatgggctatccggcatggatgaacaaccagggcggtatgaactacatgctgcgccattatcagcctgagggcatgaccatttacgatgcccgtgcatggtgcctgggcggctgcctcgaatcttcccccggctgcttccagcctctgcattataacggaaagacctatatggtccccggcggcgctgctcccacctgcggcacaggtattcacttcaccggcctgcccaagctgctggagttagtgcttaccaacggcgaagacaagcgcaccggcatccaggtctttgctccccataaccacaagctcgataccttcgaggatgtgtgggatgtatggatgatgtacatgcgcgaactgctggatgtggccaacaagatcaacaacatccagatggatgtctggagaaagatcaacatgcccgtggtggcctccatgctcaagcccgactgctttaagaagggccagcacatcggcaacgaaggcgcccgctacaacggcggcattaacttcgagtcctgcggcacggtgaactttatcaactccatggcatctttgaagaagaatgtgtacgacgataagaagtacacgctggaagagatgaccgacgcgattctccacaacttcggatttaagacggcctttgaaaccggcgtttattcccccgaccgccgcgaggctacggatgaggcgcccaagtatgagaagatcttcttcgactgcgtcaatgcgcctaagtacggcaacgccgatccttacgcagacagcatcctgaaggattacgaagaccggatgctgcccgagatgctgcgcctgcgctcttactatggcaagcagtactacatgtgccagatctctgtttccacccacggcccgcagggcgccatcaccctggcaacgcccgacggacgtctggccggcactacttacgccgacggttccatgtccccggcgcccactacggataagaatggtatctatgctgtgtttgaatccgctacctgctatgaccacgctatgtgccagaactctcagatgaacgtcaagattcatccgacggcggttaagggactcaacggcaccaagaagctgctggagatcatccgtgcctacatgcgcaaaggcggcttccatgttcagttcaacatcacttcttccaaggttctgcgcgaggcgcagaagaagcccgacgattaccgtgacctgatggttcgcgtggctggctttacccagtactggtgcgagatcggtaagcccatccaggatgaggttatctaccggaccgaatacgacgcgtaacgtttgcgctgccagaaacatacggaaacgactggaaagttattgaatggaggtttaatcatgaaacattgtgaatgcgcgaattatttgagccttgactgtgaaaagggcatgtgcgccctggataagaccattgttcccattgacggtgaaggcagcgacgcctgccctcgttttaaggaaggtttcctgtgcaaaaactgcgcccacttcaccgatgcggataaatacggaattggcaattgttccggttttgagaaggaaaactggacgtatgccctcaacggttctttctgctgcgagcattatcagcagcgctgagcgtaagaaaacgcggcaagtgaagggagtaacagtatgaataaagaattgacggcaatgattttcgacattcaaagttactccgttcatgatggcccaggctgcagaaccaatgtgttctttgtcggttgtccgctgcagtgcagatggtgtgccaatccggagagctggaagctgaaaaaacacctgatgtttgcggatagaacctgcaaatgggatcagggctgcaaggcgtgcatcgacgcctgtccccatggctcgatcacctttgacgcggacggcaggccttcggtaaactgggtcatctgcaacgaatgtgagacaattgaatgtgtgaattcctgtgctgcgggaagtctgaagcagtgtgtgcgtattttgaccgttgacgatttgatgaaaatcctcaagcgggacttctccaactggggcgctgagggcggcgtgacgttcagcggcggagaacctctgctgcagcatgagtatctcgacgaggtgctccagcgctgccaccagctccagatgcagacagccatcgaaaccagcggctatgcccggcaggatgtctttttgaagattttccgcaacatcgactttgcgtttatcgatgtgaagaacatggatgacgagctgcacaagtggggcaccggcgtgagcaatgagctgatcctgtcgaacatttccgcactggtgcattccggctggggcggacggctggtgctccgccaacccacaatccacggctacaacgacagcacggagaatgccaagaagatcatcgactttatgaacgaacttggtctttacgagattaacctcctcaaattccaccgtatgggcggcacaaaatgggaacagcttggaaagacctacgagtatgccgatcacggcgatatgagcgacgagcgtatgctcgagctgcaggaactttacctggacaacgatatcgcctgctatgtcggcgaagataccccgttttaagcatcacagattctcactttttcagcggcgggcgcgggatgggcgctgcccggccgatatgcccccttacttacttcctaagatcgggtttgccgcagggcgcgcccaccccacgccctgcggcaggaaaatgcttctgaaagaaggttttgccaatgctgtttgacgaacaggtgtttcgtatggctatgaaaaagctgactgccgaaggaaaccgggatgcggtggaagattacctgctttccgagttttggcgcctggaggaaggcgatatcgcggtggcggacagctgctgctgcgggaaatccgcctgcaggctggaagaggaagacattgcctggcagcggaaccggctgcaggggcaaatcatcgtcggaagcgaacttgcggatttttaccgtgaaaacaaggaatggcggcgttgctttgatatttatcagagcctggaggaaacggtgcgccagggcggtttgtcggatacggaggtatacggcaggatccggatcaaccgcgcctatgcgctgctggactacggcgaagaagaacaggcgctggagttgacggacgaggttgaagcgcttctgacgcgctgcggcagtgcggacggagactcctggtcccgactctgccatctgcagtctgtgatttaccgccggcgcggcgaagagggccgggcggcggaagcgctgcacaatgcggcggatcgtattcgcagcagcacaaaggagccgaaagcgcaggccggtctgttgctgaatcatgccgcggcactgctgcagacaggaaacccgaaagaagccctgcgcgttctggacgatatgatcctgccgcacaaggaggagctgcagggagatccatcgtatttcaccgcatggaatctgaaggcgaatatcctttaccagcagaaagaatttgctggcgcggcagaggcgtttgcagcgctgcttcatgcggcgcaggcggctggcgcactgacgcagcagcagagcgtgatctgccggaactgcagcaagatgtatgccctggcgggcaatggagaacaggcgcgcgcctatgaagcgatggcggaaacgctgtaaagcacatgttgcggtctgctcttgccgaagggatgcctgtcccctttggcctacagaaaactcgaatcaaagagtgtaaagaattggaggaattactatggcatccatatctcctgaaaaggcaaggacctatggcctttgcactgtaatttcggcgtggctggctgtgttctgtctgtttggatatcgctccagtttctccatcatgcagaaaatgatcatcgccgataccgggtggaccactatgcaggtttccctgggctactgcctgatgatgacaatttacgcgattaccgcgtttttcagcggctctctggtggataagcgcggctgccgtccgacctatgcgatcggtgcggtaacctgcttccttgggttcttcctgacatccatggtcaatgtggcttcccccagcgggttctatctgtatctgtttacatacggcgtgtttgccggtgtcggcacgggtatgctgtgggtttcttccaccatttcctgccgcaaatggtatgtcggtgcgcgctacggcaccatgtgggggctggcattcatgggtgctcccatggcgcagctgatcctgacgctggtgctcaagcctgttctgaacaatatgggctggcaggtcggcatgaaggtgctggctgtgattatggcagtcttcctgattgtcgcttccctgattgccaagcggaccccggatcattacggcgtggagccgtttggtgccgaaacattgaagaaggccgccggcggcgcggccaagaaagtctggcaagttaaggaagcgttctccacctatgccatgtggtgcgttatgctgtgcttcctgctggctatggcgggcgaattcctggtgtggtcccaggtggtgtctttcttccaggtggacatgaacatgacgctgaacgaggcgtccaacatttatctgattattggtattgcaggaattttctccatgccgctgaccggcaagttctcggataatctggtgaaacggctgggcaacgagcgcaagggacgcaagatcatgctgattatcgggccggcctgcggcgccatcggcacgattctgctgctgacccgcagcgtgcccctgtgcatcgtttccatgatcttcctggctatctactggggcattgagcccggcggctgtgccggctatgccggttccgtattcggcggcgccactctgggcaagatctggggtctggccacgctgatcgtgatgggcattggtccttctttcggcacctttatgggcgcatggttcaacgataactttggttcctatatccccgcattgattttctgcctgtgtgcatacctgctgtctatggtgctggcctgcacgctgccgatgaaggtcaagggcgagcaggtggaaagctgagcgttccggctggattcctctgcggatgaattgtgaaatgacaaagggcaggtgagaactgcgtggacgaaaccatcgaacgcattattcaaaaggaatacgttatgctgggcaaggtcaacaaccgcggcggccgcgctgcctgccaggatcattttgccgtgttccgcaccatgcgtgcgagccagtttctggtgtggccggatttcattctgcgcagttatctggacgatctgaagcaggccgaagcggtggggcgcaatctggtgtttgaaaagtatgcatggatgatgatgtatgctttaccggaggaattcaaaaaggtgtgccacgtgctgccggtgttttcaccggagcgccgtgagcggatgcaggaaacggtggccgttcaggtggcctgggcggaggaattcgctgcgcgctatcccaccatcggcgcccggggccggccgctgcacaccgaggaggataccccggaatccacgtctgtggagacctatatgcgcggggaacttgccacgtattctgagcgtacggaaaagcgctaccacacttttgtactctcctgccgggagcaggggcggaatttgacgacagaggtccgggaaaatcaggcccgcctgcagggatggcattctctggaggatgtggaacggagctaccgggaaaaacgtggtcagacaaattttttggaggtcttaaagtaatgaagaaagcagaatttttgccgagcttgtatacacacaatgctattatcgacgcacagcatcaggaactgatcaacaccattaacaagctttacgaagccattgacagcggtaagggcaccgacgaggcgaaaaatgccctggcatttctgatgcagtatactgtgttccacttcggcggcgaagagaagctgatgcaggaggataagtatcccctctttaccgagcacaaagctgcgcatgacgcttttgtggaaacggtcaaggggctgtatcagaagctgatggaagaaggcgcaaccgaggattttgccgaccaggtggagcaggaaatcaccaactggctgattgtccatatcaaagggatggatctgaaaatgatcgaatggaaaaaccaccgttcgggcaatcagatggataacctgatgtgagcgaaccacactctgatcttttcatttgccaacaatctacctctatcatcacccaaagtaccgggaggcgcggacctgcggccg

SEQ ID NO: 216 - DNA, 1840 bp, Unknown
  16S sequences of unknown bacteria
gctagtatccgcgccgggagatggttttatgcggggttgtcaaaagacattattgaatgtgctcgtggttattgatatggtcctggcaatagcagtaatagcccttacagcgggagcagtagcggaattccagattgggatactccgtatccgtccggccgcagacggtgcacttgtgccggtagggccgcgtgccggaggcgctgcggtaattgcctgcccagttgggattcggccccggggctgccttggcgcggaagtttttctgcgtctgcgttttgcggtagcgaaggaaatcaggcagcagattggctgcctccttgccaaagaagaggaaatagttggccacggccagcagcgggaacaggcagaacagcgtcattcggaatgtcaagattcccaggccgatgcagcgcagcagagacgtcacgatgccccaggctgtgagcaaaatatcgacccaggccagatatttcgccttgaccgggataatataaaataagaggaaccgggcgtctggcatgatcgtcgcaatggccaggaacaagctcgcgttgaggtacgtcgtcgtggcgctgcagccgatgagcagcgcggcgatgtccatcaagacgacgcctgtcagataatagaaattgaaccgcagcacgccccactgccgctccagcattttgcccatgaaatagtagcacagcatggagatgagccccagaaagagccccaggccggtggtatcctgcaggtaagtaaagacataggaaaacagccgccagacctggccgtgcaggatctttgtgccgttaaagcgcagcagctcatagaccgagccgctggggtcagccaaggagaaaaaatagacgataagattgccgatggcgagatagagcatcagatttgggatgcccttgttctgattccggtaacaaaaccgcgcaaagctgcggcgcagatttttcaaatgacgtcacttccttttcttagtcgctcttatgataacgaaaattgcgccaattgtccatagataaactgtgaacattcggagtatcgccaatttctgccgccggttataccaccgctggaagaaattgcaaaaaagcgctggtataccttgtattttgggctggtttttagtaaaatgaggcagacccgcgtttgtatgcgcgccgctgcacccaaattccggcagcaggcaagccccgcaggcggcgtgggcaaaattttcacaacgcgccgcatcccgggcctttgggagcggcagcaggaggtactatgcacaatcgaaaatcccgcacctatccactggccatctgtgccatgctcagcgccatcattttgctgctggccttcacccccttggggctgatcgacctgccgctcatcaaggcaacaattctgcacgtgcccgtcatcatcggcgcggtgctgctgggctggcgcaagggcgcgctgctgggcggcgtattcggcctggccagcctagtcaagaacaccatcgcccccagtgccctgtccttcgccttctccccattcatccccgtcccggggacggaccgcggcagcatctgggcgctggtcatctgcctgatcccgcgcattttgacgggcatcacgccagcgctggtctatgccggtgtccgccggtgcttccggaaaaagaatttgggcgtcaataccggcgcggcgatcctggctgggatcgccggtgctctaacgaatacggtgctcgtcatggggctgatcttcctggtcttccgccaggcgtacgcggcgctgcagggcatctcggtggacgccgtcctgggcgtgattctgggcatcgtcggcgccaacggcgtgccgg

SEQ ID NO: 217 - DNA, 14788 bp, Unknown
  16S sequences of unknown bacteria
gctttatagttttttttgaaacctttttccgcaatttctggaaattcatagtaataaatctggtttacgggcttatatcactcccggttttaacaaacgggctggcgtccgccgggcttaccaatgtaacgcgcaatatcgcgcgggataagcattcgttcggcgtgagcgacttgtgggatacggttaagaaaaactggaaacaggcgctgccggcgggcataataaagcttgtgatttatataattctcgggtttgacgtttatttcttctatttcggcagcaagggcataatgtcaacaataggtctcggcatatcgctttgcatgctttttatatttacggtgatggactattttgtatggacgcttataatcacctttaagttttcattaaagcagatataccgcaacagctttaaatttgtttttataaatatgaaaatgaatttagtctgctttttctcaattctgctggtttacgccgcgaatgtgggaatacttttattgttatcttcttatgctattatggttattacatttgaagtattgctttacattcttttgttcccgtcgttcaggtttttgctggttcagttctgcacattcccatcaattaaaaagtgcataatcgacccgtattaccgtgaccacccggacgaggatttggataaacgccgcgatttagggatagaggttgaggaaaagaaacccgaaaaaaccgaggacggggaagaagacgcagaagaacccgaaaacgtttttgaagactaattttaaagacttgctcatatactcaaaatagggagtgagagtatatgaattgcaaaattgcggatcttcgcaacaaacaggtggtctgcgttaaaaacggttgtgttttgggttatgtttacgatgtggagttcaacacggcaagcggcgctttgagcgcgcttgtaataccgggcagaccgcgcgtcttggggcttttcgggcatgaggaggatataataattccgtggtcggaaattgaagttatagggcaggaaacaatacttgtaaacaccgattccgagcggtacattgccaaaccgcaaaagggctttttcggctgaatgaaagaaaattaaggtattgtctatctaatctttaatttataaataagctttatttttcggcaatccctcggccgctgacggcggcggtcccatctgtcggctgtgttgacatctccccacaccgtgcggagtcaccataaacaacggaagcttatgatcagcaaagctttacagcataataattattatataaaagcagcctgccgctatcggttttcggatagcgacaggctgtttttaggttataaagcaatggaagtcacggccgccggagaatcggagtataaatgctttgcttattctgcggcggcggggcactgcttgccggtgtggtctattgtgtagttatcctttaaaataaggtcgcttataaatacaaattcatagccctgctcctttagacatttaagtattccgggcagcgcttcgggtgtgtggtcggcatcgttatggaaaagcactatgctgccgtttgttaccttgcctgtgactcttttaaaaatgctgtcgggggtggcgctttccttccagtcaaggctgtcaaccgaccattggatggctgacatgccgaggctgtcaaccgtttctataagcgcattgtcataatcgccgtagggcgggcgcagaagcgtagggcaaacgcctgtgatcgctttgatcttactgttgcagctctcaagctcatcgcgcatttggtgcttagataattgcggcatatgcgggtgggtgtttgaatgattctgcacctgatgccccgcatcggaaagcgccttgacagactcggggtatttatccacccatgatccgactacaaaaaatgtcgccggtacattgtattcctttaaaatatctataagcgtctgggtgtcgtcgttgccccaagccgcgtcaaatgaaattgcaatttgctttttctcggtctccacgcagtaaataggcagctttcggtcgtttccggcaaatgcggttgcagagcctataacaacggcgattaccgcaataagcgcgcatatgccgagcataagctgttttttggttattataagaaatctcattttaacggtctcccttttcttttctaataaagaatatgtatgcctgcttgtatactattctttaaaattcaacacagaaacatttaattgttttttgaccgaataagcgttataattatgtcggtgaatgtcgtctttctttttgatattatattttcaaaaaggaggtgataaggtgagtttattaggtgatataattattgcgggcattaagggaataaaatattaccctgtgttttatgaggataagaaatacaaggtttggatttgcatgctttcgccatcaacatgtaaaccttgttttgatttacatggtaaactatatttgcctgaagaagcaccgcccagatttccaagattgcatgaaaattgcgcttgctttgttacatggtctaaatcagttaaaaaagggactgctacttatgagggaaaacagggaatagataatttactcaaacagggaaaaggactcccgaactggtattttaccaaaaaggaggcaaaaaagcttggctggaaaccagcatcaatgaatttgcgtcaggtaacaaacgaaggcgttataggaggggatgtttataaaaataaggatgggaaattacctcattctaatggtagaatatggtatgaagctgatataaattatacgggtggcatgcgaaacagctcaagaatcatttattcaaatgacggattagtgtttgttacttatgaccattattttacattcaatgaaattagttaggagaaaatatgaaaagtgttattattaatttttccttatgtaaatatcctatggatatgcataaggaaataagagaaaaattagatttacccgaatggtacggcaacaatttaagcgctttatgggatatgctgacaggttttatagaaacgcctgtcagtataactatgatatttaagcctgaaaccaaggcggcagaaaatttaaaggaaaatgttttgaaaataatcgaaacctttaaagaggcggcagaggaagaagaaatagagtttaattgcgatatgtaaaatcaaagcgcgcaacttattaaaatttacatattggcaattgactttacggggcggttattgtaaaataaatttgataatatattgctgtacggcggaacggagataatacaatatgaaacctgtttataaacggatacttttaaagctcagcggtgaggtgcttgccggcgaaaagggcgttggaattgattttgataaggtgcttgaggtgtgcgcaagcgttaaggaatgcgtggatatgggggttgaggtcgccattgttgtgggcggcggaaacttctggcgcgggcgctcaagcggcaaaatggacagaacccgagccgaccatatgggcatgcttgcaacctctatcaatgcgctggcgcttgccgacgcgcttgagcagttaggtgttaccgcacgagttcaaaccgccattgaaatgcggcagatagccgagccttatataagaaacaaggctgtaagacaccttgaaaagggcagagtcgttattttcggctgcggcacgggcaacccgttcttctcaaccgataccgccgcggctctccgcgccgccgaaataggggcggatgttatattcaaggcgaccaatgtcgacggcgtttatgacagcgaccccaagcagaaccccgaagcgaaaaagtatgatactctgtctcacatagatgtcttaaaggacggtctccatgttatggacagcaccgccgcatctctttgtatggataacagcattgaaatactcgttttcaaccttaacgacccgcataatattgtaaaagcgataaccggagagcatatcggaacaattgttaaataatatattagtaaggagaatgaagctatgaaagaattacttaaaaataccgaggaaaaaatgaataagacagttgcagtgcttgaaagggactataagtcaataagagcgggcagagcgaatgtttcggtgcttgaccgcgttacggtggattattacggctgcccgacgccgatacagcaaatggcggcggtatccgttcccgagccgcgcattttaatgattcagccgtgggacgccaccactttaaaggatattgaaaaggcaattttaacctccgacataggcataaacccgcagaacgacggcagggttatccgcctttccttcccgccgctcacagaggaacgccgcaaggatattgttaaagaggtgcgcaaagcggctgaggaaaacaaggttgcaatacgcaatacccgccgcgacgcgattgaaaagctgaaggcgcttaaaaaggcaaataccataaccgaggacgatgttgctgacggcgagaagaaaattcagaatttaaccgataaattctgcaaggaaattgacgatctggcggctcttaaagaaaaggaaataatggaaatataatacttttgcgggcatattttaatgcccgcttttaaagcaggtgaaaaattgggtctgttcggcaaaaaagaaaatactgcgcgcgcgctgccgcgtcacatcgcaattgttatggacggcaacggcaggtgggctaaaaagcgcggtctgccgcgctctgcggggcatgtatcgggtgctaaaacctttaaaacaatagcgcgttactgcaataaaatagggcttgaatacttaaccgtttacgctttttcaaccgagaattggaagcgcccgaaggaagaagtagacggcattatgaaccttttgcgcgactatttgaaggacgcggagaattttaaggatgagaacataaaggtgcgctttttgggcgaccgaacaccccttgcggacgatattaaggcgctgatgcttaaaaatgaggacggctcaaaggacgcaacaggcttaaacctcaatattgccataaattacggcggacgggacgaaatagtacacgcggttaaaaaaattattgccgccggaatacccgaaagcgatataaccgaacagcttatatcggataatttatacactgcgggtatgcccgaccccgattttattataagaccgagcggagagtacagaacctcaaattaccttttgtggcaatcggcttatgcggaatactggttttcggatattctgtggcccgattttaccccgaagcagcttgaaaaagcgatagaggactttaatcaccgtaaccgccgattcggcggtgtgtaaaaggagcgtagaaatttatgaagacccgaattatttcaggcgcggttatgataattatagcggcggcggttataaccttaggtatgacggtaaacccgctgtttataaccgcctgcattgcgtttattgccgcggttggaatttacgagcttttgcataacgccgcgaaaattgagtcaaaggcggcaataatcggcgcctgcacctatgtggtgcttatggtgttcgcaatagacgggagcacgggcgccaggctgcagcaggcatttgacggcacgcacagggcgtatataaagcttacattcacactggcgttaagcgttatttattttatatattccgctgcggtgacgcttaagaatcacaagacctttgagctttcgcatattgcctttctttgcggtatgccgatacctatcgcctttgcgttcagttcgctcggcgttgttataaaccacgagcacgggctttattacctgtttatgctgcttaacttttcaagcgtatgcgatgcaggcgcgtattttgtgggcagcacgctgggcaggcataagctttgcccgaatataagcccgcataaaacggttgagggagcaataggcggaatagtttcaagcgttattgtgacatatattttgggcttttcattctcgtttgaaaaaaatcttgcaaacgcggcgcttttaaccgttccattctgcattttgggcatgataggcgaccttttcgcctctgccataaagcgtgctgcgggaattaaggattacggaaatttaataccaggtcacggcggaatacttgacaggtttgacagcataattatgaccgctccgcttttgtatttgtttatagctttaggggtaatataatgaaaagacttacggttttaggctctaccggctctatcggtacgcaggcgcttgaggtcgccgaaaaaaccaattggcagataacggcgctggcggcgggcaggaatgtaagacttgccgaagcgcaggcaagaaggtttaagccgcaatttgttgcaatgttcgataaggacgccgcagccgagcttaaaataaagcttgccgatacggatattaaggtgtgttcgggcgaagcgggcgttatagccgcggcagagagcgattgcgataccgtgcttaattccattgtgggtattgcggggctgagacctacgcttgcggcgataaataagggtacaacggtagcccttgcaaataaggaaactcttgtgaccggcggagaaatcgttaaccgcaggcttaaagaaaccggcgtaaggcttttgccggtggacagcgagcattccgcaatttttcagtcgcttcagggtgcacccgaaaattcactgaaaaaaatattgcttacagcctcgggcggaccgttttacggcagaaaacgaaaagaccttgaaaacgtaacggttaaggatgcgcttaatcaccccaactggtcgatgggcgctaaaataaccgttgactccgcaagcctcatgaacaaggggcttgaggtcattgaggcggtgcatttattcggtgttacggcggataaaattgagattttagtgcacaggcagagtattttgcattcggcggttgaactgtgcgatggtgcagtcatagcgcagttaggcacacccgatatgcgcctgccgatacagtatgcgctgacctatcccaaccgcgcagacaatgcgtttgagcacttaagccttacggatatcggcacgcttacctttgaaaagcccgacaccgaaacatttaaatgcctgccgatttgcattgaggcaataaacgagggcgggctggcgccaaccgcggtaaacggcgctaatgaagaagcggtcgcgctgtttttacagggcaaaattaaatttctgcagatagccgatttggtcgaaaaagcgcttgcggaggttaaaaataaaagggattatacggttgaggatatttttgagacggataaagcggcaagaaaacttgtaagggaaagtattttttagaatcgggtggttgttatttcggctttacttaatgtttggagcaatgtgtggccgtatcttgtggctatagctctgtttttgatcttaattgtgattcatgagttcgggcattttattgccgcaaagcttttgggtgttcgcgtcaacgaatttgccgtgggcttcggtcccaagcttttctcaaagcagggtaaggagacaaaatactcggtaaaccttgtgccgctcggcggctactgcgccatggagggcgaggacgaggaaagcggcgacgagcgcgctttttgcaataaaaagccgtggcggcgctttattatagtggcaatgggtgccacctttaacctgattttggggcttattattgtggctgtaaccttagcgccgcaaaaggcgtttaattccaccgttgtggcggagtttaaggaaaacgcggtaagcgagcaatcgggactgaaagttgacgataaaataattgaggtggagggcagaaaaattttctctacctatgatttaagctacgcctttacaaatgttaagggcggcaaaatagatatggttgtaaagcgcgacggcgaaaaggttgagcttaaagacgttaagtttgattcttccgaagaaaacggaataagctatttaaatgtggatttttatgtttacggcataagaaaaaccttaggctcatatatcaagcagacatttgccacagccgcgtcatactgcgctgttgtgtggcggtcgcttatagatctgataagcggaaaatacggaataagcgcggtttcgggccctgtgggttttaccgcggcgataggctctgccgcaaagcaaagccttgaaaatttgctgcctattatggcgcttataacaataaatctgggtattttcaatttgctgccaatacccgcgcttgacggcggcagactgctctttattttaatagaaatgatcttcagaaagcccgtgccgcaaaagtacgaggcgatagttcacgccgtgggctttgcgctgctgataggctttatgctgcttataaccgcaaaggatatttggacgctgattgcagggtgacataaaatgcaggagtataaaacaaaaaaggtatttgccggcggggtagcaatcggcggcggcgcgcctgttacggtgcagtcgatgcttaatatacccgcgcacgatattgcggggaatgttaagcaggcaaaagcgcttgaaaaggcggggtgcgatattatacgcatatctgtgcccgataaagagagcgttaaaacgctggcggcgcttaagagcaatatatcaataccggttgtagccgatattcattttgattacaggctggcgcttgaaagcgtggcggcgggagctgataaaatacgaataaaccccggcaatataggtgcggacgatagagtaaaagccgttgcgaatgcctgcaaggcggcgggagtgcctataagaataggggtaaattcaggctcgcttgaaaaaaatattctggcaaaatacggctcgcccacacccgatgctatggtagaaagcgggctttaccatatatcattgcttgaaaaatttgattttgacgatattgtgctttcccttaaaagctcaaccgttgccacaatgtataacgcatatgttttggcggcggaaaaatgccgctatccgctgcatttgggcgtaaccgaggcaggcaccgcagcaaacggcactgtaaaatccgctgcgggtataggcgggctgcttttgcgcggaataggcgatacgattcgcgtttccttaacggacgaccccgtgcgcgaggttgaaacgggcaagcggcttttaaaggcgctggggctgcgcacaggcggcgttaaatttgtttcctgccccacctgcggcagaacgaaaatagaccttataaaaattgcgaacgaggcagaaaaacgccttgagaactgcgaaaaaaatataaccgttgctataatgggctgcgttgtaaacggtccgggcgaggcaagagaagccgatataggcattgccgggggagatggctgcggtgtgcttttcaaaaacggcgaaataataaaaaaggtgccggaaagcgcgctgcttgacgagcttttggcggaaatagaaaagttataaacggagtgtaaaaaagtgggcaaggcaaaattttctcaaatatttgatacagggctgtcggccgatatttcagaaatattcggcagcacctttatagaaaaatgctcgcttgataccgacgaacgcgccttaaatgcagagctaatggcagaaaaatacataacagccgaaagccgaaacgagctggtaaatcagcttaaaaacgcgcttaaattaaatgaatgtcatatctcctgcgttttttctgaggacgccttaattcccgccgcctgcgcggacattgtagcggagttaaagcttaaaaacgccgcgcttaacggctatttcaacggcgcggaatttaatcttaataataacaatgttaatattacgcttaaatacggcggatatgacaccataaccgactgcggctttgaaaacgcctttaagcgcattataaaggaccgtttcgggcgggatatcaccgtttcgtttgacggtcagcttgaaaaggtggaaattgacctgccccccgcagagcctgcgcaacctgtcagaatacccgaaaggcaggcatcagagccgaggcagggagcgcccgtgcgccccgctgcgccgaaaaaggaaattaagtttgaaaaaagagatggcagacccgataacggtatagtctaccttgataacccgcagcagttttacggcaggggcggtatttcgaatcgcacccgcgatatgataagcattacgggggacgacaccgaaattgcctgctggggcgaggttttcgggcttgaaacccgcgatattaagacaaagcgcggaacggatatgacaatagtcaacttctcgttcagcgaccacacaaactcgcttaatgcctcgctgtttatcgatacacaccgtatgggcgatattgcccccttaaaggacggcgcgtttatacttgtaaacggttcttatgaatttgataattacaaaaaggattttgttgtaaagccgcgcgctatggcgcttttgcagaaatacaccgaaaaggacgagcatgagggcgaaaagcgcgttgagctgcactgccacaccaatatgtccgcaaaggacgcggtttcctctgccgacgcgattgtaaggcaagcctacgaatgggggcacaaggcgatagccattaccgaccacggcgttgttcaggcataccccgccgccgcgggcgcggttaaggcaatacgcaaagcgggcggcgatttcaaggttatttacggcgttgagtcttactttgtggacgacgttaataacgacgtaaaggatttaaatgcaaagcaaacggcgaaattccgatatcaccagattatacttgttaaaaacctcacggggcttaaaaacctttataaattagtgtccgaggcgcatttgcacgattttcgcggcaagccgctcacaatgcgcagtaaacttgataagctgcgcgaggggcttattttgggcagcgcctgcgagcagggcgagctgtaccgtgcgataatcgatgaaaagcccgaggaagagcttttaagaattgccgattactacgattatcttgaaattcagcccctcggcaacaacgcgtttatggtgcgcgagtcgtcataccccgataaaaaggataagaagacgggagcggttatacccaaccgctttaaaaaggttaccgattttgaggttataaagaattttaaccgcaaggttgttgaattggcggataagctgggcaagcccgttgtagccacgggggacgtgcattttcttaaaaagagcgatgatataatccgtaaaatacttatggcggggcagggctttgaagattttgacaatcaggcgccgctgtaccttaaaacgaccgacgaaatgcttgctgatttcgattatttcggtgagcgcgcacgcgaatttgtaatcgataacccgaataaaattgcagatatggtagacggcgatgttatccctgtgcccgacggaaactatccgcctgtaattgaggggtcggacgagctgctgcacgatatctgctgggataccgcccataaaacctacggtgaaaatctgcccgaggtggttgaaaaacgccttgaaaaggagcttaactccattatcaacaacgggttttctataatgtatatttcggcgcaaaagcttgtggcatacagcgaggaaaacggctatttggtaggctcgcgtggttcggtaggttcttcctttgccgctaccatggcgggtatttccgaggttaatccgctgccgccgcactatgtttgccccgagtgccggtacagcgagtttttcctaaagggcgaggtaggctcaggctttgacctgcccgaaaaaaagtgcccgaaatgcggcgcgcagcttaaccgcaacgggcacgatattccgtttgaaacatttttgggctttaagggcgataaggtgcccgatattgaccttaacttttcggatgaatttcaaaactcggtacagaaatacacagaaacgctgttcggcagtgaaaacgtgtttaaggcgggcaccatttcaacggttgccgaaaaaaccgcctacggctttgcaaaggcatacgccgagaaaaagggcataaccttaagcaacgcggaattaaaccgccttgcatcgcttgtggaaaaggcgcagataaagcagaccacgggtcagcacccggcgggtatgataattgtgcctaaaaccaacacaatttacgatttctgccccatacagcacccggcggacgacgttaattccgatattataaccacgcatttcgacttccactcaattcacgatacaatattaaagcttgacgaattgggccatgttgtgcctactacatataaatatcttgaagagtataccggtataccagtaaacgatgtttcgatgagcgaccccgaggtttacagcctgtttacctcaaccaaggcgctcggcgttgagcctgacgaaatagattcaagaaccggcacctactgcctgcccgagttcggcacaaaatttgtgcgcgaaatgcttatcgactgccagcctaagaacttttccgatttattgcagatttcgggtctttcccacggtacggatgtatggctcggcaacgcaaaggaccttattgataacggcatctgcacgatttccgaggttataggaacgcgcgataacataatggtgtacctgattcataaggggcttgaagagggaagagcctttaaaataaccgagaccgtgcgtaaaggtcttgtggcaaagggcaaggtttcggcagaggactggagtgctatggaggacgacatgcgctcgcacggcgtacccgaatggtacattgaaagctgccacaaaataaagtatatgttccctaaggctcacgcggcggcatatgttatttcggcgctgcgccttgcatggtataaggtgcaccgcccgcttgaattttactgtgcttactttaccgcccgccccgaggatgtggacgtgcccaccataatgcagggtaagcaggcggtaaggcagtatttgcagaatattaaggcaaagggcaaggaagccagcaaaaaagagcttgacgtttacaataatatgcttatattcaacgagatgatgtcccgcggaatagaagttttgcctattgatataaagcattcgcacgctatgaaatatctgcctgaaaacggaaagatgagactgcccttcggcgcgctttcgggcgtgggcgaaaaggcggcatactcaatttatgaggcggcgcaaaagggcgactttgtatcgcgcgaggatttccagattgaggcgggagtttcgaaaaccattattcagaacctgtcggagcttggcgctatgaacgatctgcccgatacaaaccaaatttccatgttttaaaaagaggatgtaaatgttaaaaaaggcttttaaagccgcattccctatgacgattcctattttggcgggctttctgtttttgggcttttcctacggcgtatatatgaatgtttcgaggttcggatttgtttaccccatggttatgagcgcggttatctacggcggctctttggaatttttaaccgcttcaatgctgctgtctccctttgcgccgtttcaggtgtttgctgtaagcctgatgattcaggcagggcatctgttttacggcatttcaatgctcgaaaaattcaaaggtaccgggcttaaaaagctctaccttatttaatgcctgctgaacaattcaaaagtaccttaaccgagcatgtcggtataaacttttgaattgttctggtgcaaggtttttgcgcaattttgcgaaaaaatcttgcactttaaaaagaatcacattttgattctttttaaaatcaggcgacaatcaatggatactgacggtcaaaacaaaggttttgacccataaaatcgagattttaactcgattttatataattgcatttgctaatgcaattattcagtagacattatttacggcatgtgtgatgaaaccttttcggtaaattatgtggcagatgtgcctgcgggtgttgaccgcggccggtttatgtttttcgtaacgctgcttgatcagttctattgggtggcgggcgcaacgctcggcgggctttgcggctcgcttataacctttaatacaaagggacttgactttgttatgacagcgcttttgccgtgatatttttggacagacttatgtcggaaaaaagcattatacggctgttatcggcgttctttcggcgcttctctgccgtataatatttggcgcggaatcattcatgctgcccaccatgggacttatacttttgctgctcacggcgttcaaacaaccgcttgaagggtcgggtggtcttgaatgactgtgaccgaacagattataacccttgcgctttgcgcgcttgctaccatgctgaccaggtttttgccgtttctgctcttctcgggaaaaaggaaaacaccggaatatataacctatctcggcaaggcgctgtctgcggcgattttcggtatgctggtggtttactgccttaaaagtgtggatattgcgggcggcagccacggactgcccgagcttatatcgcttgctgtgctgacggcgattcatctgtggcgtaaaaatatgcttttgtcaatagccgcaggcactgtgtgctatatgctgctcgtacagtttgtttttgtttaaaaataaaaataatgttatggtacaatagataggtaacaaaaaaagaagaaaattcatctcaaatatggtatgatgttaataacgacaaaaacaaagtaccataagaggtgaattttctatgacaagtataacatcaaaa

SEQ ID NO: 218 - DNA, 2769 bp, Unknown
  16S sequences of unknown bacteria
cagtcggtcgtcgggaaaaacagcttttccgaggcggcggaagaaaatttcatttctcagtcggccgtttcccagcagattcaggcgctggagcgggaattgggctttaagcttttggaacgtaaaaaccgcggatttactctgacgccggcgggagaatatttctatcaaaaaagtctgattttgactgcggattacgagaaaatgtgcagcgcggccgcaaaaattgccaagggcgatcaggccacccttaaaatcgggtatctgcgcagctattcgggaaatgaatttcaccgtgcgctggcgctgttttcggagaaatatcccgatgttgccgtttcggtggaatacggaaatcacgaggagctgtatgccatgctccgctcggaacaggccgacatcattcttaatgatcaacggagagcttttcggaagaatatgtcaatctccttttgaccgtctgccgcagcttcatcgaggtttccgctcacagtccgcttgcccgggcaaaatgtgtttcgccgtccgagcttaaggatattccctgcattttggtggcctgtgaggctcagcggaaaacggagagggaatattatcacgatgtggtgggatttcccggcgagtttctgtatgccgaaaatttggaggaagcacgtctcatggtcatcgggcataagggctttcttcccgtggagggggccgacgtaccgactgcggaaccttctgttgtgcgcattccgctgatgagaggaaacgagccgatacgcaaaaattactgcgccttttggaaaaaggacaactcgggctactatgtggaagaaattgcccggctgctcaaagcgcagtttgaaaaataaaaaacggagtccgattttcgggaaagagggcgtgatttgatggaaatacgcaaagcgacaaaaaatgacatagattgtataacaaaaatatatgacggcatacatgacggggaagaaaaggggaaaaccgtaatcgggtggattcgcggcgtataccccaccgtaaaaaccgctcaagaggcgctggcacgaagggatttgtttgttatggaggatgaaggcgaaattgttgcgtcggcggttatcaatcaaattcaggtggacgcatataagcaggcgccttggaaacatgccgcaaaggacaatgaagtcatggtgctgcattgcctgacggtggacccgtgccgaaacggtaagggctatggcaaggcgtttgtggcattttatgaagaatatgcaaggaggcataattgttttgcgcttcgtatggatacaaatgcgcgaaacacaagagcaagagaaatgtaccgaaagctggggtacgaagaaatcggtattgtaacgtgcgtatttaacggtataccgaacgtgcggcttgtatgccttgaaaaaagcctgaaacgagtatcgctttgatttaaaaccttatatcggtgctgaaagggagacgtttttgcgtctccttttttcgtatcagtttttcttatttgaaagtctgcaaagtaaaattgattgccctgccgttagttgttaaaatataaatgaccgataaacaagtacggtttataaaaatacccgcctgagtttcggtcggcgcaagggagaaaactccttcggtcggcgcaagggacgtgggagtgattttcggcatcggtatttggcatatcggcatcgtttttcaacaggctaaagccgcgaaaggagatttaacatggcaaccttaattgctttttactcccgtgcgggagaaaattattttggcggagtttatcgccgagtttcggtcggaaacaccgaaaaagccgccgaaatactcgccgaaatgaccgaaggcgagctttacaaaatagaacaggcgcagccctattccgacgattatgacacctgcaccgccgaggcaaaagccgatttgcggaaaaatgcccgcccggaggtgccgaccttgcccgacaatttggacggatacgatgaaatatacctcggctatccgaactattggggcacaatgccgatggcggtctatacatttcttgaacactatgactttagcggaaagaccgttcaccctttttgtacccatgagggcagcggactttccaacaccgagagcgacatacgaaaggcggctcccggtgctgtcgttaccaagggtcttgccattcgcggcagcgatgtcaacggtgcaagggaagcaatctcgaaatgggtacaggaggcaggaaaatgaaaaaacttttgattgtttattatacatggtcagcccgcattgcaaggaaactgcaaagcgttgcgggcggcgagcttttgcaaatcgacaccgccgtaccgtatgcaggaagttacgatgatgtggtaaaccgcggacaggacgaggtgcggcgcggttatgaaccgatgctgaaaccgattgacgtgaacatggcaagctacgatgtgatagccgtcggaactcccacatggtggtataccatggtgcccgccgttttgacctttttgcacggtcacgactttaccggaaaaaccgtcgttccctttatgaccaacggaggttggcccggccatgttatcaaggatatgaaaaacgcctgccgaggcgcggattttgcctgcgatatgcaggttcggtttgattcaagcggtggcgaccgtttggaaacctcggaaaaagaaaaatgaccgaaagcggagaataaaccctgctttcggtcaaaattttggtcggagtgaagggactcgaacccccggcatcctg

SEQ ID NO: 219 - DNA, 8085 bp, Unknown
  16S sequences of unknown bacteria
gcgcggacgggagctatatcgtggcgtccgagagctgcgcgctggcggcggtcggcgcgaagtttgtccgcgacatcgagccgggcgagattgtggtgttcggcaccgagggggtgcgctcgatacgcacgcactgcgggaagaagccgcacgcgctgtgtctgttcgagtatatttatttcgcgcgttccgattcggtgatcgacggcgtgtcggttcaggaggcgcatttcagggcgggagagttcctcgcgaaggagcatccggtcgacgcggatatcgtcatcggcgtgccggattcggggcttgacgcggcgctcggctattcgagggcgtctggcatcccctacggcatcggtttcgtcaagaacaagtacataggcagaaccttcatttcccccggtcagtcggagcgggaggacaaggtgcgcataaagctgaacccgatcgagggcgcgataaagggaaagcgcgtgattctcgtggacgactcgattgtccgcggcacgacctgcgggcatatagtgaatctggtccgcgaggcgggcgcgaaggaggtgcatatgcgcatctcttccccgcccttcgtcgacccgtgctattacgggacggatattgactcgcgggagaacctgatcgcctgccaccacacggtcgacgagatcgcgcggataatcggcgcggacacgctcggctatctctctctcgagcacgcgtatcagctcgccgaggttgagggctgtccgcttcatacgcactgcgcggcgtgcttcggcggcggttacccgaccgaggttccgaaggatatgggcaaggacaggttcgagaatccgatttctttcaaataaccgggaacttttctgtctgctttccgtctaagaggtacagaataattacggaaggcaggtaatcactatgaatatcccgaaaaccattatcaccgcgctcctgacattgtcgctgacatcatgctcgtctgtcccgacggcgcttgtttcggtcgtcccgccggagaagctggtcgacgagaagacgcttgagctgtgcgaggaaggattcatatccgacgccttcgacgaggcgtacgacgacttcaccgggcgcacatcggagaaagttctgatgaaggacggaaacgtctgctattcgcctttgtcgctctggtacgcgctcgctctggcgtcggagggcgcgtcgggtgagacaaaaaccgagatcgactcgctcctgaccggcggacgtgagatcgcggagaccgacccggcgaacctgaggctgcggctcgcggcactgctcgggaactacgagtacacgacgctcggcatcgcgaattcggtctggtctgtgtccgggctgaaggagagctacgcgaagagcgcggctgaaaagtacttctccgagtgctacaatgtccccgcgttcaactccgacaccgcgaagagtatgtccgactgggtgtccgacaagacaaagggaacgctgaaaccggacttcgaattcggaaagggagacctcccggagatgatagcgatcctgaacacagtctattttggggacgagtggacggacaagttcgagaagtcgaacaacaccgacgacgttttccattccccggacggcgacataacggcgacatatatgcaccgcggcaatcagggcggctggacgaccggcgacggctgggtgaaggcgtctctcggtctgaagggcagctcgatgtccttcgtcctcccgaccggagagaagaccatccgcgagctgcttgaggagaacggactcgacactctgctgaacggcggcgaggggcacagcggagacataacatggagtctgccgaagttcagctatgacaccgaccttgatttcggggagacgctgagatcgctcggctgtgagaaaatgttttcgaatgacgcggagtttcaggacatgatggatgtcgccccgctctatatctcgtcggtcaagggcggtacgcacatagcggtcgacgagaagggcgtgacagcctccgcctacacggcgataatatactgcggagcgatggcgccgtccgagaagctcgacatgaggctcgacagaccgttcctgtggacaataaccgttggcggcacggtgcttttcgtcggtatcgtcagcaatcccgccgcgtgaaacttttttatgaattcttgacgtatcgtcttgattcgccgcttttcgtgatgtataatagaggtatcacgacacgataatgaaaagggctgccgtgcggcggctcttttttgaggagatttttatgaagaccccgaaacagatattcatatgctcgtcctgcggctacagaaccgtgaaatggtacggaaaatgcccgtcctgcggcgcgtggaacacgatggaggagggcgagccggagcaggaatccgaggacacgagaaaaataaagcgcttcgcgccggagaccgagagcgaggtcgtctccttcgaggacatggagctcccgacctacataagacaggcgaccggaatgggagagcttgaccgcgtgctcggcggcggtcttgtccagggttcggcggtgctcctggcgggcgagccgggaatcggcaaatcgaccctgcttctccagatttcggcggcgctgtcacagggcaccgcggatatctcgaccggagagattttcgagaggaaggtcctctatgtctccggagaggaatcgcagggacagctgaagctccgcgcgaagcgcctcggcatacacagcaggaatctctatgtcctgaccgagacgaacgtcgcccggatcctcagacagaccgagaagctgaagccggacgtgatgataatagactctatccagacaatgtacgacgagcacgtggcgtccgcgcccggaagcgtgacgcaggtgcgcgagtcggctctggcaataatctccgaggcgaagctctccggcttctcggtcataatggtcgggcacgtcaacaaggagggcggcatcgccggtccgaagatactcgagcacatggtcgacgcggtgctgtccttcgagggcgagaagctccgcgcgtacaggataatccgcgcggtcaagaatcgtttcggctcggtcagcgagatcggtatgttcgagatgggcgacgaggggcttatcgaggtcgcgaacccgtcggaggcgcttctcgagggcagaccgctcggcgtctcgggcagctgcgcgatgtgcgtgatggagggaacccgcccgataatcgcggaggtgcaggcgctcgtcgcctcgacgaactaccccgccccgcgccggacgtcgaacggcgtcgattacaaccgtatgtgcctgattttagcggtgctcgagaagcgcctcggctacaggttctcggtcaacgacgtttatcttaacgtgataggcggactgaaggcagacgagccggcggcggatctcgccgtcgcgaccgcgcttatttcctcgataaaggacgagccggtggcgagcgacctcatcgcgatcggcgaaataggtctcgcgggagaggtcagagccgtccagcactgcgcccagagggtgaaggaggcgatccgtctcggcttccgccgcgtgataatcccgcagaagaactacgacgagaagatgaacgctcccggggtgacgataatcccggtaaagagcatatttgaccagatccaggggccagcccctggacccgaaagtcaaggattctgacatcgtcggatgaagctcctgccacatcaaacatagagcgtcgcggtacggcgtctgagcgttgtaccgcgatgatttttatgtcactgttgcacaaaaaagtatcggttgtattgtcggaaaggctgaattttaattattgtcttgacttgcgcggaataatgtgttatacttatactgttaatattcacggtatgtgcaaccacagttcacaaaaaggagttcatattcacaatggcaagaacgagacacatttcaatggcgctttctctcatcattctctcgcagctgttattctcctgcgggacatctccggccggacccggcaatgataccgagacacagagcggcgaaacttccaccgaagaatcgaccacatccgccgagataccggacgaccttccggaagccgattatgagggaaaaaccttcacgacgatcacattcgaccagttactccccgattacgaggcggaaaccgaaaacggcgacgtgatcaacgacgcggtctacgcgcgcaaccgcaacgtatccgagcggttcaacgtgaagattgagacaatgtcgaacgcctcttatgaagatacgacaaacttcatcaagaagacgaccctggcgggagaagaggcgttccagctgatcgcgcaacacgcggtgtcgatgggaacgctggcgatggacggtctgttcatgaactggtatgatattccctatattgacttctcgaagccgtggtggtcgaagtccacgactgaggatcttacatatggcggggattacgcgcttttagcggtcggagactacgctctgtccgctctggcgggggcttactgttatttctatgacaagcccggcgcggaggactatcagcttgaggatctctacaaggtcgtcggagagggcagatggacgattgactatctgatgaacaccgtaaaggacgtctacaaggatctcgacggaaacggcgagagggacggaaacgactattacggtctctcgcagacgcttctgtctgcactgaacacctatctctggtcgagcggcggaaagatattcgagcttgataagagcggtattccgacgctcgtctacaagaacgagaagcttaacacgataatcgacaagatctacgcgctctgctatgagaacgagggagtctgcacgaagcgtccgcagtatccgtcggatatgcagcatttcgcgtccgcgctcgcgttcagggacaatctgtcgctcttcatttccggaacgctcgacatgaccgtcaactatttccgtgagcgctcgagtgaatacggcatacttccctatccgaagcttgacgagaagcaggcggaatacaagacgatggtcgacggctatcacgcgatactcgcggtgccgaagacggtgcaggatccggagttcgtcggaattataaccgaggcgctgaacgcggagagcatgagggaggtctacccggcgtactacgagatcgcgctgaagaagaagtattcgtatgacgacgagtcggtaaaggtgctcgacatggtggtcgataaccgcgtgttcgatttcggttatgtgtatgacggctggaagggcatgagcttctatatccagtatctcataggcgaccagaagtcgaaggatttcgaatcctactacgcgaagaagggccccgcgtccgagaagtattatgataagctcgtgaactattttgaggaagcgagaaacgaaggctgacaatatccgccggttttccgtcagacggaagaccggcggttttccggtttttttgccggaatttccgcggaatcgcgtttacctctttacaagacacggaaagtgtgatataatatatgtagaatgaagcatccgtaaaggagttgagcgaatgatcgagttcaagggtgaggatttcttcggcagcggcgtcgacctgttcgtgaacaagcatataaaggagcttgattacaacgataaggtcgggcggcacacgcatgatttcgctgagattgcctatgtctattccggcagcgggaagaatatcgcgggcgggaggtcgtatccgatctcgcgcggttcgctcatcttcatgaattacggcgagagccatcagatagtcgttgaggagacgctggtacagatagatatccttctgtcgccgcgcttcatctcgcgggagattgtgtcctgcgacaattttctggacattctgaccctttcggagtactcggagctgcgcgagttcacggactcgaagataccgtgcatgagcctttcggggcgggagatgatcttcgtcgagtcggtgttcgaccggatagcggaagagttcgacgcgaaggaggtcggatgggagtcggtgatacgcgggtgtcttcaggttgtgatatcgatcatgatacgtcgcctcggcggctcgacgtccggagagccgcacgacccgcggattccgcgcgagatactggagttcattgaccgtaactacaacgagcggctgaccgccgatatgctgtccgagaagtgcttctataacccggcgtatttcggtcggatgttccgcgagtgctacgggatgtccttcaaggattacataaagaagaggcggataaacgaggcggtgaggctcctcaccggaaccgagctgccgatcgacgagatcagccggaaggtcggctacacgaaccgtacggatttctaccgcgtcttcgcggagcagacgtcgcgcacgcccgccgaggtgcggcagaacccggagagtgttgatccctcgaccttcatggtcttcccggaaccggaaaaaacgtcgggaacgacggacggtccggatctcagtacaaggattgacgggacgaaaccattcagaaagaaatagaaaaagaggttgtcattttacgatgtgacaacctcttttgtttgtaatattgtaaccaaaggagcgggcgtccaatggacgcccctacgggattgtgccccaatccattgtttcaacgcattctacgcttgtaggggcgaccattggtcgcccgccttcaaattacggattacgtgcaaatcaaaatcccgcgaaaaccggtttatctgctccgtagctcaatcctgacgttcccgtcgtcctcaatgacgaggtgcatcggcttgatgtatttctgatagaactgcttctcctcggcgcttgtcattctgacgcgggtgctgcggtagacctcgtccagcatgacgttgacattgaggttgaccttcgcggcgatgtatttcttgatttcgccgatgagcgccgccatcttgatgtccccggagttgccggtgcagaaatcgtcgatgtagcagtagaatatctccctgctcgagagcgcctgcttgatgtcgaagctggactttcctctctcgagcataacgaggaacctcgcgtccggcagggattcgatgagtccccagtagtccgagtcgctcgagacgagcatgaacgagtcgacgccgttcgcgaagaactcgcggcagacgccggtcgacagacggatatcgacgagcgatttgttgtccttgacccgctcggtcatgatgtgttcgacctcgattcccttcgcgtagtttgtgagcagcccccacgcggtcgacgcgtgaacgtcgttgtagaggatgatttttgagatcttcgcgatttcgtcggtgtcgaggttgttgagcgtcgcggtgagcttatacgggtcggagttctcgcagtcgacgacgaggacgacctttttcgcgtcggcgacgaaatcgtatatggagttcttgattttctcgccggcatcggtgaccttcgagaggtcggtgaaattgtcgtggtgctgtttgtagaggagcgtcacgaattttttgtcgttcagaaggatgtttccctgatcaggctcaaccttccagtttatgtaggactgatatggatagttcatccggtttgagtaatacgcctcggcggcggctctggttccctcctgagtcctgccgttcggcatcacgaagaggtcgcgcacatactgccagttgagccatatcggaaataatttagaacaattgtttattctgtcgctgatatatccgttgatatcaataacatactcatagagcatccggttcgacccgcggacgatgtttattccgacgccggagagatacattatggcgtcggtcggaacgtactgcgggagattcattatagtcttgtattcaaagcgcatagcgcggtttatcggaccgaagtatctttcgatagcgcatctgatgcggcagagctcgcggattatcttagcgtcgcggttcctttcgagcacgtcgaaggcttccgggtcgccaagggcgaagtcgcggtcgaagagttctcttctgacacctatgagataaccgatattagt

SEQ ID NO: 220 - DNA, 4817 bp, Unknown
  16S sequences of unknown bacteria
cgagtgcgcgtcgtgcgacagcacctcatacgcgcccgacatattgtgaacctcataatccttttgcgtcagccagcatccgtctgcgaatttcatgatccttatcctttcattacgatacttaggagactattctctgaggatatgataacacatcgggaagggattgtcaatatcgggagaaaagtttacaaaaacacgccgccggttctgtacctggcggcgtattccgcatgatttcttcaggcgtcaattctcagtaacgctcgcgacgaacttgtctattgcgcccctgtaattttcaacttttcccgcgaacattgacgcgatgtctgtcgagtttttctcacagagcgacctcagatcagtgctgaagcttgtcatataaaacgccggatcgaacacctgatgctcaaagatatagtcgagcatatcgagtgattcctcatctctcacgtactttccgcgcagcgtggattcatagtaagccggtctcacatacaggtgcgactgatacgccatatcctcgagtatctttccggtcatctcaaggtttgtgttcgtcacgggtatctgcacggcagaaccgtagtagccatgaatgaatgtcgcatacttctcctgctgatcgtccgccttcggcagaggaatcagtccgaaatccatctccatatctctcaaaagggaaataaaaaccgaagtctcaacataaaacagaattcttccttccttgaaagaattccatggaagcgtctgtctctgcgacttgtactgtttcttgtccgcgaacagcgtgaccgtctcatcgttcagtatctggatggcctttgtgaagctgtcgatgaatgactcggaaatagtgttgatctccgggatatcatccttgttttttttagaaatactgtaatccgaaccgaacaggaagcagtcggagccgtagagattacaagcaaatccatatctgtcgttctcgtcgagctctccgtctccatcaagatccgcggatattccgcgggacatcgacgcgaatttatctatagtccattccccgcttttgacaagatcatacgggctctcgagcgaaagatcggatactatcttcttgttgaacatcattaccgccatgttatcaagagacagaagattgatatcactgaccgcaagataatttttgccggcgattgagcctccggaaaccgagtcctgattccaccacgggttcgagaggtcgacatatggaacgtcgttcaggtcaagcagatatcccttgcctgctgacgcatatgaattaccgatgcctccgagcgcgacatcataggaatcgtctccggaatttactaccttgcttatcgaatccgcgacgttcgcttcaactacctcgaattttatgttgtacttgtcctcaatgatcacgttgcgcctgaaaactgaatcgttcaggatatcgccgttttcctcggtgacgtttatctctctcagacgattgttgacctcgttcggttccacaacgaggaacgttatctcaatcccgccgaaatcctccgcctcgagttccggaaactcagttcctacactctcggtgtcgcttgtcgttccgttgccgtcctgcttgccagtgttcccggattctccggtctgctcacaggagaagaactgcacagcgcaaagaacagccagcaggagcgccgtcaacatcaccgcccgcttcattttatcgccccgtacgccttgatgacgacacgcttcagctccgctttttccgaaaccggcttcccggcgagtatgtcgtcctcgttcagcgtcgcgacgagtatctccttgtcgctgtatctgtgataatcatacacaatatgcagatacccgtccgccgtctcggtcacgtccggatacgacacatcgtttctctcgtcgagcagtattccctcattccacgtgtgcccgtcgtcctccgagagcatcgcggtcaggttgttcctgcccttgaagtttttgtggttgacgagaagcagtctgccgcttctcagccgtctcacgcagaagcgcgagttcggtccgccgagccccgaatcatgcccggtcgaccaagtgacgccgccgtcggtcgatacgctctcgccgatgccatagttcgtgcgcaccagcataacgagcgttccgtcctccctctcgtagagcatatgctcgtcgataaggcgatccgggcagtcgcagtgacctatgcacctgtaagtcttcccgccgtccgtcgagcggtagacgtttgagaacctctcatccggaatgaagttcagttcagagttgcacgctgcccagatagcgcacgggagcagccagtcgccgtttttcagcgctatcggcttgttcatcatgacgccgttcgcgattctctccggcgccgagaacctcacctcgtccgcgtccggattgtcgcagaccgcgcaccagacgccgatccttccgtcgaaccacgtgctgctctgcgcccagaacagcctgagcttcccgtccggcgacatccagaggcacgggtcgaagcaccgcgtgttctcagccggcggtacaaccgccatgaacgcctttccgaagttctttccgtcggcgctcttgtagatgagcaggaagtttccgttgccctcgtcctccatgccggtgtagaatgtgatgaaaaatctgccgccgggcgtcgactctatgcccgggataccctggaattttctcgcctcgtcggcgtatatgccgttcgggtcgtgaagtatcgtctcgtcgtaaatatagcttgcgggaagcagcgaattgtccttatcggtggtatttactgccatgatagtcttcctttcgtaaacacagaaatcagtatcgttctccggaacccttccgagttccttcgccgtccgcataaccatacgtgaaagccgcatcacctcgtcgccacccggagcctcagccgacctcgcccgcatctcgagcgaaaccgccatctccgcgccatcgagctgccggtaaggagccgccagcgcccacgtgaacgcgctgttctcgaactcctccaccgcgaatccccgcctccggacaacggcaagctcatcggtcagactgaaccacgtgacaatagagttcgccgtatgcgcggtatagcatcctgtaccgacgctgagtccgaccgactcgtcatccgacattgagagcaccgcctttccgggcgccgtcaggtgcatctcacgagtctctccgaccttcggcgcaaagcgcttcatcttctcgtccgccgatacagccatgcacaggaccattccggaatccctgcgccagattgacgccgagagccccgaatccaaatgcaatcccgttatgacagccctctcagccgcgccgacaccgacactccggaacatcatcgccgcgagcagctgtgaacgccttccgatgacatacccgccgccggacgtctcaacgcatcccatgtcgagaagcgtggaaagacaatcgtgcatactgcttttcgggattccgagcgcgcgcgcaagctcactcaccccgaccggtctcccggatctcgagagatattcgagtatcatgatcgacctttccacagacctgttcataaaaagcgctcccaactgtccgtcgttcggtattccgaacgctttccgtattttttatgcaaggaattataccaccgaatacatcaaatgtcaattggaagttattacaatattacacattctattttgtgcataccgcacaatcacggttacccggctcactccaacgttccaaacgcgtcgttaagcgtcccgagcttcttttcgaccttattctgaaccttcgtcagcgtcgacacgatatctcggttatctttcgcgaacgcctgacgcatcacgccatcgcggaactcctcgcagagtatcgtgtctccgtagtcaaagaccctgttctcatacgctatatcgagcatctttgacgattcctcgtcgcgcgtgaacttgaccttcagtgcgacctcataatacgccgggataacgatcttcctcgattcacacgccatagcctcgagtatcacggaggtcatttccggatcggtgttcgtcagcggaactccgaaaagctcgcagccctcgatgcgcgaataatatttatcctgagtctcgtcatatttcggatacggaatgataccgaagtcggtcgccgcgtcgcgggtcagggatatctggaagcaggaactgtcggtaaagagcgcctttccgtcgcagaacatctgcatctcctcctcgcggtcgaccgtaatcggcacacggtgccagatattgtcgttccatgtgatctcgaaaaccttctggcagacatctatgaatttctgatcggtgggagcggtgtaaaccagctgaccgtcgtccttcttcatggataatgctccgccggcgatccagaagcccggaagcacctgcttcccgagcgacgtatagccgtactgatcattttcatccatgacagagtcgccgttgacatccgagaccgccgcgcgcgacatctcgccgaaccgatcaaacgtccactttccgtcgagcacggtcgaatagatatccccgagattcagatcgtcgatcatcttcttgttgaacagaagcacatgagtgaagtcaaacgccgagatattgaaatcgccaaccgcgaaatagtgcgcgtttccgatagagagattgtcatagagctggctgttccagtacggcttttcggtgtttatcgccgtcaggtcgtctattttatagaaatacccttccgacgcgtaattgaacatatgcacacagcgcccgacataa

SEQ ID NO: 221 - DNA, 2221 bp, Unknown
  16S sequences of unknown bacteria
gtatgacacggttcagcccacaggaatgggaatggttgagataccagtggagcttgccaaagccatttgtctgcatataaaaagtattagcaaaagtgttagcaacggcaaaaaacatatccgcaagagttattgatatgctataatgaccttgttaaacgtatgtattttgctgttatcacacggaaaggagttattattactcgtgataagtgatacatcaaatacagaaactcccaaaaaggagaaaaagacatatacagtagaggaaattgcagaacaattatgtgtgagtaaaaaagtagcttacgcattggttaaaagtggacagttcgcttatgttcgtgctggtagagccatacgggtatctaaagattctttcgataaatggttaaatcaaaattaactgttaaggagagaatatattatggcttcaatcaaaaaaagaaaatcaacattttccgttatttactggtatttagacaatgcaggagaacgtaaacagaaatgggatacgttagagacaaagaaagaagcaaagcagagaaaagcatttgttgaatattatcaagaaaaatatggatatgtgattgttcctttagaggaacagtttgcacgccaaattgatgaatcgaaaaaagaacttgatagtaccgatgaagatattacgctttgtgactttttaaaaatatttgtcaatctctatggtacgtcaaaatggtcgcctagtacatttagtagcaaggtcggtactatcgaaaattacatcaatccacttatcggggattggaagttaaatgagattaccacaaagaaattatctgcctactacaacgatttattgagtgttccagaagtacccagagctaacagaaaagctactggacgttgcgtacaacctgccaatatcaagaaaatacacgacattatacgctgtgcattaaatcaagcaatccgttgggaatatattgataccaacaagcgtaaccctgcttcattagcaacgcttcctaaagttcctaaggtaaaaagaaaagtatggagtgtagatacattccgtgaagcaattcagcagtcagacgacgatttattaaccatctgtatgcatttggcgttttcctgctcaatgcgtattggagaaattacaggtcttacatgggaagatgtgattattgatgaacaatccattgcaacgaataacgcaagggtaatcatcaacaaagagctttccagagtaaatgcacaagctatgcagaaattaaaggaaaaagatattatcaagatttttccgacacaaaagccacattgcacaacaaggcttgtattaaagacaccaaagacagaaacaagtaatcgtaccgtatggttgccaaagacagttgcagaattgctggtgcaatatcaaaaagaccaaaaggaattacaggaatttctaggagacgcttataacaattacaaccttgttatagctttggaaaatggaaatcccgttgaaagtagaattgtgagagacagatttcaaaagttatgcgaacaaaatggctatgaacaagttgttttccacagtctgcgtcatttatccacaggatacaaattgaaaatgaccaacggcgatgtaaaatcggtacaaggcgatacaggtcatgcagaagcagaaatggttacagacgtttattcagaaatcatagacgaagatagacgttataatgctcaaaagatggacgaacaattttattccactctaaaccatgattcagaaatgcaaccacaaaatgaggaagttcagccagaaaacaacggcttatcagacagtgatatggagcttttacagcttttaaaatcacttacgccggagatgaaagcaatgcttttgaaacaatcagcttcaaagtaatttttcaaaagtgttagcaaatcttcaaaaatctgctgatattttttcaaaataaaaaaagtgttagcaaactcttctactcaaacagtcataaaaatatcgaattacaaattctgaaaatcaaaagaaattgcaaaatataaattgaatatgttcttatccgacaggttataagccaaaaacaaaagaagctgaaaacctcgataaatcaaggctttcagcgttgtttgctggcgtcccagacaggaatcgaacctgcgacgtttcgcttaggaggcgaaccctctatcctactgaggtactgagacgtatttaattttcatggag

SEQ ID NO: 222 - DNA, 3864 bp, Unknown
  16S sequences of unknown bacteria
cccagccactccagcgccagcgcgcagagcgtggcaaacaggtcggcagcatcaaagccatggcccagcaccagccaatagaacagctcgctcaaaacgcccaagacaaacaccccgcccagcacggcgcaaaggacggcggaagaaggggaacggcggcagagcaagcgatggcccagcatcagcaggcaggccgccagaaacgcgcaggcgatgttgggcccggcgttggtgaaaacgcgcagcgccgccggcaggggcctagtgcgcagcgccgctaccgcgccccaaagcaagccgcccaacacgccgaaagccagcgcgcctttttcccttcgagataggtgcatggccgcctcctttttccctcagcgccaaaatgcgctgaaaaaatacagccataggccgaaataggcggcgcataaaaagctgacgccccagacaaagcgccgctttgccaccttatggcaaaatacgatcatgccaagatacatcccaaaacagccgcctatcaaacagatcagccacaaatcgcgctccggtatgcgccgcacgccgcgctttttatgctttacggcccgggccttgtccacaccgcacagcaaaaatccgtatagattgatagcaacggcataatacagcagccaatccggcatgggcagccctcctttgggtatgatagttacagggtattgtacccaaaacaggcggattttgcaaaatatgacacgtttgtcataattgcgccggggcgttgcaaaaccgcccaaacttgcgtacaatagggcggaaggagttaaggatggaacaacagaaaccttttatcaaatatgtgcccaacctgctgacggtgtttcgcttgctgctggtgccggtgttttatgttgtgttttggcggccgggttttcttttgccggaccgctttttggcatgcctggtgtttgtgacggccgtgtttaccgactggctggatggcgtgatcgccagaaaatacaacgcgtccagcaatttcggcaagctcatggatcctttggcggacaagctcatgaccatcatggcgctgttctgcttttatgtcagcggtttggtggactggctgtttctggccatcgtcatcctcaaagagctggcgatgatcgtgggcggctatgtgcttttgacctatcagatcgtggtatacagcaagatgtgcggcaaggtggcggcctgcctgttttacctggccatcgtgatgacgtttttcccgcaggtttggccgtggaacacctatgtgttgtatgcggcgctggcattgatggtgtattcattcttcttttacctgcgcgacggcatccgccagctaaagcagcgcaaaaaggaagggaagaccctaaaagggcatgaaaaaatgcaatgaaaaaacacggaaaaaaccatgcaaaaaaattgacaatccctcatcagaatgcgataattttaataaaccatgtctaccaacgcctaagcggcagtttgaattccatattttatacgtttttgtggcagggattttgtagggaagcataagaaaaaaccgccccaaagagcggtttatggcagatttttctaaaaaacgaaaatgtatactttatgcaggctgcttccttgggcaaatgtaaaagggaggtttttgtatggcaacgaggacaaagaggacgcgcctactcgcggcgctgctgtgtgctctgctggtggctctgatgctgccggcgctgccgacggttggctatgccgcatcggatacggtggtttacctttccaacagcggcgacgacgccaacgatggctccacccaggcgctggcggtaaaaacgctggacagggccttggctttggcggatggcggcaccatcatcgtgggcagccagcagaccatcaatgcggataagacgctggaaaacgcaacgttccgccgggcggagggctttacctccaccatgtttttggtaacgggcaatgccaagctgacgctgcaaaatgttacgctggatggcgcgaacgtggcaaaaagcagctatctggtacaggccagcaggggcacgacgctgaacatcggcgcaaacgctgtgctagaaaacaaccagagctctgcagtgtatgcatacggcgctacggtcaacatgacggatggtaccatccgcaacaacaaggttgaaggcgatggcggcggcatgtatctgttcaacagcacggcagtgctttccggcggcgtcatcgaaggcaaccaagcagttatcaaccagcaagaccggggcggcagcggggccggcgtgctgggatatggcagcacgaagctgaccatttccggtacgaacatccgcaacaataccggagctagagatggcggcggcgtatatatgtggaccagcgacgcctccgggcaggacgcttcgtttagcatgacgggcggcgccgttagcggcaacaaaacgccggacggctatgcgggcatctacctgagctcgtatggcagcgacatcaaggcaagcattacgggcggcacgattgccggcaacaccaaccaagacggccaagatacagcgattcagcttaccgatatgaacgaaaaatacatcgtgttggagcttggcggcacagcgaatatcaccggcgagatcctgattatggacaattatgacgtcggcccgtatatcctggttaccagcgatttgcaggtaaaagcgcccatcccggttcgcaccgtttactacaacccggacctttctgtgatccgctacgcagagggcgtcacgccggaccttaacgattttgtgcctgctgcagcgtcgcaagggattgccatcgatgggcagaacctggtttgggtgaaaaagatcaatgtaaccgcctatactatggactgggcaacgggcaaatgggtatcgcacagcggcctgtatatgatgccgggcctgccgttggatcagtccctcctgccgcaggcggccgactatcccggctacgaacgcattggctggcagatcaatgaaaacggcaagtgggtattgtttgacatggaacgcgtcctgaccatggacgacgataaaatgaggctttacgaagtctgggccctaaatgcccctacggatgtagagatcacggcggataccaccaaagcgcatcccgggcagaccatcacgctaaaggccggcgccgcgcatgagctggaaggcatggtgtacaactatgcttggtataaggacggcgtgctcctcgatgggcaaaacggggctaccttggccgtcacagagccgggcagctacaccgtaaaggttagcgcatccaacggcaagaccacctctgccgaagcggaaagcgcaccggtggaagttgcgtttggccatttcatcgacgatgtatggcagagcgacgatcacaaccattggcaggcatgcacggaatgcggcgaaaagctgaatttgggcgcgcatatcagcgatggcggtaaggtgactaccgaagccaccgaaaccacggagggcgtaaagacctatgcttgcacggtatgcggcaaggtgctcaagaccgaggcgatcccggtattggccagccccaacggcgccaacggcgtaaagactggggatttgagccagcctgtgctgtggaccgcgctgctggttttggcagcagccggcgtgggcggcacggtgctgtaccgtaaaaagaaccatgcataaggcatagcctcaatacaaaaccggccccaaagcaaggggccggtttttttgatttggccgcagccgtacatagagataaaacacacaggtggattttgcagggccgccacagcagcccctgtctcttatacacatctgacgctgccgacgagcgatctagtgtagatct

SEQ ID NO: 223 - DNA, 32759 bp, Unknown
  16S sequences of unknown bacteria
aggcgaaatcaacaggggcactaagactcgaactcaggacacgtggttttggagaccactgctctaccaactgagctatacccctgtgcgaacgatgatattatatcacgcccgcctacttttgtcaataccttttctcaaaaaaatttgattatttgacagatatttcacgcgagggattttctaagcgatgtgaatatctttttttcttccctcgatatcttcacctgcgtgagaccgagcacctccgctgtctgctgctgtgagtattccttgaaataccggagtattattatctgtctccacagcgtcgggagtgtgtttatcgtttccgtgagcgctactctttctatcattttgccgagtgtatcgtcagtcgacggaatcacgtcttcaagcgaaaaatcgtcgtctccgatggtttccgaaagtgaacgaaccgcgcttgtcgagtccattgcgtcggcagcttcctcttgagttatcccaagtctttctgcaagctcactgagacgcggctcttccccatgctcggttatatatttctccctctcatgcatcagagccgctcccgtgcgcttttttattctgctcaccttaacagtaccgtcgtcacggagaaacctccttatttcccctattatcagcggcacggcgtaggttgaaaatgcgtttcctcgcgatatgtcgaagctgcggatggcttttatcaatccgattgagcctatctgcacgagatcctcaaagtcacagcctcgtcccttgaatcggtgcgctattccgttcacgagtccgaagttgagctctattattttctcttcaaccgcagtgtctcccgcggcatatctctcgagcagcgatattgtgctgttgtatgtttcctgtgtggatttgttttgcgtcatagtattgttccgcgtttacacggatacgctcctttccggatagcagtctcaccgaacgatatcattcggcgcgctatgtattgcatccttaaacgagccttaccggaagagcggacagttttttactgatgagcacctttgttccctttccgggagatgaggtcactttcattgaatccataaaattttctataattgtaaatcccatgccgcttctttcgttttcgcggtctgttgtgaacatcggacgtcgggcaagctctatatcctcgattccgcagcctttgtcacgtacttctgctatgaattcacgtgcgtccgttatcttcatgacgagcgttatctcccccactttgtcgcggtatccgtgaacaattgcgtttgtcacagcctcggaaactgcgcattttatgtcggaaagctcatcgtatgtgggattcagttgtgacacgaatgacgcggcgacgctccttgaatacgcttcgttttgcgaaagggacgggaatgttattttcgtttgatttactatagttttagccacgttatttacctcaatatgccgctgccttttttatcggtgcggattctatcttaataagtcgttcggttccggcaaggtcgagtattcgctttatctgcggggtcggatttgctactttgaagcttatccccatctccacggcttttgtgtatctgccgagtatcaagccgagtcccgagctgtccatgaagctgacgcgggagaggtccaaaataagctcgtccgggcgctgtatgaacacctttgtgtctatccttcctctgatttcgcgtgcgttgtggtgatctatatctccgtcgaggaagacagtcagggtctttcccgatgaaatactttttactatgttttcgttgtccgtcatgttctttcctccgtttgtgtttactttattatagtacatcccccgcgtggattttgtcacaatatgtgccgcctgaacaaaaaatcatctttgtagcatctgcacataaactgcggttttgttttatgcagtttagctcaattgtcggctgaatgcgtttttcagctgtcagttgatagacttcttttgtgcggtgtgatataattcagttaagaaaaaaaacacggaggtgcgcaatgtttaatatggaatcaatcggcagaaggatagccgagctgagaaagaaagcaaacaagacccagatggagctggctgacaacatgggtattacctttcagtccatttcaaactgggagagaggaaacacaatgccggacatatcgaagctgccggagcttgccgagctgtttgacgtcacgatagacgagctgctcggaaaggaatcgaagctcatcaagaacatcatcgaagacaaagaagacggacacgccgcggacgaggaaatcagcgtaagcgaactggttgaagccgcgcctattctgaagccggaaacacttgacgagataattgagaaaaacaatttaatcgaaaaggctatggacaccgacaaaaaggaggacagtatggaatatgatgtaaccgctatacgcgagcttctgccgtttctcagcagcgacatgataaaccgatatgccgacaagtttttggataagggaatagatataagcgaactgtttcagtttatggaaaaagataagctcaccgaaatcgcgaaaaacaagattaaaaagggcaaaagtgtagacgaatacatgctgctatttatgagcaaagccgcagtcgatgaaatcgcaaaagaagaatataaaaaaggcaaaagtatcaagccttatctttccagaatgagcaaggctgcggttgatgatatcgcaaaagaggaagctgcgaaaggcatgaatatcaacgactatctgtccaaaatgagcaaggatgcaattgacgaagcagcgaaattacttctcttgaacggcaaagacatcagtgactatctgctttacatgaacaaaagtacagttgaagaaataataaaatcgcagtttgaaagcggtaaagacatcagcggttatctgttttacattaacagacaaacagtaggcgaaattgcggaatatgagcttgaaaaaggcaaggatatcaaggtatttctgtcgcacatgaaaaaagaaaaggttgacgagcttgcggaaaggatactccaaggcggcatgacttcggaagctcagactgactcggtgagctgtgaggcagcggaaaagtcggacattaatatcccccgcgacagaatcaccgaagaatatcttgactctttggacggtgaacaaattgcggaaatcatcaagaaggctctcgcgaatggtgaggatataagcgaatatgtgccgtacatggaagagtcgaatgctgacgagctggcggaggagctgctgaacaagggtgagaacattgaagaattcctgcccgctatgagtcaagacaaaataaacgagcttgctaacaaagtcgtcgaaagcggtggaaatgtcgagaagttccttgaatgcatggatggcgaacaaatcgtggatatcataaagaaggctatcgcgaagggacagaacattgacgaatatattccgtacatagatgaagctgacgctgacgagctggcggaggagctgctgaacaagggtgagagcattgaagaattcctgcctatgatgagcaacgaaaagatatttgagatagcaaagaaggctctcggaaaaggctgagccggcataacataacaaaacagcggtaccgtagctatacagtatcgctgctttttttcagtagttttccgcttttatctcgaagtatgcttttgtttttccgcagacgggacagatttcgggggcttttgttcctatcgcgacatgaccgcagtttcggcacaaccatattttgacttctccgcgcgagaacacttccccgttcttcacgttttcgataagccgacggaatctttcctcatgctcacgctcaacctccgcaacaagtctgaattttgccgcgagagacgtaaatccctcctcctccgcaaccttagcaaagcccgcgtacatatctgtccattcgtaattttctccgtcggcggcgtaattcaggttttccggcgttgtgcctatccctccgagttcccgaaaccatatctcggcgtgtctcagctcgttttccgcagtttcctcgaatatttcagccatctgctcatatccgtcgcgctttgcaatttccgcatagtatgtgtacttgcttcgagcctgtgtttctcccgcaaaagccgcttcaagattcttttcggtctgtgttccggcatattttgtgtttgactgcgcttcttcgataagctccacgttttcattccgcgcgccgcatctcggacatatcgggtcaattccgcctgccgcttcaaacacctctccgcacacattgcatttcagtttacgcataaaaattccgcctttcgatgatgtatcacgcaaattcttaaccgaaatacgcgcggatattcatcttagacggaattttagcttatgttatcttctaatccaaactgtcatttctcttgtgtcgtcgcggttgtcccacagtgcgtacggaatagccgtaatctctacgggagtttctttggtgtcgctcattctgtaaagcggtgcgtcgtcattccacggttttctcttcattgccttacccttgatgtatacagcaccctcgaaaaggctgtcgtcgcggtaggtcgtgaatgaatcaaagtcgcagattctaaggctgtcgagcacgtctccgttatcggcggattcaaggcagtaaaccacaggtccgcgggttattgctatcttgccgttgtcctcacgaaggagcggatttgcttcaataaactcgacaggcatggggagagtaagctcgagcacgtctccgtcattccagccgccgcagatataagcgtagccttttttcacttcgggatgaatctcttcgccgttcttctttattgtgtattctcttgcccatgacgggattctcacagcgaatgtgtagtcgccgccgctcagctcaaaggagatattgccgtcccaaggatagttgcccttctgaacgagcttaactgtcttgtctccaaccggaatttcagcttctccggcaacgaagaggtgggtataaactgtcgtgtcgtttgaagagtagatgtagcttccgagggatgttatcattctcgcgaggttaggcgggcagcaagcgcatccgaaccatcccggacgtttgctctggatatgaccgcacacaccggcacgcttagtttcttcttcccacatggagaggggattcgtatagaagaagtggtgtccgtcgagcgacattccgcttattgttccgttgtaaatgagtctttcaagaatatcggaatactttctgtcggcgtccatacggagcatctgcttagccatgaacgcgaacgatattgccgcgcaggtttcgttatacgccgtatcgttcgggagatgatagttgaacgagaacgcttctccgtaaacctgtgagccgacgccgcccgttatgtacatctgcttgcgtaccgtgctgtcccagagtgtttccatagcttttttgaggctttcgtcccctgtttctgcggcgagatctgctgctccggtgtagagatatcccgctctgactgcatgtccgataggctcggtctgttcgcggatgggcttatgagactggttatacgcgaggtctatgtgtctctgttctccgccgccccagaatcccttgtatccgcgtgctttcagctcttcttcaaagaagttcggctttttacctctttcgttgatgagatattcgcagagcttcagatatctttcgttctttgtggcgcggtacagcttcataagagcaagctctatctcgggatgaccggaatagccgtggagctttccttcttccgcgcctatctttgagtcgatgaggtcgatgaagcggcagactaccttcaagagcttgtcctttcccgttgcttcatagtatgctacggcggcttccgtcatgtgtcccgcgcagtaaagctcatggcagtcacagaggttcgtgaactttttgtcaggtgcgacaagctggaaatatgtgtcgagatatccgtcatcgtcctgtgccttttcaattatgtcgattagtccgtcggctgtcttttcaagctcggggtcgggagacacggtaaggctgtacgcaacggcttcaatccactttgcggcgtcgctgtcctggaatacaaatcctttgaactcaccctcttcaagtcctgccgcgattttgaagttctttacggcgtggctaggctcggtgttcgggacttcgtcgttaatggctttccactggtaggggattatctcgtttatagcgatatcctgatactttccccaaaagctgtcgctgatttttacgttcttcagcggtgcaaaattactttcgatgagattcatttgttcctccaaagcagtttttatggtgatttcattataacaaatgattagtattttagcaatagtcttttttgatttaaccacttttaccaaattatttttgcattcgcattcatttgaacgtttttttcgtcaatattacgccgattttgctttttcattgttatgttctgacaaatatgtgcggaggattttgtttaagataatacaaaattaatttcggctcttcaaaaatgatgtgtatgtattgacattctaagagttatgtgatatactgtaaacacaaaggatgaatattattttatgcttataagtacatttttcggaggcagtttttgaacaattactatcacaattacgatatatcccctaaaacaacggtttccggcggcagcggcaaggtattctgcggatacggcgaaatttctgcggagcttggcggcaggttgtcaggacatactgtgctcgtcgtggaatgctatcccggagtgaatcaggctgaattgctcgaaggattaagccgactgaatttttccgaggtaatccacagcgacgaccttgcatttgagccggaaaagctcgacgcggtgcttgaaaatgaccttacaaacgacagggttttcggtgttatgacaactcactcgcttgcggactatttctaccgagacaaaatcgaagcggcgcgggagcttatcgaaaacgtaaaagaaggcaacattctcgtgtgcggcgtgggagcttcccttgtgtgccgaggcgacatatgcgttctcgccgacatcacaagatgggaaatacagctacgatacagacgcggaatgaacaactggcgcaccgcaaagaaaaaccagcctaagctgacaaaatacaagcgcggatttttcgccgaatggagatgggctgacaaggtaaaagacggtctgctctcggagattgactattacctcgatatgtctgccgaaaatagacctgccatggtcgtgggagacacatacaggaacgcgctcgacgaggtttcaagaaagccgttcagacttgttccatactttgaccccggagtttggggcggagactggatgaaaacccatcttgacctgcccgacaacggaagcaactacgcgtggtgctttgacggagttccggaagaaaacagcataacgcttaacttcggtggaaaaaccgtgcagactcccgctatgaatctcacgctgtaccgtgcggatgagcttctcggaaagcgtgtgcgagacagattcggcaaggaattccctatcagatttgactttcttgacacgattcacggacagaacctctctcttcaggtgcatccgctgaaggaatacataaaagcgcacttcaacatggactacacacaggacgagagctactacattctcgacacggacggagacaattcatgcgtatacctcggagtgaaaacaaatgttgacaaagaagagatggcaaaggctctctataatgcgcaaaagggagaaaagccgtttgaagccgagagatatgtcaacaaaatccccgtaaaaaagcacgaccatgttttgatacctgcgggaaccgtacactgctcgggagccggcacaatggtactggagataagcgcgacgccgtacatattcacctttaagatgtgggactgggggcgtgtagatcttgacggaaagccgcgtcccatacatcttgagcacggacttgccaacatacagtgggacagagacacggaatttgtaaagcatgaacttatcgacgccgtaactcctatcccatgcggcgacggaaagatggagagaacgggactgcacaagctcgaattcattgaaaccgtgagagttacgacctccgccgacactgtagtgaaagcaaacggcagtgttcacatgataaaccttgtggaaggcaagagtgctctcataaaaagctctgacggtgcgtttgttccgtttgagctgcactatgccgagacctgcgttattccctcggcggcgggagattttattctgtcgtcacctgacggaagcgagataaaggtaatgaccgcctccgtgagagaatgaaactgtatcatttgacctaaatattatttacatacaaaggagaaacccacaatgaaaaagttccttgcaagcacactggctcttacaactctgctcgcagtaaatgtatcagccgcagcaaacctcgtcaaaaccgctgacgaaattgacacctccacatactacaacgacgattactccagagaacaggtcagagacggtatcgtccgcggagaagaattccttctgcatcagtggattacagactacgaacccgaggctgacctcaccctcacgtggtcctctcccgttactctcaccaaggctgtcctttacgaccgcatcagcgcaacagataacgtagcttccggctctatcacattctacgacggaaccgtagttgaattcggtgcgctcgatcccgacggacttcccacagaagttgcatttgatgcagtaacaaccacaagcgcggtaattcatgttgttgccgatgacggtacactttcagtaggtcttgacgaagttgaattctatgacgaaaacggcgtcaatatagctccgagtgcaaccgcgaccgcctcaagcgtacttcccgatcagtccgacaacgaagaatacgtagcttcatggtattccgagtcttacacaaactggtacggtgcggaaaaggctatcaacggctatgctaaggctaatgttcccgaaggcgctgaatttgaatgggcttcacagggcgaggctaatcctactatcactatcaactggtacgacaaaatcacagtaggcactatcgttctatacgacagagttaatgcgaacgaccatgttataggcggcgttatcacattctccgacggctcagagatagagtttgacgagattccgaacgacggcgcgccttactacatagatgttccggataaagaaacaacctccattgaaatcaacacagttaccgaaggtcctaaccccggatttgccgaaatcgaagtttacacagagcattttgaaaacggaaagcccatcggcgaaacagaagaagctcccgttgcagaagctgccgcagaagaaacaactgctccagagactgtagaagaaacaaccgctgaaactgtagaagaagctgctcccgagacaacagaaacagtagaggaaaccgcagctcctgagactgttgaagcagaagaaaccgtagaaacagctcctcagacctccgacatttccgtagttctcggtgcaatcgcgctttccggaatggctcttctcagggcagtatccaaaaagcgttcctaaacagtacgaatcccgaatagcttttgacacgaacattttaaattaatgaaaaggaggaatactgtatgcataacaaactgaaacgcgtatgcagtctggctgtacttctggctatgctcacacaaatggcggcttgctcgaacactgacgtaagcgacacaaaagaaaccacagccgagactaaatccgcgactgccgataataccgaaatcacggaagcgacggaagaggacacaaagctgtgccccaaccttccctcagacctcaagttcgacggtgaagaggtgcgcatcatgcagcatcctgcaggcggaggagactgggcagaatggctcagccgcgacctttacgcagaatccatcacgggagaacctatcaacgacgcggtatttgagcgaaactcatacgttgaagacaagcttgatgttaagctgaatgtttccgatgttcccgacatggcaaagtccattcagcagcaagcaagcgcgggaacaggagactaccacatttccaccgcgagaataaacagcctcaccgccactgttacgggtggatatctgcgcaatctttacgatgtgccgtacatggatctcactcagccgtggtacgacgcgaactgcattgaagacgcttccctttacgatatgctgttctatgttaccggctcgatgataatccttgacgacgactccacgggtgctatcgttttcaacaagcagcttataaatgacttcaacctcgaaagtccgtacaagttcgttcagaaaggcacatggactctcgacaaatttgcggaatacgctcagactgttgcaagcgacctcaacggcaacggaaaggttgaccttgaaggagacagattcggcatactctggcagcgcgacgctattatcagcttccttcacgcgggcggctcaagaatagtcagcaagaacagcgatggtgaaccagaatttgtgcttgacaacgagaatactatcaacttaatggacaagctcgacagctttatgtttgagccgcgtgtagctcagaatatgcacaactactacaatgtatatcccgacatcagcgcgacggaatgtaatgttttcaagaacaacaacgccctgttcatgtggatacgtatgagagttgccgagaacctgcgcgacatggaggcggatttcggtatcattcccgttcctaagttcaaagaagaacaggatatttactacagcaccgtgaacaagcacacctgcgcaacgatctgcattccgaacgacgcttctctgaatatggatttaatcggtgctgtcattgagctgatgagtgcggagggtcactacggtctgcgtgacgcatactacgaaaagaacctcggtgcaaagatagcgcgcgaccccgaatccacagaaatgctcgatattatcatgagctaccgtgtttatgataccggagagatatacaacatcggtggacttgccgataagctgtattccctttccatgggttcaaaaatcggtatagcaacacttttggcgaagaaccagaaggtcatgaacgttacacttgagaagagctttgttaagcctatgaaagagcttgcggaaaagctgaaataacctaaacaaaataaaccggagcatgattcagtgtgattctgattcaaactccggttttgttttattttaccgacgcaccgagtatcgcgctcttcgatgtatcggatgtaacgtacagttcacatttcatctcaccgcacagctcacggagaggagtgagaaatctgtcgccgcttcttgttatctgcccgcctatacagagaaccgacggcgcaaactctctgacaaacggctcgattgcgttcttcagccgctctccgaacactgcgtatgcttggactgccttctcgtttcctaaagccgccattttttcaagctcttttccgtcaagctccagtcccactatctctttcgagagggagattatgccgcgctttgagatatagtcgtctatgcacccgtcaaggaaaggcgtcgggtacacatatccgtgaggcggaacaccgtggacttcttctccgcacagcttgtttttatatgtaaacgcgcttccgcagcctgttcctatgcagatgaacattgccctctccgctcccgcggcttttccgaaattcgtctcaccgagcgcaaatcccgcaacgtcgttaatgaatgtcacgttttctctcggaacatcaaatctgtcggagaaatatcttttaagattgaagccgtagatcgagtcgtatttcgccagtccttttataaggcagattccgttttcgtagtcgaaaggtccggggaaagcaaagcagattctgtcaagctcatgttcaccgcgcacctcgtttattattctcgcgaagttattgagtatcacgcttgcgaatgcgtccgactgtgcgggaaaatgcatgatctccgtcagcagtgttccgttttcgaccgccgcggcttttatctccgttccgcccacgtcaagacttactgtaatttttgccattgtttttctcttttcagtgttttgttgtgatgagaaagctgctgattccggcgggatagtagtcctcggagtattctatcatcacgtcttttgatgtatatccgtgcgctgatatgaatattgacggctcaaacgggctaatctcgaggttttctgctatgtcggcgggagtcggaacaacctcaagctttttatgcgaatactcaacgtgaaggtcgcggtgcgcaagtatctcgtaaaaagaagcgtcggtgaaatctatctccgtcatatcagggaaatacttcacggggacatagagagttgaataaaacacgggctttccgtcgtggtagttttcaagccagcgcagtcttgtcagctttgtcacgtactctccctgtcgcagattcagtgcctgagctactatgtccgacgctttttcacgctgcaattctatcactcttgtgtgcagcttcaagcccttttttgtgctttcttcatggtatccggtgataaagctcgtggattcgtgaagcagcttcggttcttttacaaatgtaccgcagcctttcaccctgacaagatatccggcttgagtaaggctgtccagtgcctgtctaatcgtcgggcggctcactccgagaagttcaacaagctcgttttccgtcggaattttgctcttcgggggatattcgccggactgtatacgtgaaagaatatagtctttaacctgagaatgtaatgttgcgcccataatcgtacctctttctgaaatttacgttcaagcaaattgaatttgtcattacatacagtatatcacacttcggcataatagtaaatacccaatttatatgacggaggatttttttacaattcgggagtttttgatataacatttcgcagattcccgagtttgatttcaaaaatttgtattgacatatgattaacatagtgatatactattaacacaggaaattatatcagaaaaatttgattcaggaggatttccgaatgaaaataagcgacgcaaaaattgttttctccggcgtaaagtctacctatttcgtcagaggaaaagacggctgcctgtttgaagaagctaaggctgtctttaaaaatgaaggagacgccgaggttcacgcctatctcaaagcaagcgcgacatcaaaggacggcagagactttaatctttcagttgtcagcgatgtggttcttccctgcggcgaaaacgaaatagcaattcttgttcccgacacaaataaggtgctgaagccgggatatgattccgttctcacactcgctctgtacgaggacgaaaagtgtgaaaccgagcctatcgcggtacataccgaggagcactgggcaagaaccagacactggcagttctatatgtcccagtcaatgcacaccgacatcggctacacaaactatcagggtcagcttcccgcgctctacacctccttcattgacacggtaaagaagttcatgaaggactccgatatgcgcgacaccgacattgaaaagtacaaatacgccattgaatccggctgggtaatgggcgagggctacatgactcaggcaaacgcggaagagatcaaggaagtaacggagctcatcggaaaaggacgcatggaaatcggcgcgggtcagttcaactacacgatggaatgcttctccacggaagagcttgcacgtgcggcatactacaccaaccgttatctcgtagacaagctcggtatttctcagtcgagagttgagagaatgttcgacaacccggcattcacaaagagctatgttgacgttgcgaactccgcgggcataaaatacggttatcactcgatgaacggcgaccgctctccttactggaagaagaaggaatatgacgtattctacctcaaaggaaacgttcccggaaacaagctgctcatttttaacggacattcctacggcgaaaactacggcttctcttcccagcacggctctgcttacaattccgatgttgaaaactgcacggacaacgctatctcatgcattgacagactgctcggtgagcttctttcacttgagggacgcagacgttatccttacgacaagttcccgatgcagctcgtaccgttcggcgacaataaagctcccgacgatatgcaggtgaaggtcataaactccgtaaacaagagattcgctgacgaaggctatgcttatccgagactcaagaccgcattcccgacagaatttttcgaggatgttgaagcggaatacagcgaaatgatcccatccgaggacggcacggaagaaaactggtggaacgacggctggggcactaccgcttatgaatcgggacttaacaggctcgcaggcaacaccattcccgcagccgagaccgccgcttcatttgctgccgaaatgggtacgaaatatccttacaacgccctctccgaagctatgtaccgcaatcttgtatacgacgagcacacatggggcaactgggcttacgacgactcgcatatgtatcattctcagtgggaatggaaacgttcatacgcgttcggcgcaaaggttcttgcggacaagtgcctgaaggaatccgttgaagctctcgctgccggtgctgtcgaaaaatccactggcaagtctatttacgtttacaacggactgaactgggtaagaaacgacgcggttcatgttgaactgacaaaggacttccccgagttcttcgagataaagtacggcggagaaagcgttccttatgaagtaaaagacggcgttctctcatttgtcgcaaaggatgttcccgcaatgggatataaggtatactcagtcgagaaggccgacacatcaaaggcatcctgcgaaaccgtggtaaacgtaaactctatcgaaaacgagttctacaaggtagtatttgcatccgacggaactattgcaagcatcaccgacaaaaaggcaaaccgtgaagttgtagacacaggagctgtcgaaaaattcaaccagtatcgctattacgatgaccacggaatcccgttctcgaacatgaacttcccgtttgacgaggataaatggactctccacacacccgaaacagcggaggtcattctaacaaagaacgatgtctgcgaaacggcgcgtgttacaacctcgacattccgcaatcctaagataacccaaacagtaaagctctaccgcggaatcccgagaattgacatagtaaacgaagtagtcaagggtgcgcttccctctctccaggctatcgaagaagcgtactacaccttccccttccgcaccgaaggaaagcacgagatacgctacgacattccgctcggcaacatggttgaaggaaagcagacctacggaacatctcacgactggtacaccgtatgcaagtggtcaggagtacgcgacaccgagacaggatacaacatggttctcgcctctcccaacactgcacttgtagaatttggtgaacgccgcacgggtaactggtcattcgactatgtatcggaaaagccctatatctacagctatgtattcaacaatatgtggcagacaaacttccagggagatcagcccggttacgcagatttcaaatacagcatttccacaaactcctgcggtgaggatatgagcgaaaacaaccgattcggatgggaaagcgttactcccatgcaggcggctgttgtgagcggcagtgcaaaggctgaaagcggttcttacatcaagatcggctccgaccatgttcagcttaccacaatgaagcctgcggaagcgaacggcgagggcatgatactccgttttgcagagattgcgggaaaagcagtcagcggagttaaggtatctctcggaaaagcggctgacgtcacggaaacggacataatagaaaacgatctgcccggaaacgctctctccgaggaagatttcgtattcgacatccccgcttacggattcaagactttccgcgtaagatatcatgtaggcactccggctaaggttaatatcacaagtgtttgttcgacaaaggaaatcaccagaagcgaaaatctcgtaataaagagcgacaccgaggcttcgtcaattttcgccggcggatatgaggctgactgcgcgaaggactttatgaacggcagagaatgggcttcaaagggagagagcaatccttggataaagttcacatgggacgagtctgtgacggtaaaagttctcgcgatagcttcacgaaacaatcccgcggatctcgtcgaaaaagctgaggtttacacggacggcgatgacactcccatagccgtattcacaggcaatcccctcaactccgacattgagaacaacagaatagtgcttgacaaggctgtaacagtaaaagagctcaaggttcagcttatcggaagcacggacggcgcgcaggtcaagaacaacggcttgtcaggctttgcggcgtatgcagacattccgagagaagctgagcttggcggaacatacataaagtgggaagacgcggacggtgctgaattctaccgtatctaccgcggcacgacgcctgactttgttcccggatgcggcaattacataggctcgactgaacgcacaggcttctacgacagtcaggtaacgagcggtatgaagacaaaataccactactccgtatgcgctgtcggtaaggacggaatacgcggtgaattctccgacaaggctgccactgtgactgtggacaaattagaggacaagtccgagcatacaaagcccgagcttcatgccatagtcagagaagaggacagagttgacctatggtggactcccgttaagaacgacctgccgataaaatacttcaaggtattccgtaatggtgaagaactcacgctcttgcacaagaacgaccatgttgtatcgttccgtgacaagcgcattccgaaagaagccggaaagactattgtttacacggtagccgcagtagactggaacggaaacgaaacattcagcgaacccgtaacggtaaagctctggtaataaaaacaaaagaataaaaagctcctgctgtcttttgcactgccccaaagagttggactgaaaatctaacaacggaggtcagtgcgggacagcaggagttattttatttaacgttttttgaggctttcatcaggacatataccgcagctccggcagttaccgcaacggagagaaccattgaaaatgtatcggtcatgtgctttctgtggagagtgtccgcgaggtgggaatattttcgctcaaggcttttcgtcggttcaaggtagcttcgcggacgtattcccgatgtatcgcgagagtagcttcggaatatccgcgagcactccttacatccggcaaggtgttcttcaagagcgcgtctgctgtcattgcttgcggcgccgtccttataaagcggtattaaatctatcgccatatcacacgagatttcctccaataacattttctttgctctgaaaaacaagacctttgccgagctttcgcttattttcaaggactccgcgatttccgaaaaaggcagctccgcgtatatcctcagcaccactacgtcacggtactttgcgggaattttgtcaagcacctttcgcacggcggctgacatctcttccttttgcactattttctctgggtcggtttcgtcgtcgcctatgataaggctgttccacggatcggtattgataaaatctgtttcgcgtcggttctttctcacatagctgaaaaacgtgaacttagcgatggacgcaagccatgtaaaaagctcgctgtctccgcggaatttatagaaggaacggaacgcctgaaaaaacgtttcctgcgtcagctcctcggcgagatcctcattcccgcacattcggaacagaaaagtgtacactcgattgaaatagcttgtgtatatgtcttcaaacgtttcggtatcaacaggcactttaccacctccctcttatcgaatgattacattatattatagaataaaaaaatgaaatatgcaatggaatattgtgaaaatattaatttttgatttttttgagttttcgtgtaacctttttcgattaagcaacacttacttactgtaatacaaagattacaaccgaaacacacggttaaaaaatatacagacattgcagaaaggactaagatatggcagaattcaaaaatcctcttgagatgcgcgacgctcccgacccgttcatgacatatgacccagaaacgggatattattacgcgcttttcacctgcggaaacagacttgagctttacagaagccgccatgcagcaaatattctcacggataaggacactcttgttgtgttccgcgtgaacgaaaaggacggaatctacggctgcgtatgggctccggagatgcacaaggctccgaatggcaaatggtacatatacacaagcggctctatcactcccggcgacggtcagaagagactgtttgtgatggaatcgctcaccgcagacccgtttgacggctttatcttcaaaggcaagctcgacgacgacctgtttgccatcgacccgacaatttacaccgacgagagcggcaagcagtacatctgctactcacactcatccgcggaagacaatcagcgtctcgagataagagaaatggcaaatccgtataccttcggcgaaaaaagtgctatcattgcagttgccgaatatccgtgggagcttgttcctccttatgtcggcaaaagcaagattaacgagggtgcgttctttgtcaagcgcggcgagagactgttcatcatatattcaggcaacggatgctggtcaaacgactactgtctcggtgttgttgaatataaaggcggcgatatgtgctcgtcggactcctgggtaaagcatcccgaacctatctttgttcacggagaggacacatacggaccggggcacgcttcgttcttcaagtctcccgacggaaaggagctttggtgcgcatatcacgtaatgctttcgttcaatgaaaaggcggtagttgctccgcgctacttctgcatacaaaaggttaactttgacgaaaccggatatccagtaatgggaaaggttcccccgcttgacacccttcacaaagctccgtcaggcgaaattgagtaaatatttttaaggagtattccaatgagctttcgtatagccggaacaggtatgtacgttccggaaaacattgtaacaaacgacgatctctcgaagctggttgagactaacgacgaatggattaggacgagagtcggtattgaaagaaggcacatttccgtagatgaaaccaccgcggatatggcagttaaggctgctgaggctgcgcttgaaaacagcggaattaaacctgaagagcttgacctcatcctcgtttccacagtcagtggcgactacatttgtcctacagttgcctgtctcgttcagcaagcactcggcgtacattgtcttgcttatgacatcagcgcagcttgctcggcattcctgtttctccttgaaacggcggcaggttatttcgctcgcggaacagtaaagaaagctcttgttatcggtgcggagagaatgagccgtattatagactggagcgaccgttccacatgcgtaatattcggcgacggtgcgggtgcggctgtacttgaagaaggtgacaactatcttgcgtctcacttcaacgtacagggcggagctgaggttatcagaataccagcgtctgccggaaaatctcctttctataagggagagagtctcggcgagccttacgttttcatgaacggtcaggaaaccttcaagttcgcggtaaacagcatcagccacgacataaagacaattctcgaaaaagccggaatgggaatcgacgacatcaagtgtgttattccccaccagggtaacctcagaattatcgacgcagcatccagaagaagcggaattccgctcgataaattctatgtaaacatccaggaatacggcaacacatcaagcgcaagtattcctatggctctcgatgagctcaaccgtgcgggaaagcttgagagaggcgacaacattctgttcacggcattcggcggaggactcgcaagcgcggcttcgataatccgttggtaatgttttgatatatcaaaaaaaataaaaatttatagaaaaagaaagtgagacactactatgtacttcgaaaaaattgctgaacttatttccgaaaagatcgactgccccgttgaagatatcacaaacgaaacaaaattctccgacctcggcattgactcccttgacctcgctgagcttgctatgaaccttgaagacgaattctccatcacacttgaaatgacaagcgacatcgctacagtaggcgacctcgtaaagaagattgaaactcttgtcggagaaaaaaatgcttaaaacccgcataacagagcttctcggcatcaagtatcccgtattccagggcggtatggcttggatagcggaaggcaatcttgcggcagctgtatcgaacgctggcggactgggaattatttccgctatgaacgctgacggcgactacatccgctcacagatacgccttgcaaagtccctcaccgacaaacccttcggagtaaacatcatgctccagagtcctcacgctgacgacgccgctaaaatcgtggttgaagaaggcgtgaaggtggttacgacgggcgcgggaagtcctacaaaatacatgaaagactgggtagcggcaggaattaaggtcattcccgttgttccctcagtcgctatggctaagcgtgccgagtcgttcggagcatctgccgttatcgcggaaggtcaggagtccggcggacacatcggcgagataaccacaatggctctcgttccgcaggtagttgacgcggtatcaattcccgttcttgccgcaggaggtataggagacggtcgcggacttgcggcttctctcatgctcggcgcggaaggcgttcagatgggtacaagattcctgcttgcaaccgaatgccgtgttcacgagaattacaagaagatggttctcgcggcgacggacacctccactatcgcgacaggacgcagattcggcggaaacacctgccgtcagctcaaaaacaaattcagccgaaattttacaacattcgagtattctgcggaagctactcccgaatccgttgctgctctcggcgtaggtgcgctcagaaaagctgcggttgaaggcgacaaggatgccggatgcttcctcgcgggacagattgcaggtatgctgaacaaggaacagtctgcggaagagattgtaacagagatttgcaatgacgcggaaaacctcttgaaaggagcaacaaaatggctaaaatcggaataattttccccggtcaaggcgcacagtaccccggaatgggtgaaaagctctacgaagcgtatcccgaaattcgcgagctttacgaaaacgccgagaagatattcaccggtatcaccgagatatcattccacggcacggcggacgacttaaagaaaaccgaaaacactcagcctgctctttatcttgcagagctttctgcggctttgattctcaaaaagaacggtattgaagcctccgctcttgcaggattctctctcggagaaattcccgcgctctctttcggcggtgcttttgattatattgaaggattccgtattgtctgcaagcgcggtgaattcatgagtgccgatcccggcgttgaaactgctatggcggctgttttgaagctggacggcgaaactgtggaaaaaatctgcgcatcccacagcggactctaccccgtcaactacaactgccccggtcagattacggtatcgggaacaaaggaagccctgaacgatgctaaagcggaattcaccgaagccggcggaagagttattcctctcgctgtcagcggtgctttccactcccccttcatggacaaagcgtcggaagaattcggtgcgttccttagcacctgcgatatcaagtctcccgtgacgacggtatacgcaaacagaaacgctgctccttacgagaacgtggttgaaaccatgcaggcgcagataaatcatcccgttctctgggaaaagacagtccgcgctatggctgagagcggcattgacacattcatcgaagtaggtcccggtcagacgctgagcaagtttgttcagaagactgttcccggagctaagacatatcacgcggaaactcccgaagaaatagagaaaatcgtttcggaagttctctgataacggaggagtattatgcttaacggaaaagttgcggtagttacaggcggctcgcgcggtatcggtcgtgcggtttgtctcaagcttgccgaaaacggagctgacattgcgctcctctatgcctcaaacgaacaaaaagctaacgaagtcgtcgctgagattgaagctctcggaagacacgctgtcgcttacaagtgcggagttcagagctttgatgaaaccgccgctgttgtcacacagataatgacggacttcggacacattgatattcttgtaaacaatgcgggaattacgcgcgacaagctcatgctctccatgaaggaagctgattttgacgacgtaattgacgtaaatctcaagggcgttttcaacatgatgcgccatgtatatccgattttcgctaaacagaagagcggcaagatagtaaacatcagctccgtagcgggtcttatgggaaatcccggtcagacaaactactctgctgcaaaagccggcataatcggaatgacaaagtcggcagcacgagaacttgccggacgcggaatctgctgcaacgccgtagctcccggatttatcgagaccgacatgacggcgaaatttgtggaagacaaggctgcgcttgacaaaatcccgctcaaaagaatgggcaaggctgaggaagtcgctaatctcgtgttcttcctcgcgtctcccatgtccgactacattacgggagaggttattcgctgcgacggcggcatggcaatgtaatttaatcgagaaaggaatttgatttatatatgagacgtgttgttgtaaccggtatgggatgcttatcacctgtcggaaatacagttgaggcttaccgcgaggctatattcagcggaaaaaacggtattgacgagataacatacttcgataccaccgactataaattcaagctcgcggctcagctcaaggattttaatccccttgaaaggctcgacaaaacgacccttatgtacagtacgctctatatgctgcggctgaagcggtcgaacaaagcggaatcatcggaaatgttccctcggaagagctcggcgtttatgtaggcacgggagtcggcggatttgtaacattctgctccgagcacgctgctcttcttgcgggaggtccgagaaaggtttctcctcagttcattcccaaaatgatcgcgaacatagctgccggaaatgtcgcaataaagtatcaagctaaaggtccgagcatcgaccacactacagcctgcgcgtcatccgcaacatcaatcggcgaagcgtaccgtgctatcgttttcggctctgccactgcaatgatctgcggcggaagcgaggcttgcattactcctcttgctgtagcgggattcggcaactgcaccgctctttccgcttcaaccgacaaggacgcggcttcccttccctttgacgcacgacgcggcggatttatcatgggcgaaggtgctgcaatccttgttctcgaagaatacgagcacgccaagaaccgcggagcaaatattctcgctgaaatcgtaggctacggcactacaagcgacgcgcaccatgttactgctcccgatccttctggcgaacaggttgcacgcgctatccgtcttgcaattcccgaaaacgctccttccgcagacaagatttactacaatgctcacggaacgggcactcagctcaacgacgctacagagacaaccgctctcaagctggcattcggtgacgacgcttacaagctccacatcagctccacaaagtcgatgaccggacatatgctcggcgcggcaggtgctgttgaagcgatatcctcgattcttgctatccgcgaaggaaaggttccgccgacgattaatctccatgagcgcgacgaaaagtgcgacctcgactacactccgaacactcccgtagacgctgagattgagcttgctctctccggttctctcggattcggcggacacaacgtttgcctcgcatttgctcccgtaaaggattgaaaggcacgatatgacacacgaagaacttaaaacacgtcttccgcaccgtgacgccatgctccttgtcggtgaagttactacaaaggacggcgacgaaaacactgctgtcggaaagacatatattcgcggcgacgaatggtttttacagggacatttccccggcaatccaatcgtccccggagttattctctgcgagatcatggctcagtccgtctgcgctttgatttcatgcagtgacgcactcccactcttctctggaatgaaaaacgtcaagtggaaaaaatcagtcagacccggcgacacatttgttacggaatgctccattgtccgcaaggttggtgctttctgctttgtcaaaggcgtaggatatgtcggagacgacgttgtccttgaagctgagttttcatttgcgcttgttcccgcggaaaccaaggaggcataaatgttaaacactattaaagataaaatcacacagttaatttccggaaaaaccgttccgattccgataaagtgctccacctgcggaaacgaaaccaccgatgtcgacctcaaggaaaacttcatggtttgtccgaagtgcggaaagtacatgagagtcggtgcgcgagacagaattgccatggtgactgacgacggctctttcaaggaactcttcaaaaaatacaagagcatggatttcatggattttcccggatacaaggataagctcgacaaggctacggctgctacgggagaaaacgaagccgttatctgcggtactgctaagataaacggtcaggaatgcgcgattttcgtcatggattcccgctttatgatggcaagcatgggctctgttgttggcgaaaaaatcacaaagacttttgaaactgccatcgaaaagaagctccccatcatcggattcacagcatcgggcggcgcgagaatgcaggaaggtattatctccctcatgcagatggctaaggtcagcggcgcggtcaagaagcacagtgaggcaggtctgctctatataacagtcctcaccgaccccactacaggcggcgttaccgcaagtttcgctatgcagggtgatatacttcttaccgaacctaaggcgcttatcggctttgcaggtcgtcgcgttgttgaacagaccaccaaaaccgagcttccctcaaacttccagacagccgaattcctgctagaacacggttttatagacagcattgtcgaaagaccgcagctgaaagacactctcggcacactgctgaagattcacggtgctcctgccaacgataaaaagaaaggagcaaagtaatatgactgcttatgaaaagctcagagccgcgagaggaagcaaaagacctaccggcgctgcatacgtcaagaacattttcaccgactgcgttgaacttcacggtgacagacgttttggagacgaccccgcaatagtatccggcgtaggttttctcggcgacattccggtaacttacatcgctatcgacaagggtgcggacataaacgaaagaatcaaaaagaatttcggttgtccgaaacccgagggatacagaaaagcgctccgtctcatgaaacaggctgaaaagttccaccgccctgttatatgctttgtcgacacacaaggcgcgttctgtggtgctgacgccgaggaaagaggtcagggtgaagccatagccgaaaacattctcgaaatgatgggacttgcaactcccgttgtaaccatcgttatcggtgaaggcggaagcggcggtgctcttgctctggcggcggctgacaaggtttatatgctcgaaaactccgtttattccgtaatcagtcccgaaggatgcgcaagtattctctggaaggacgcgggaagagtttcggatgctgcggaagctcttcacattaccgccgaggacatgagaagataccatgtggctgacgatatcatcgcggaagacttcgataattttgaagatatgtgccgcaacatcggtgctatcctcttcaaggacgtctacaatctctcgaagctgtccacagaagagctgaaaaacaagagatacgacagattccgctcgttcggattcttctcggagaagtaaggcaatactcgcacgaattgactgaataagataaacaaaaccgcactccattgcagatttcggtccggctatggtgtgcggttattttgttattgttcaggctcgtctctgtagaatttcgcttgtttgtcgaacatttccgtgtagattccgccttttgcgtacagctcggagtgagtgccgtactctgctacgcgaccgtcatcaaacacagctacattatcggcaagttgaactgctgagagacggtgtgtgataagaattgcgcatttgtccgtaattatattggagaattgagtatatatttcatattcagccatgggatcaagtgccgctgtcggttcatctaatatgaaaatctctcctccgtgataacacgctcttgcgatggcaatacgttgtccttcgccaccggaaggctcaatcccctggatcaatttcttttccgatttgcgtttccgcaccctttgccagcttgtctatcaacgattggatatttgaactcatacacgccttgtggaatttcacatcatcacatttttcgtcaagagccacattttctttcagtgttaattcatatgtagaaaaatcctgaaatacgggggcgaatagtttagtatacagctcatagttgtattccgttatatttacaccattgagcaatatttcaccagatgtgggttcgtataagcgcaggagtagtttaataaacgtcgatttaccggaaccattttcaccgacaatgcaaagtttttttgtacatgaaagctttaaatttaaattttttatcgcaaagatatcactaccgggatattgaaatgatacgttatgaaactcaatgtaagaattttcatctattacgggaatcatcgtgccctttttttcttttaccggaatattcaaaaagtcctgccattcctttatttccatagtacgttcggaaagcgccatgtatgcgttgacaatcgaagaaactgaccccgaaaagcgttgagccgcagacagacatattgtcatatagcctattgaaagcgcaccgatgagcaccttgtaaataagataaacatatactgccgcagattgtataaattctgtaatatacaatacaagattaaccttatttctgttttggttattcttaaaggttgtagcgttcatgtcacgttgagaactatttagtttcttcagcaggaattcggcaatgttatataagcgaatttccttagcataggaaaagtctatcagcatatatgtgagcgaccaatttttccgttgatgtttgctgaattcttcgcgcagttcaaagcgttttaaagtctgccatttaaccatacgggaattgatatagacaataacaagaatcaacacaataagcaacgggtttagataagtaatgatggaaaatgacacggcaaaagaaattattgacgaaataatatttccaatcaaatcgacaatttcagtcgctcctaacacggtgttgctcactcgttcacgccatccctgcaaatttggatcttccaatgtttcgtaatccatttttgcgacaaacaactcaaaattactgtttaagttgatattgatttcttcttcgatgtgaaaaagcatatttctgataggaattaacagtattcgatatactgcaggtacagcaagaagcagagccaaatagtacaataatgcagagatattccatacgccgttttctacattgaacatcaactcgtttatgataagccccggtacgatgaggccgattatcccaataactgcatcaaacaacaaaattgcaaattttataagaataaatttcttcccgtatttgcttccaagcagcatagagataagatattttgacttcgatagtatgtcaaaaatacttttaattttcatatatcctccaatatatagttacagagcagatatgctcaacagattcaggcgaagttatttctggattgtaaaaaaccataatgcagtgcgttatcacaatttccctttgccagatagtgtttgcggtttacacatccaacttatatgtaatttgaatagaaccaattttcagctgtagggttttgcatagcgactgcaagcggtaaggcaatttgctgatacgccgttatctgaggaggcttaagcggaagagtatgtagcatgtttttttcctcgtttattttgaggaatgtttattttttataatcaccttcggcattctcgcatggctcgtctctgtagaatttcgcttgtttgtcgaacatttccatgtagattccgccttttgcgtacagctcggagtgagtgccgtactctgctacgtgaccgtcgtcgaacactgcaactctgtcggcaagctgaacggcggagagacggtggatgatgaggactgcgcatttgtcggttatcatttcattaaactgagtgtatatctcgtattccgccatgggatcaagcgccgctgtcggttcgtcaagcaagaatatttcgccgccgcgataacaagcacgcgcgattgctatacgctgagcttcccctcccgccggttcaattcccgactcatcaagcgtcttgcttacagaagtatcatatcctttcggcagctttttgaccaacgaatcaagtccgctgtggcgacatacttcatcaaggcgttctttatcatattcattagccaatacgatgttctctccgagggaaaaatagtatttagcaaaattctgaaaaacaggcgcgaacatacgctgatatttatcgtaatcatattctttgatattgattccgttcagcagaatttcgccttctgtagggttatacagccttgtaagaagttttataaaggttgattttcccgctccgtttacaccgacgatgcaaagcttttcgtctcctcttaatgacaaattgagatttttcagtaccgggatacgcgaatgagacattacgaaactcaatcacagaatttttatcaaatacgggagtcatatcaccggtttggacagtaccggacgacatatccataaagtccatcagctcctgaattctaaagctctcactttcgagataaagatacgcgttgaatacagagctcagtgtgcctgaaaactgtccgactgtggagataaatatagcaatgcttccgacgggcagacctctatacagcacattgaatatgagatacgcatacaaaaccacctgctgaaaaacgtccgtcagcataagaataatgtctctgccgccgcagtttttggtcattatgatttctttttcatcgttttcatgcttgtattttttatagccgtcaataagcagcttattcagcttaaacagtcgtacttcctgagcatatgataagtgtcccatcatgtagctgtacgcccacaggaagaggtcgtttttgctcagctccattccgattatgtgattcttgtagttgacttttttcgtcaccgcagaattgataatcaaaatgagaatcacaagcaatatgatgagaggattcagtacgcttatgattgatgaaatgagaagcaaagaaattaccgctgatatcagagtcgtcattcctgtagaaacgtccgccaccttgacaagagtatcggaagcacgctcctttatgttttgaatctcgggattttctacagttgcataatccatattcatcacatggttataaaagtccgacgttatctccatattgaaggtctttgtcagcttagatgtacgaatgtcaatgaatgttttgataagacgcagaatagccggaagagcaagcaaacaaaacacatataaaatcagatatggtattcttctgttttgtatcaactcattataataagtccggggaaaaccgcgtagattatcggagggaaaacacctattatcgcacctatgttttgcagcacaacaagcaattttccgcaccttttttcccacacaagaccgaacgcgtattttatggttttcatcgtcgtcttgacgttttgcatttttttgagtttcacattgtcctcctgaaaaatattgtcacaccgcaaatactccacatttcccgaggttatagtatcattttttgtcacatttgtcaatttaaattcaatattttcgtgttttttttgaatttttcgtctccttttgtcttaaaacattacttggcggcggtattcggcgggggtgaagcctgttatacgcttgaattccgcgctgaaatatgacacgtccttatacccgcatttcagtgatatctccctcacggacattttgttatagctgaccatgagctgcttggcgtggtttattctcagtcggatgaggtattgcagcgggggcatatggtaggcggacttgaatattcggcataggtaggagacggagacgtttatttccgccgcgaggtcttcaagggagatatcgtttgtgaagttacgctccatgtatgctgtcaccggctcgagctttactattgacgggacttcgcggtagaatccgttcttgtgcgcagtcagctcggtgagtagtgaatatagctgttttgacgcttcgaagtagttgagcatactgttctttttcaggagggagtatatctgcccgatttccgacccgatttttgacggctttatgtcgcgcagtatgcagaatccgtcagagaacagcgaatcgaacaaatctcccttgtagcacacccagtcaagcacccacggaaactgctctgtcggctgatagctgtgcggcactcccggggaaaacaggaacgcgtcatgttcatttatctcgtagttctcgccgccgcagctgaatatcccgctcccgcttaaacatatcgcaagctgataatcctcaaagccatcggcacgttccaccaaattattctgctgaaactgcacgcatatttgtgtaatgtacagcggaagctgctctatctgcgggttcagtatcggtatgattatttcgttgttctgcatttttctcccgtcctgtcagttcaatattcttatatttgtatctgattataatatttacaagacgctttgtcaagtgctataatgtagccgtaagcaatgtgaagacaaggggggactttttgtggaatcagatatttccggcacagtcttcaacattcaaaagttctgcacagacgacggtcccggcatacgcactactgtatttctcaagggatgtcacctgagatgtcagtggtgccacaatcccgaaggactggatgttcacccgacgcttgaatataacgaccgtttatgcgctttctgccacagatgtgagtccgtatgtccgatgggatgtcattctttcgagggcgacacgcattacatcaaccgctcaaagtgcatacactgcggcaaatgtgttcagtcatgcgaatacggtgcggtaaagctctgcggaaaaaccatgtcggcaggagaagtcatgaaaatcgcgcttgcggacaaggctttctacgtctcctcgggcggcggaattacaatatcgggcggagaaccgctgttgcagtcggattttgtgcttgctatactgtctctcgctaaagaaaacggcattcacacctgcattgagacgagcggcgcggttcagttcgacattataaaaaaggttcagccttatgtggacttgttcctatttgatataaaggaaacggatgagcagaaccacatcaaatacacaggcatatcaaaccgacttccgatggagaatatccgcaagctcgacgacctcggtgcatccgttaagatgagatgtccgataatcccgggagtgaacgatgtttcgcggcattttctaaagctgaaagagctgtactcttccctaaagcactgcgtcggtatacaaatcatgccttatcatatgctcggccagggaaaagtcggacgcttcggagttgaaggagcaaaagagttttccgttccgacaaaagagcaaatcgaggcatggaacaacatgataaaaatctaaatttatgaataaaggtgaatgattatgatcaaaagagcactcggaaaatcaggaattgaagcgtctgccataggtctcggcacatgggcgataggcggcggagaatggtggggagattcggacgacgaaaagtccattgaaaccatacgcaaggctgttgaggctggtgttacactcatcgacactgctccctgctacggattcggcaaaagtgaaactgtagtcggaaaagcgctgaaaggcatccgcgacaaggtaatactttcgacaaaatgcggcttatggtggaatgatgagcgcggttcgttc

SEQ ID NO: 224 - DNA, 17991 bp, Unknown
  16S sequences of unknown bacteria
tctaattaatgaatcaaatcggtatataggtaacttgcttaattaaaattttatatgatgtttgcggcagtgcataactcgttaatcaagtcataattataaaatataacgaatttactatgattgaggaacaataataagtagtggaaaaacaaaatcaatgacttcacagcggtgaaacgtacttactatggcactgcgatattatttttaagagagctttgaaataatacgatttgtgatgcaattaaaggcattgcaatttgtcaggttattattgacaaaaacaaatttcatattatataattttataagcgtatgcccacaatgttcattcaaaaaaggaggaaattacaatggaagaaaagaaagaaattctggtgcagtataattttgtcgggggggggtattctttttgctttattggcattaatgaaaataccggcatttattaattctattagagcaagtatggtatatgaatactatcctattacatattcaattagcgcactgctttttattatcggtagtattttaatctctatatctctatttatgaagcgcagagatattattgcttgtattggtttagctattataactctaaacagtattattagttttcttaatcctaataattttttctcgaaattatttatccttatatatattgcggggtatatacttatcttattatttgccttatctcagttcacaaattatttagttcaatttaaagaaacgtctaaaaagttttggtttgttccaattatatgtattggcattgtttctcttatagatgttataggggctatatttatcggaagaggcggaactgtattgttgcaaagggttgttgaagttggtgctgttgtattgactatcatctggattgtattccccgatggtattcccagcaaagaagcaacatttagttataatacaaaaacctcttatgatggcgtagaatatacaatgtctgccttgcctggcgaagcctattgcagtatggtaaagcatgttttgctattgttatttacttttggtatctggtatttgatttggatttacaaggtaacaggctatctaaatgccgttaaagatgaagaaccaagagagcctgctactaagctactgctttgcatttttataccgttctatgttctctactggacatataagagcgcacagcgtattgataaattggcaaagcaaaagggactttctgctgacagcgcaacactttgtttgattatggctattttcctgccgattattgcaccgatcctgatgcaagacaagatgaataatattataacggcaaagaaagaatcagcagtacatcagcagggggaagttaatatcggagctgcaagtgaattaaaaaactacaaagaattacttgatagcggtgttattacgcaagaagagtttgaagaaaagaaaaagcaattactcagtctataattaaaagagacggttagtattacaaaatgctaaccgttttccttaatccgatcataacggtcaataaggctgataataactaataggaatcactatgacaatgcgcatcgaattgaaacagttcataagctacatgagcatgaaatgttttgtaatttttaattctgctttttaaaaacagtgcaccacattggcagtcatgacaaagcattctttgttataaaccggcgaaacagataatcgtatacgtggcattcaatgcggtttttaacttattcaattttccgaaccacacgtaaattagtataggatacatatatacataatgccatatactcataaggcaagctacaaactctattttaggaaactgccgacttaccatctctcatatgtcatttgaaaatatgaagaggcaatatcagttaaaaaatcttttaaaaagcgcggaactttttaaataggcacgccgtcataatttatgaatgcacaaaactacacttatttataaggtaatttaattttgggaggagaaataaagctatgaaaaagatgagaattgccgcaggcgttatgtgtacggtaatgcttatgtcgggagctgcatttgcagcagaaacagaaacgaataattcgcttctgacagcagttcctatatcggcacaggctggcacagaaaatgtgaagactgcggaatatgcagttgaaagcggagttattacagatgttgctgaaagtaatggatatatgagggttacgctcggaaccgcacctgagggaattgttcttattcttaaagaagatgtaaaaatcgtgaatacggcgaccggaagtatgatcaagcagagcgaactcaaaaaagatatgcatatattcgcgcttatcgacgccaactcgccgacgactatgagtcttccgccgcagactgcgggaactgtgggaatcatagttgcagacagcgacgcagtgcttgcttttgatgcatattatgagcagtttacagggaaaacgatagtgcaggatgaggctgacgatacgtatgtagagctcagaacgcttgccgaggaaaagggttatacggtaacctggacaagcaataaaaagccaatcatccttacaaaggatgatattacagcggaaattacaatcggaagcgacgagtttacatatacacatatgacgagagatattcaaccgctcgacagaatggaaaagctttcgctgtccgtaaaacttgaaaacggcaagacaatggtacctaaaagctttgtagatgcgctcaaatagtaaaacggcaaattaaaattgttaaacttcaaaacgatgccaatattcattaatgctaatgcggcattcataaaagatcaagcatgagcattatgacttaaattggcatcgttttttgctgcccgccgccgactttataagcgcagtatggcggtgcaacaaaactgtacccttcaaaaaatgaagaaattgtgttttataatagaaaaatatagctgaattcagcaaaggcgatataattgtacttcaaaaattttttattattgcatattttattgatgacactttagtgctatcataatgtaaataaaaattgggaggtgcaaaatgaaagaaacagaacgcgtaagaaagctctgcgagacggcgcttttcgttgccattgtatttttgggagtattcataattaaatttccaggtccgtttggttatgcacacataggagattcgatgatctttctttcagtacttatgctcggcggaaaacgcggagcggtagcgggaggtctcggtgccgcaatcgcagatgtcgtaagcggatatacgatatgggcggtgcctacgatgatttgcaaggcactgatggcgctcgttatgggacttataataaaacaccatttagcgggtctcaaaggcagagcgctctttataattgcagccttggcgggaggcgtagtacagggatttgcctatgaatttttctggtttgtgctttttggaaaagctgcggcaattgcggcaatcccgggcctcacattccagacggtttcgggaattattatcgcatttgtgatttcagaggcgcttcagaaaaccgcactcagaaagaattttgtttacactacagatggaaagtcggtaggaaaggagcaggaaaatgttggatagaataaaaagttttaagaagatcgacgcccacagtcacatcggagtattcggaagttggtcaaatgtaagcatcacagcggaagagctgatagcagatatggacgaatataacgtagaaaaggcggtaatttcaacattcccaatcaaagagagcatagaagcagtagacaaatatccggacaggcttataggcgcagcttgggtaaatcctatggaaaaagacgctctcgatattataaaggatgctgtaaaaaatcacggctttaagggaattaagctgcatccgctttcccaggcctatctgcctaacgatgaatgcgtattcccgatagcggagcttgcgggcgagcttgatattccgcttatgattcatacgggacatcctcctttttcactgccgtggagcgtggcacagcttgcggacatatatccggatgtcaaaatggtaatgattcatatgggtcacggcaacggtatgtacgtgcagtcggcaatagatatggccaagaaatatcctaatttatatctcgaaacctcaggaatgcctatgcatacgaaaatcaaagaagcttacgagcaggtcggagttgacaggattatgtgggggcttgacgcaccgttccatcatccgacggtggaaatgcaaaggacgattgtcagcggccttaacgataatcagcttgaagatgtattttataataatgcaaaaaaactattaaaactttaggcgtataaaatattgttgtattagaaaaagcggacgagaggagatgctcgtccgcttttgtacatatatgtatgataattgatgagatgaaaaacatctccggtaaaaaataaaaatttcttgtaaaatatatacttaattgacttgacaatagcagtgtaaggcagtataatttatcgttgtaacgcattactgctttatcataataaagcaaacgtcgggctaagcactaatatatgcagacgtgaaagataagaaaaacaggtgcagaagcagaagcgcgtacaaccaaatacatataaatgcatacagaaaggaccctgaattgatagacgaaaaactcttaaagaacgaggaaaaagcgattttttcactgcgttcgttatataaaaaatatggctatatgccatttaaaatgagcaaatttgaagaatatgacctttatgtaagaaataaggactttcttgtaagcgaccgcatcatcacctttaacgatacgaacggtaagcttcttgcgctcaagcctgatgttacactgtccgtaatcaaaagcggagttgacgcgccgggctgcaagcagaaagtatattataatgaaaacatttacagagtatcaggcagcacgcatcagtacacggaaataatgcaggcggggcttgagtgtataggcgatatcgacctttacgatgtgtttgaagcggtacaccttgcggcgcagagtctggcgatgattgcggatgaattcgttcttgaaatttcccatctcggcatactttccgcgcttctcgaagaggcgggcggcagcgacagtttcagaaaagcagtagcgcagtgcatcgcggaaaagaatgagcacgaccttgcgcgtatttgtgaagaaaacggggtttccgcagagaaaacagcgaaaatatgcagttttattgggctctacggcgatatgaaatcagtgatagaaaagctcgataaaatctgcgaaaccaaatgcggaagagccgcgctttcagagctgtgcgagcttcaggcgctcattgaaacgacggaatatgcggataaagtttttctcgatttttccatagtaaacgatatgaactactacaacggcatagtgttcaaaggctttataaacggcatatatgaaggggtgcttgccggcggcaggtacgacaagcttatggaaaagatgggcagaaaatcaggagcggtcggcttcgccgtttaccttgatctcctcgaaacgctcggaacagagagcagcaaatacgatgtcgatgtgctgcttatatataatgaaaaaacggatgtaaaggtggtagctgacaaagtcagagagcttacagaagcgggaaagagtgtgagtgcccagaagaccattcccggcaaattgagatacagagagctcataaacatcgaaaaggaggccagataatgcttaacattgcacttccaaagggcagactcggagataaagtgtatgacatgtttgaggccgcaggctacgaatgcccgcagattaaggaaaaaacgcgcaagctcatatttgaaaacgaagaaaaacaggtgcgctatttttgggtaaaaccgtccgatgtctcaatatatgtagagcgtggagctgccgacatcggtgttgtcggcaaagacattctcatagaatatgagcctgaaatctacgagcttgcagatctcaatgtcggcaaatgccgtatgtgcgtggcggggcctaaagacttccgcgacagcggcgaaaaaaagctcaaggtcgcgaccaaatttaccaatactgcgcgtcagtactatgctcagagcgggcgcgatatagatatcataaagctcaatggctcgatagaaattgcgcctatactcggtctttccgatgtcatagttgacctcgtggaaacgggtacaacgcttaaaaaaaacgatcttgcggtgctcgaagtcataagctcaataagcgcgaggttaattgcaaacaaagcgagctttaagtttaagaataaagaaatagaaaccgtggtcagcaggataaaggagcagataaaaattgattaagatatataattatggagaagttgaaaacagcgaaatattcgcgcggcagaatacagaggaaaatgtcagcaaagcagtaagtgaaataattgcggaggtcgtaaaaaacggcgacaaagcgcttgtatcgtatgcggaaaaattcgatggcgcaaagctcgcagcacttgaggtgacggacgcagaaattaaagaggcgtttggtgcggtagaacctgcattcatagctgtactcgaagaagcagcggccaatatcaggcattttcacgaaaagcaggtaagaagcagctttgttatcaatgataaggacggcgttgtaatgggacagaaggtgatgccgatagagaaagtcggtatatatgtgccgggcggtacagcggcatatccatcaaccgtgcttatggacagtatacctgctaaaattgcgggctgcgctgaaatcgtaatggtaacgccgcctttagcaagcggaaaagtaaatcctgtaatccttgcggctgctaaaattgccggtatagaccgtatctttaaaacaggcggcgctcaggcagtagcagcgcttgcatacggtaccgaatcggtgccgaaagttgacaagatagtcggaccgggcaatgcttatgtagctgaagccaaaaagcaggtgttcggcagagtggcgatagatatgatagcgggtccgagtgaaattctcgtggttgcggattcaacatgcaatccgaaattcgttgccgccgatatgctgtcgcaggcggagcacgataaaatggcaagtgcggttttggttacggacagcagagcctttgcggagcgggtaagcgcagagcttgagatgcagataccaaagctcgcgcgggctgaaatcgcaagagcgtccatagaaaataacggtaaaatcatcgtcgcggaggataatctgatgctggcaatagatatagcaaatgaaattgcaccggagcatctcgagctgtgcatggataatccgtttgactatctcgacaagataaagcatgcaggctcgatatttatgggtaaaaattgcccggaagcgcttggagactattttgcagggccgaatcatacgcttcctacaagcggaacggcgcgcttttcttcaccgctttcggtcgatgactttgtaaaaaaatctcagttcacatatttcagtgcgcaggcgctcgaaaaagttgccgataaagtagcttgttttgctgaaaaagaaggacttggaggacacgctgaaagtgtgctcgtgcgttttagaaaatagtgagaaagcaagggccaatatccgtgccttaggtgcggagaaatatatgatatagacgaagtatatagaaaagggagtaaaaatgagcagatttttcagtgaaaaatataaaaatctcgtgccgtatgttccgggagaacagccgcaggagataaagtatctaaagcttaataccaacgagtcgccgtttccgccatcaaagggcgtcgcagaagcggtagcagcagaagcggaaagacttcagctctactccgatcccgattcaaaggagctcacggccaaaattgccgaagtttacggtgtaaagccgtctcaggtggtagtgacgaacggctcggacgaagtgcttaatttcgcatttatggcgtttgccgatgaaaaaagaccgcttgcgtttccgaatataacatacggattttacacggtatttgccgatattaatcatataccgtatacggaaattccgctgcgctgtgattttacgataaatccggaagattatacgggcataaataaaaatatcgtaatcccaaacccgaacgctccttcaggctatgagcttcctctcacagacatagaaaaaatagtagcttcaaaccctgataaccttgttataatcgacgaggcatatgtggattttggcgccgagagcgcagtgccgctcataaataagtacgataatctgtttgtgacacagacattttccaagtcgcgctcgatggcgggggcaagactcggcttcggcattgccagtgaagagctgataagcgacataaataccatacgctattcgacaaatccgtataacatcaacaggatgacggctgcagccggctatgccgcactttgcgataacgattattatatgaaaaactgccgtataatagaagaaaaccgtgagcaagcagcttccgagctaaaaaagctcggctttaccgttcttccgtcaaaggcgaattttatctttgcaaaatcggagcgcataagcggtgaaaagctctatacagaactcaaaaaaagaggtatacttataagacactttgataaagaaattatcagggattataaccgtattacgataggcacgcaggcgcagatggaaaagctcgtgcagacagtaaaggagatattggaggaacaggaaggatgagaaatgcggaaataaaaagaaaaacggcggaaaccgatattatgctgaaactcagtcttaacggcagcggcaggtcaaactgcgatacgggatgcggctttctcaatcatatgcttacgctctttgcaaaacacgggcgctttgaccttgatgttttctgtaaaggcgatactgacgtggacgatcaccataccgttgaggatatagcaatttgtcttggcaaagcgtttgccgctgcgctcggcgataaaaaaggcatcgtaagatatggaaatacgctgctgccgatggacgaggcgctcattctcacggcagtcgatatttcgggaagaggcggctgcttttatgcgcttgaaatcccgacagaaaaagtcggtacatttgatacagagctgtgccgcgaattttggtatgccttttcgcaaaatgcgggagttactctacatataagacagcttgcgggcatcaattcgcatcatatcatagaaggcgcgttcaagtccgctgcgcgcagtctcaaagatgcggtggcgatagacgaaaagtatgcggacgaaataccgtcgacgaaaggaagtctttagatgatagcaataatagattacggagtgggcaatctgttttcgctgcgctcgtcgctcggctttatcggcgccgaagcaaaggtgacatcagatccgaaggaaataaaaaatgcagataagctcatacttcccggcgtaggcgcatttgcagacgctgcattaaaattaaaagaaagcgggctcgatatagttataaaggaagaagctgcacgcggcaaggagcttatgggcatatgccttggaatgcagcttctatttgaaaagagctatgaatacggtgagcacgaaggacttgggcttataaaaggaagcatagttcctctggcaggatatattccagaaaacctcaaaataccgcatataggctggaacgccattagcttcaaaaaagagcacaagctttttaaatacataaaagagggcgattttgtgtattttgtgcactcctactacgctgcggactgcgaagacagcgtcattgccgataccgagtacggagcacgcgtgacggcggcggcggccagcggaaacataatgggctgccagtttcaccctgaaaaaagcggaaacgtaggacttaatattttaagagcattctgtgaaacggagaattaaaatgattattttaccggcaatagatttgtatgataaaaaagcagtgcgtcttttcaagggcgattacgaaaatatgactgtttacagtgacaatccaatagaaattgcgcatgactttgaaaaaaagggtgcagagtacatacatatggtagaccttgagggcgcaaaaaacggcacgacagcaaatattgaaatagtagctaaggttgccaaagagacaagcctattcgttgaaattggcggcggcatccgcgatatggagacggtgaagcgctattttgactgcggagtttcacgcgtaattctgggtacggcggcggttacagacgagagtttcttaagagaagcgacagcggcatacggtgaaaagattgcagtcggcgctgatgtaaaggatggtttcatagccataaaaggctggcttgaaaaatcgcagtattcgctcgcagactttttcgataagatgcagcacatcggtattaaaaatattatctgtaccgacatatcaaaggatggagcgatgaagggcacaaacctcgctatgtacgaagagcttgcagagcgctactctttggacattacggcatcaggcggtgtttcaaatttagatgatgtaaaagcgctgcgctcgatgaatctttacggtgcgattatcggcaaagcgtattatacaggcgcgatagatttaagggaagcgatagaggtggcaaaatgattaccaagagaataattccgtgtctcgatgtaaaaaacgggcgcgttgtgaagggcgtgaattttgaaggacttgtcgatgtttcatctccaaccggacttgctgagtactattcggaaaacggagcggatgaacttgtattttacgacattacagcttcgtttgagggtcgggagctttttaccgatatactgacgaaagttgcaagaaggatatttattccgcttacggtcggaggcggcataaacacagtcgctgattttgaccgcgtgctcaaatgcggcgcggacaaggtgagtgtaaattcgggagctatcaagaatcctgagctcataaaggaagcggcgcagaaatacggcaaccagtgcgtagtactttctacagatgtgaagagggttggcagcgaattccgcgtatttgccaaaggcgggcgcgatgataccggtatggaagcgataggctggattaaaaagtgcgttgaactcggcgcaggagaggtcgttgtcaattctatagacactgacggtgtaaaaaagggctttgacatcgaaatgctgaaagccgttaccgcggctgtaaatgtacccgttattgcttcgggaggtgctgggtcgactgctgattttataaatttattcagagaaatacccgatatagacgcaggccttgctgcttcggtatttcactttggtgaaataaaaatccctgatttaaaggcggagcttgcaaaaaataacattacagtgaggttgtaaaatgacaaacattgaggaactaaaatttgacgataaagggctcattcctgcgatagtagtcgatgccgtgagcaaaaaggtgctgacattggcatatatgaacagggaaagccttaaaatttctatggaaaaaggctgtacctgtttttttagccgttcgcgccaggagctttggcttaaaggcgaaacgagcggcaacttccagcacattgtgtcgatagcagcagactgcgacaaggatgcacttgtggtaatggtagaaaaggatggccccgcgtgtcatacaggcagtgattcatgcttctttaatcccgtataccaaagtgcggagttgcaggaattcagcatagacggactttacgatatgctcgcaggcagaaaagaagagagacctgaaggctcgtatacgacgtatctctttgaaaaaggtatagacaaaattttgaaaaaggttggtgaagaggctacggaagtaatcatagccggcaaggctgatgacaaagcggaaacggtgtacgaaattgccgaccttgcttatcatataatggtgctgatggtgcagatgggtataagcactgaggatatccgcaaggagcttgcctcgcgccatatcatcgatcataaggtaaagcaggaaaagatgacgaaatgaccgggcggcagaacggcgagatgaaagaatgataaagtaatggaataaaaaatgagggaaaaaagatggaaaaaacgacgatgtccaattaccatacgcatacagtttactgcgacggaaatgatacgccggaagcgcttgtgcttgaagcgataagactcggctgcccgtcaatcggattttcagggcattcttttaccgaattcgaccaaagctactgtatgtcgcgcgagaaaacagaagaatacaaaagagaagtgcgcgccctcaaagaaaagtatcgcgggcagatagagattttgctgggggtggagcaggactactattctgaagagcccacagatgaatacgactatgtgatcggttcggtgcattacatcttaaaagacggcgtgtaccttacagtcgactggacgcgcgagcagcaggaagaagatgtgaaaatttattacggcggtgatttctatgcctatgccgaggattattataaaatcgttgccgatatttacagaaaaacaaagtgcgacatagtaggtcatttcgatcttatcactaagttcaatcaggatgacgcgctgtttgatacgaaagatgaaagatacagaaacgctgcgcttgctgctgtacgtgcacttttaaaaacacctgctgcctttgagatcaatacaggggcaatagcgcgcgggctcagaactgagccatatcctgcaaaatttatactcgacgaaatttatagagagggcggggaggtgctgattacatcagattgccacgcaaaggaaaatctgctcttcggttttgactgcgtatagagattaaattatgtaaagagtataaaaagtgataagtttaaaaataagaaaaaccgcgcggtgcaatttattgatttccgcgcggcatatttttgtcctattcagcttccgtttgttctggctgctctgcaagtactttttcgtattctgcaaatatagcgtctttgattttgtttcttgtttccgaattaagcgggtgagcaatatctctgaaatcgccttcgcccatttttcgtgacggcatcgcgatgaacggtccattctgaccttcgataatcttaatgtcgtgtacaacaaattcatcgtcaaatgtaatagatataacggctttcatttttccttcttcgcttactttgcggactcttacatcggtaatattcatagatacaccaccctttcggctcaattataaaatgtagtattgcatactttatgtatacagctataattataaactgtcagaaaatttttggcaagtattttttaaaaaatctgacaatttggttgtatatctgttattttgcgctcttcatcgacatcgccgagaagcaatagcgacacgtagtcgctgattttcttgcgttcaggcacggtgcttgtcatcaccactcccgtaccgacaatactgacatcaaactcgctgagtatttccgcgataccgttgacgctgccgccgccgcgcataaagtcatcaatgatgatcgcacgcgagccgctttttacagcgcgcttggaaattgacattttctgtattcggtcgtaagagccggaaaaatagttgatacttacagtagagccctcgctgactttagcttcgcgccttatcacgacaagcggcaaattgaggagatacgctgtcatcgtagctacaggtatgccttttgtctctattgtagctataaaatctgcacccgcattttgaaatttacgcgcaaatacagcagctacgcggcttacagtatacgcgtcgaacataatatcggaggtgtagagaaatccgccgccgagtatgcggctcttatcgcgcagcctatcgcacagctcttcctgaagctcgcgcactttttcatctgatatataaggcacaaattttacaccgcctccagcaccgggtgtagtctcgatgcttccgagctccatagctttgcagatttcagatacgtttttcagatcctcgctgatgctcgatttagccgcgtcaaagagatcacagaagtatttaaggctgaaatttttgttaggggcgtcagttaaaattttcataattgcgccgatacgcatagtttttttcattgcggaggctcctttcattataaataaatagtaaatgtttttcgtttttttgtcaaattttatctcaagcgaaaaaagtgctgaaagagtaatgcaaggttgatttttatcagtgttttgcgtataatataaaatagcagacagtatgtttttatagaggagatttgacaatgataaatttgtcacagataaaaaaagctcactgcattggcataggcggcattgggctttccgcaatcgcggaaatactgctttctcggggcataatggtgacaggttccgatatgaaagaaagtgaaattacagataatcttatagcaaaaggtgcacatatttttttaggccatagagagaaaaatgtagaaggtgcggatgttgtgatatattccgcggcggtaggcgcagataatcccgaactcgtgcgtgcaaaggaactcggaattacgattatgacgagagcggaaatgctcggagagcttatgaaggagtatgagagcagcatagcgatatccggtacgcacggaaaaactactacgacatctatggtttctttgattcttgataaagctggcaaaaatccaacgatactcgtaggcggcaatcttaccgaaatcggcggtaatgttaaaatcggcaagggggattttttcattacggaggcgtgcgaatatatggacagcttcctttcgctgagaccgaaaatagagataattctcaatatcgattcggatcatctggattattttaaagacataaatcacatagtagagtcgtttgacaggtttgcaaagctcgtgcccgccgacggcatcatcgtagcgtacgacgccaattcatttgtaaaatcggtagttgataagcttaataatgtagttacttttggatataacgaaagcagctcgtattacgcgacggatatcgcctttaattcgagcggtaggcctgcgtttacggcaaattgcggcggggaggctctcggcagaatacagcttaaagtgccgggcgagcataatattttaaacgcgcttgcggctattgcgtgctgtcataaacttggcgtcggtatggacgtcataattgagacgcttgaaagctttggcggtacggaaagaagatttgatatcgtgggtatgacagatgcgggagtgcagattgtagacgattatgctcatcatcctacggagataaaggcgacgcttgcagccgcgcagaatgtaccgcataagcagctatggtgcttattccagccgcacacatatacgaggacgctggcgctgttcgacgaatttgcggatgcgtttgaaaaagctgataaggtggtgctggcggaaatatatgcagcgcgcgaaaagaatatatataaagtcagcagtaaggagcttgtaaacgaaatcaaggcaaagcatccgggaaaagaagtttattattttaaagattttgacgaaatagccaactttgtgagcaacaatgccgaagcaggtgatctcgtgattacgatgggagcaggagatatttacaaagtagctgatattatgctggaaagagactggaaaaagaggtaataaatagtaatgacatatgaagagtataaaaagacggaagagaagagactcgctgtgaatatagcacaccttgagcgcggcgtaaaatttatagatataaatacagcctacattgatgaagaggctgtaataggcgcgggcactgttatatatccgtgcgtcgttatagagggaaaaagcgtgatcggaaaggattgcgtaatcggacagaatagcaaaataaaggattccaaaattggagacggtacggacataatgagctcggtgataactgaaagcgcggtaggagaaagaacgcatatcggtccgtttgcctatctgagaccgggaagcaaaatcggaaacgattgcaaggtgggagactttgtggagattaaaaattcgtcattcggcgacggtaccaaagcgtcgcaccttgcatatatcggcgattccgatgtgggagccggagtcaatataggatgcggcgtcgtgtttgtaaactacgatggcagagacaagcacaggagcaatgtcggagatggtgcgtttataggctgcaatactaatctcgtgtcacccgtaaatgtagaagaaaaagcctacattgcggcgggcagtaccattacacaggatgtaccggcaggcgcgcttgccattgcgagagaaaagcagcgcaatttagagggatgggttgagaaaagaggactgttaaacaagaaaaagtagtagttaaaaagagtactaaggaagaggtgtaaagagcatgaaatcaggagcatttgcggattataaggtgtttgcgggcaactctcacagagagcttgccgaagagattgcgtcgattatgggcaagccgcttggtaaatcgactgtctcgacattcagcgacggtgaaatagccgtcagcctatgggaaacggtgagaggtatagattgttacatagtgcagcccacatgcgatccggtaaacaataatcttatggaacttctcattatgatagacgcgatgaagagggcgtcagcaggaagaataaacgctgttattccttattacggctacgcgagacaggatagaaaggctaaggcgagagacccgatcacatctaaactcgtcgcggacctgctcgtcgctgcgggagcggacagagtagtcacaatggatcttcacgcggcacagatacagggatattttgatatacctgttgatcatctgctcggtatgccggtactcgcaaagtactttggagaaaaaaatatggaggatatagttgtcgtatcgccggatcacggcagcgttacgagagcgagaaacctcgcagaacatcttaactgccctattgccatcgtagataagagaagacctgaacctaacaagagtgagattatgaatataatcgggaacatcgaaggcaaaaactgtattctcatagacgatatgatagatacagcgggaacaattacaaatgcggcaaatgcgataaaggaaatgggcgcaaagtcggtatcggcggcggcaacgcacgccattctctcaggccctgccatcgagagaattaagaattcggcgatagaagaagtcgtgctccttaatacggtgccgattccacaggaaaagatgctgccgaatatgaaaatactctccgttgcacctctctttgccgaagcaatggtgagaatctataccaatgattctgtaagcaaattatttgactaacggtaaatatatgtatatcatcgcaggactcggcaatcccggaaagcgctacgaacatacacgccacaatatgggatttttgacaatagataagatcgccgaagaactcaaaataaaagttgataagataaagtttaaggccttggtcggagaagcgaatttctccggccaaaaagtcgtgctcgtaaaaccgcagacgtatatgaacctttcgggtcagtcgctgcgcgaagtaatgaacttctacaagctgccgcttgaaaatctcacggttatatacgacgatatagatattaggacaggcacgataagaataagaaaatcgggaagtgcaggcacacataacggtatgcgcaatataatatataatctggcggacgacggatttccgcgcataagaataggcataggaagcgaaagaaggggtgaccttgccgattttgtaacgggcggatttgcg

SEQ ID NO: 225 - DNA, 1927 bp, Unknown
  16S sequences of unknown bacteria
tcgtggttatctgtgtccgagtcatcgccccgcagcttgtccaaggatacaaatttgcgcgggtattttttcttttcctcttttctgcgcatatcttcgctgtgttcggcattgcattttttatacagctctttattagcctcaataaagataaccgagtattttgaggacaaattcttatcctctacctgaacaaattttctttcctagttttcgggcttctgcttgaattcaaaaaattctttcgcggtcatatgtatccattcgggattttccccgttacagcttttatctttccatactaaaaaaatacttttcaatttattttcctccgttcaatcattcctgaaaatctcaaaaacgattgatacggagggctgcggcagccgcatttacaccgccaccgcaaatgttttatatacagaacgcaaaaggtccgaccaatttcaaagccttttcgagcggcatttttattggtcttttcttccttaatttcgttaattttacgggcattattacagcccgctttctttaaaatacagcttgttcggagttttaaaccccttacagctatatcttcaccttatgccttctgttatttttcactttgtcaccttgcagtcgcctatggagcactcattctttcctttgttttgtatacagcaaggtttatacagtacatcggtatccgcccccttaaaatgtagaattatgtgttattttgtcgaataaaaaaagaacgagcgccaaacttgcttttcacaagctcggcgctctgttgcatcctcggtattttacaccgatacatattattttttgtgattccatttgaatcacctgtttctttgatttttatgctcctatacagtattaaatatcacaaaactaatactgtgagatatctgtaaaattgcttttttgaaatgcataaatgcaaccctccaaaccttaagctgaggaaagccgaaccacatacgccttaaaaatgaaaatttaccgttatactttgccctgtcatttaaaataaggcggcattccaaaaataagcgcaagacaggtggagaagtgcgccgagcgataccttatgaaattcgactttccacgacttaaccaagctgccgataaataatttttataagtaatattttaacaggcattctccgcttttaagctctgcttcgtgcgtaccgtcttcaaaggtaaagccctcgggcaaaaggatttttccgtgcagcttttcagccgcggttatttttaaaataaacgaattttcatcggtacgctcccaattgattgcaattttgccgatcggcgtatcgtaatgcgcacagacgctgttcagcttttctgggaaaagcggagcaatatcaacattcgtcacatccctgcccgtcgggtttatttttatacccgcaaggtacgtatagaaccatgccgaaacatcgccccaaaaatggtgattgagcgataacactctgccgccctcggggtaaaagccctcccaaagcgtggtagcgccccgctttatccagttgccgtaggacggataatcgggtcttactatcatattataagctaaattcacatggccgttttcggcaagcacacggtaaatcaccctgccgcccagcacgcccgtgtaaaaatgcccgtcttcatcggctatatatttaatgagcagtttaagtgccttcggcttttcttcgactgtcagcataccgtaatatatcgccatagcctgacccgtttgagtgccgcctttaatctcgcccgtttctttgtttaaaagcttttctctgaatgcagtctttaccctttcggcaagcgccagcgcaaattgtctttgcggctgctgccctaatacctcatacacaaatgcggattttaccgctatatcgtaggtcaggatagtatcggtcacggcaag

SEQ ID NO: 226 - DNA, 3613 bp, Unknown
  16S sequences of unknown bacteria
agccgtttcaggatgccggttaccttcccgcaacgctcgcactgccccgcacgggattttggcaaagcagctcaaactggcttgcccgctcataaacaaaaattcttttgccgaacacctcgggcagttcctcctttttcacctcggaaagcggaattgacggaacataggggtcggcatgggcaatttcggtatggcggtgaagatcgtcggtggttatgccgtcaagccgcgcaagggggctttctctgcttatgagcaccttatagttaaactcgcatataagctcatatgccagccctttttcctccatcatgcccttataatatttatcaaagctttgggcatatcggattatgccgagcttcgagctgtcggaaagcacgttttttaccgccgtcatggaattggtctcgcgatagtatatctcggcgtccctgtttttcccgagcagccttgtgaactttgcaaaagcgtcggcaacatagcttgcccgcggaaccgacgccgaaaaacgctgcttgtcggttttgccctcggaaaacatactttcgatgttgtccacctgggcgagcaccgactttgcatagtaaacgaaaatttctccgtcgtgagtcagcgtcatgcccttgctgcttcgctcgaaaagggtgacgccgagggaggtttcaagctcctttatggcgcggctcaaagccgactgacccacatacagcgtttcggccgctttatttaaagaatttgtcctggctatttcgacggcatatttcatgtggagcaggttcatgctttttcctccgctttagcttttgcaaaatatcttgataaatttaccggtgccttttgggcgccgatggtatcaaacattgttattctaccacaaaatccttttaaaatctacaaaaatacccgttaaaagtttttcttttaacgggcagaaagtttttatttgccgagggccttcatgctctcgtcgattagagccagctttttgttaagcttttcggcggcctcgcgctgattatccacaatattcttgggagcacggctgacaaaggcttcgttgttaagctttgccataacgcccgcaagcagcttttcggtgtcggccttttccttttcaaggcgctttttctcggcctcaaagtcgataagctgatccatgggtatataaattttggcgtctgaggtgacaatggaaacggctccgtctatgctccattcttcgccgaccttgacctcgcttgccgatgcaaggcgcttgaagaaaacggcgcaggtttcaaaggtttcgatatgagcggtggcaatgtagacctcggccttttttgagccgggaacattcatttcggcgcggcggcttctcaccgctctgaccgcctccataacgcgggaaaactcggtttcctcgtcggcaaagttgagatcttccgaatattcggggaaagaggcaagcattatggtctcgccctcgtgggggagcgtctgccaaatttcctcggtgatgaagggcataaagggatggagcagcttaagcgtacccgaaagcacatagcaaagcactcctcttgccgtctttttggcctgctcgtcctcgccggtaagtcttgcctttgcaagctcaatataccagtcgcagaaaacatcccaaataaagtcgtaaagcttttgaacggcaattccaagctcgaatttttcgagattgtcggtgacttctttgaccactctgttatatatcgaaagaatccacttgtcctcaagggcaagtccctcggggatgtagggcgcgggctcgtcgtcgtcaagattcatgagcacaaatcttgcggcattccacagcttgttggcaaaattgcgggaggcctccaccttttctggagtgtatctcatgtcgtttccggggctgttgccggttgcaagggtaaatctcaaggcgtcggcgccgtatttgtcgatttcaagaagcgggtcgataccgttaccgagggatttggacatttttcttccctgagcgtctctgactatgccgtgaatgaacacggtatcaaagggggccttgcccatgtgctcgacacccgagaaaatcattctggcgacccagaagaaaattatgtcatagcctgtaacaagggtggatgtgggatagaaatattcaagctcttcggtcttttcgggccagccgagggttgagaagggccaaagagccgacgagaaccatgtgtcgagagtgtcggggtcctgggtcaaatgatgcccgccgcacttgggacaggtgtccacgctgtcctccttggtgacgaccgtttcgccgcagtcgccgcaataccaaacgggtatgcggtgaccccaccaaagctgacgggaaatgcaccaatcgcggatattttccatccaatggaagtaggtcttttcaaagcgctcggggataaatttggtctcacccgatttaaccgcctcgattgcgggctttgcaaggggttccattttaacaaaccactgtcttgagactctcggctcgacggtggtgtggcagcgataacactcgcccacgttgtgagcatggggctcgaccctaacaaggaatccgcccttgtcaagatcctcgacaatgcgttttctcgcctcatatctgtcaagtccctgatattttccgccgttttcatttataacggcgccgtcgtcaagaacgtttatgacctcaagattgtggcgaagtcccacctcaaagtcgttggggtcgtgggcgggggtgattttaacaacgccggttccgaattcggggtcgacatagctgtcggccacaataggaatttcacgtcccacaaggggaagggtcagcgtcttgccgaccatgtccttatagcgctcgtcgtcgggatgaaccgccacggcggtgtcgcccagcagcgtttcgggacgggtggtggcaagctcgataaagccgctgccgtcggtcagcggataacgcagatgccagaaaaatccgtcctgctcggtatactcgacctcggcgtcggaaatggaggtcttacaatgggggcaccagttgattatgcgctcgccgcgatagataagtcccttgttgtagaggtttacaaaaacctcacggacggccttggagcagccctcgtccatggtaaatctctctctcgaccaatcgcaggaggagcccatttttctgagctgttcggttattctgccgccgtatacctttttccattcccatgctctctcaagaaagccctcgcggcccagttcttccttggtcacgccttcctcggccatggcggccacgatttttgcctcggtggcaatggaagcgtggtcggttccgggcagccacagtgtgcagtatccctgcattctgcggaaacgggtcagaatgtcctgcagggtgttgtcaagagcgtgacccatgtggagctgaccggtgatgttgggagggggcataacaatggtgtagggtttcttgcttttatccggctcggcgtgaaaatagccgtttttttgccaaaagtcgtaaagtcggctttccaccgacttcggctcataggttttgtctaactgtttacccatagttacattccttttctttttattacgtatacaagcc

SEQ ID NO: 227 - DNA, 32759 bp, Unknown
  16S sequences of unknown bacteria
ttgaaaattacagactgagagtcctcgtggaatgcggggtgaatctatgaaaggcaaatctaaaaaatcaacctattccacaacctttggtgttgacccaaattatccaccttttagcgctgtcccgcgtttccgatttacacacaataaaaaaaccgatcttaaagatcggtcctttttaaatggagcgggctatgaggttcgaactcacaacctcgaccttggcaaggtcgcgctctgccaattgagctaagcccgcgaaaatttttaatgcgttcaacgatgcctgattatttcaaaatgtcaagttcgaaaatagacttttttctggaatttttcggcgcgcttatatattcgcccgaatcaatcagagccgcggtttcgtcgtcaagaagggcttttagcagaggctttaattttgcagctttctgcttttctaccgcaatgtaaaacgagagcgcgaggggatagtcgccgttaaaaatattgtcgcggtcagggcggaaagcgtatttattggcacctccgtcgttatccgaggcaatggcgagcacttttatcatatttctatcctcaacctttccgaggacagctattgcggaattatttgccctcaaaatagagagcgcttccgacggcgattttgcgatatttacccatttgcctatgcctgttgatttaagtgcgccgtatttgaataattcgagaacaatcgaatccgaaaaactcgttgtgacgggcataatgtttttgagcgatgcgttgccgacattcatagcttgccaagtatcgaccctcggagctgcggacgatgagaaaattttgtacagttgcgaagtcgttatttcctcgattgggtttgcgacattaactgcgacagtagccacgaggtacgcgaaaggaaacgtgataaattcgtccggcgctttttcgccgcgggggatggctattattgccacatccgcctgtgactttttcaaggcatcaagcgctgcaaacgagcctttcatgtcaatgttagcctttacgccatgtttccccaagagagctgcaagtggcgcttttaggttttggccgagaatatctgagccggctatcgtataagaatccgctgcgaatgctattgagccgatgagcgcaagcgcggcggcgagagacgcgatttttttcatttatctggaaatgcgtgtgttaaattttaattataacttattgtaaattgggttttggttatgccaagcctaaaatcatgcgcgcttcttcactcatcatatcttggtgccacggcgggtcccatacgatgtcaacttttgcggattcgacacctgcgagcgattcaagcctcattttaaggtcgtctgctattgcagggcccattgcgcatccgggggctgtcaatgtgatgtcggcttcgacccgttttttcccgtctggcgcgtcgaggagttccattctgtaaacaagtcccagatctacaatattgacgggtatttcagggtcgaacacggtgcgcgcggtatcccaaatatctttttccgtcacttcctgtttctttggggaggagtcgctttgcttttggacggcttccgcagtttggcatgggcttgccggctgcaagccgagcgcgtcagcgtccttcccttcgattcgtgccatgccgaatatgccaacaacggtgaaattgccgccgagcctgtgtgttatttcgacttcgtttccccttgccagcgtcacaatgagtccggatgggatcatcattgcggggcagtcgcgggaaattttaattttttcggggttttgcatgatgctatttttttaaaccactgcgaggttgtcgcggtggacgacaacgtccttgtgcccgcattttttcttatcggcggaagcgagggattcttttattttatcagagttttcctctgcgagcccacgggctacgatgtctccgctttcggcgtcggctatttcgacgagcgaacctttcgcaaatcttccgacgactccgcggactcccgccggcagcagcgagcttcccctatttctgatggcgtcggcggcgcctttgtccacgaggattttcccgatagtcctgccgaaatgcgccagccatcttttcttcgagcttgtttccgaaggggtagccgcaaagcgcgtgcctgggttctctcccgagaggatttcggtaatgacattctcccgcgcgccgcttgcgataaagacttcgcagccggagctcgccgcgatttccgccgccttgatttttgtaatcattcctccgaccgccgttgcgctcgatgttccgccggctttcgagcgcacgttgtcgtcgattttttgtatgtcttttataatttctccggttccgcccatatccacgagccccggcgcggtggatagtatcaacagctttgaggcttttgaaagcgaggccacgagggagcttaaaacgtcgttgtcgccgaattttatatttagctccgctgcgctgatgcagtcgttttcattgataatcgggacaatgcgatcaccgagaagttcgtcgagcaggtcgcgcattgcccggtatctggagcgcacgtcgaggtcgtcccttgtgagcagtatttgcgccacgcagactttaaacggctggaatagttcggcccaggtctgtatgaggattccctgtccgacggcggcgcatttttgcacggagcttatttttttggggcggagctttaatccgagccttcccatgccgagccccacagcgcctgagctcacgaggattggctgccagccgttttttagagcgagcgcgatttgttcgcaaatcgcgcgcatgcgttctgtgtccaactctccgacgccccttgtaaggacgcctgttccgagttttataacgactcttttattgcgggcggctgccatctgcgtgtgcgacgtttttttgttttgcggcggttatatttttttgaggtcttcctctttgcgcgagagctgggtgtttatgtcggcaatgctcttgtcggtgaggttttggacttctttttcaaattttttaacgtcgtcttcggttgcgccgccggacttctgcaattttttaaaggcgtcgattgcttcgcggcggatattgcgcacgcgcacgcggccctgttctgccatttcgtggcatattttggcaagttcggcgcggcgttcgccggagagcgcgggaatggggcacctgacggcgtcgcccataactgcgggagtgaatccgatattggctacgagaatcgccttttcgacgtctttcaaaatatttttgtcccacggctggacgcggattgtcgaggagtcgggcgtggttatggcggcgatgtctttgaggcgggaagtcgtgccgtaggcttcaaccattacgttttcgaccatggagggcgaagctttgcccgtatggacggtttcaaattcgtgcgatacgtacgatacggcctttgacattgcgtcttttgtcgccttcaatgatgaggatagatccatgatagtttccttttggtttggtgtttttaaatatttttattactcgacaatagtgccgattttctggccttcgattacgcgctctatgtttcccggcttattcatgttgaatacgataatcgggattctgttgtccatgcagagtgaaaacgcagtggaatccatgacggcgaggcgtttttcgagcgcgtcgagatacgaaattttgtcgaacttaacggcgtccgggaattttgcggggtccttgtcgtagatgccgtcaacttttgtggctttgaggattgcgtccgccccgagttcgcttgcgcggagagccgcggtggtgtcggttgagaagtatggattgccggtgcctgccacgaggattacaattcttcctttttcaaggtgccttacggctcggcggagaataaaaggctcggcgattttttccataggtatagccgtctgcacgcgcacggggacgccctctttttcgagggcgttcataagggcgaggccgtttatgacggttgcgagcatgcccatgtagtcgcctgtcgttctgtccacgccgctttgggagccgcttagccccctaaaaatgtttccgccgccgacgacgaggcaaatttgcacgccgagtgaatgtatttcttttagcgacagtgcgagattttttaatatggcagggtcgagcggttcgccgttagtaacgtctttaagggcttctccgctgagtttaagtactatgcgtttatatttcggattcattgtaatcgttgtttagattctcaaatccgcgcatttttttcaacaatattttggcgtcaatggcgcaagccgcattttttttgtttcggcgtattgattgcgcttcaaaaatttgcgcctttttaaaatttttgttctttaattttacatgatagccgctatgggaagtaccgcgggagagctttcataatgcaggtgcgcgaccctataaattttatgttggcgcaaattttttttatggcgggcaggcgcgccgctttgtgaatggggcgtaaaaaggggaggggaaagcctctcaaaattattattttgcacacgctaaggggagcgtaggatagtcgtgctcgatttcactacgcagcacgcgttataaaggtttgcgtttttttaccgtatcatgcggaaggcttttttgcaatgcgcatgcttggattttccatggaagaaatctttgcgcaagaaaggcgcgcggagcaggggacacaggactctttctgtaattagaccaaaatagaattgtccaaaataaaaaaacgttagccgcctttttaggcggcgtcggtttaacataagcgctttttacgcgtaatggaattttgcgggaaattgaaaaatatcccggttgaaatgcgttgctattttgcttcggcgtccggcataattgttatttcgtagggctttttgccgaaaatttcctttgccgcattttgcacgtcttcgagagttatttcggaatatcccgagcgtatggtttttgccagctctatattttcgggttttgcttggcaaaggtttaggacggtttcgagccaatagacatttttgcgcatattggcttcaacctctttgagcaggggaattttcgcgcgctcaaattcgtccattgtgatggacgcggctgttttttcggcgcatttttctatgagggacataacttcccgattgtattccggggtgacaaaagagagcccgattagcaggccgtagtctttaatccacgtgcttgggttgttgtacgcgaacgggctgtaaactttgccctcggcttcgcgtatatccttgcgcatgacatcgtcaaagatgcttgaaagcagattcgcaatgcgcattttttgcgggtcttgccttccgcatgagaaccagagctttgcggctattgagcgtggctcgtcttttgtcaggtattttaaggataccgacttgcctgtttccgcccttttgatttgcgcaaacggattctttttgaccttttcgcgcggcggcattgcgccgaatgtttttgcgattttatcgatagcctccttttcgtcaatatcgcctactatcgatatttccatgtaggagctgcgcaatatgggggtcagccaatctctaatttccggcatttttatttttttgaagttttcgagcgttcccgggactttctctattggggaatcgagaagtttcaggattccgaaagtcagttttgcggatggattggttaggtagtcgcggtaaaaagcctcgccgaattttgcgagcgagtcctctccgtcctccctaaatccaggatttgatacggttgttgccgcgagcgatatgattgagtcgaagtctttgcgcgtgctcaccccgaatatctcgaaactgtttccggaaatggatgctccgagagatgccttcatattgtagagcgcggcggaaatctcggctgcgctttggaattttgtgcctcccgcggttagcgcatatagcgctacaaagtattccggcttatcgccgggtatgtcgagcatgccgttgccgaaggagattttgaagcgaatttcgtcctttttaaagtcggtccgcttgacattcaggcggattccgttttggaaaaggagcattttaatgccgaggtcggcgacttccgattcggactcgattttccccggcgcgccgaagtccgcgaatacgagctttccgggctcgaattttgctgggtcgtggggcgatttttgggcggcggcaaatgtgtcggatacgattttttcgagctcgttctgggggatttccgcctttgaatccgaaaggaatatttttatttttgcccccgagaattcgcgctttaatagctttaccgcgtcggcggcggagaagttttcgagggcgaattttgcgattttcaggtcatcttccggggaagtgaatacgatgccgtcggagaacgccgacactatttcgtttgcgagatcgcggttgttgcgcgtcgattttgaagctattgcgctttcgagctgctggaataactttttctttgcggcgtcgaattccgcttcggagatgtttgccgaaccgaggatttgcctaaaattttcggcgagtgcttcggagctattagagattggggattctgcgttaaatataatagtgcggcagaatctggagaagtcgaacattccggccgagccgtttgtgattgccgagcccggagtgtcggagactttaatgtaccgcgcgtttaccgcgtacaaggcagtctgtatgcgcatgtcttctattctcttttcgagggagtcttctccggtattttgcttggaaacagcgaccgacgcgtacgacttgggcgagttttctatctggtcatagacgctgtcggcgtcgagctccgcgccttcgataatcgacttaatttcgtttgaaatttcaagggagccgaaattgtcttggcggccttcaaagtttttgtcgcctgtgaaagacgagaatgttttttcggcgagggcaaaaattttatcgcaatcgacgtcgccgacaactacgagcacagtgttttcgggcttgtagttggcgcggtaaaaattttcaaaatcgctcttttgcgcgccgtttacgaccttttcaagcccgatgggcattctgtcgccgaaaatagagcccttaaaataatgtgcgatttccttgacggccttgcggtattcgtttgtgtcgcgcgctttcatctccgcgataatgacgcctctttccttgtttattgcggagggctcgagtagcatgccgtcgcaatagtcgcgcagcagaagcattccgtcgtcgagcagcttgttagagacttccggcatgtcgagtttatagacggtttcggtgaagctcgtatgggcgtttgtatcggccccgaaagccattccgagcctttggaaatattcgaccatacttcccgcagggaagtgggttgtaccattgaatgccatgtgctctatgaagtgcgcgagccccctttcggcctcggtttcgtgggcggagccgcgccggacaagcagcctcattgataccctatttggcggttctgaatttttcattacagcaaccgtcatcatattcggcaacttttttactttcaaagagggatccgcgcgaaactgtggagccccaaaaatatttgcagatagcaatgccattatcagaatgcctaatttcttcattttttagattaagtcgtttttcttgcgcaccagaatatgcagtcgtcagagaagtcccgcacgagctccggctcttgcgcgatttccgggcgtacggcggaaaatagcgtgtcgaagcctgcctccgaaagcgcagactcaatttcttcgcgcgaaggagagtggataaatatatttccatgctcgccttcgtaaaatatgtcgccaaagtcgtcgagtaccggctgttgggaattagactgccattgttttttttcgttttcccagtagttggcgttgcgttttgcgtcgcggtcgtgggttgtaaaggcgaaaatccccccgggttttagtatcctgcaaatttccccaatagcgcgccgcctttgcgcggacttgggaatttgcatgagcccgttgaatccgaaaattgcggcgtcgaaagatgtgtctttaaggcgcgtatcggtagcgtcgcacacgaatgtctctatgtccgcgttgtgccgcgcgaatatttctgcggcggcttcgaccattttgggggcgaaatcggttgctgttatgttgccgtatccgaggacgcttagcccaagggatattctgcctgcgccgcagccaaactctattattttatagcttttgggaatatacttttcaaacactatccgctcggagttccacaatccgacgttttccgcggcatacgcgtaatcggcgacgaccagcggattgtcgaagtagttctttacggtttcagggttcatctgtatttaatttttccgaagctcatgcggtcgtttccaaagtagaattcttgcggggaaacgaattcaaacggtcgtttgccctcccaaactgaaagtgccgaatcgccgagtcttagggaatcgttcacatattcaaacgcaaattcggcggcctttgccgcgcaacaggactgcaatatgcgcgcccctccttctatatataacgacgaaatacgctcatgcaaaagcgatttttttaaaaaatcccaaaaaagaggggaatccgaaggttcaggcacgcgcattacggcaattccgcgctcggcgagagatttttcacgaattgggtcggattccattgcgcaaacaaccctcgtgcgacttgcaaattcgtcggagaaaacgtggaaggcggaaatatcgggcaattccgctgtcgacaattttgcgtcgaaaatgagccttacggggcatttttcgggttttccgctgactcttgcggtgagccttgggttgtcggccaacaaagttccaaatcccactccgatggactgaaaaagcgagcgccatttcattacgtcggctgccgcgtcttcgcctgttatgcgggttctctcaccgcgctttgtggcgattttgccgtcgcttgacatcgcgtatttgagcgcgattaccgccttttgcgaagttatggattcgttgaaaataaaatttagccgctttgcctgctcttcgagaatcccgaatgaacattctatcgaatgggattttaagatttgctcggcgcggcccgaatgagccggattgggatccttcgtcgccgcaaaaaccctcgcgattcctgccgaaattattgcgtcgcaacacgcccccgtacggccgcgcgtgctgcacggctcgagtgtgacgtacaaatcggcgcccttcggagactcagatgcgtttcttagacattcgatttccgcgtgcgcagccccgtctttcgtatgccagccctcggcgataatgcgtccgttttttacaaggacagccccgaccattgggttcggggatgtggcgccccagccgcgctttgcgagctcgagcgcgcggcgcatataaaattcggcgttgggcattttagcctcttacaaatggattagaagttttctcgactcctacggaggtcgggtatccgtgcccgggatatatcacggttgagtccggcaactcgtatattttctttaccgacttttcgagagtcgggaagtctccgccccagaggtcggtgcgcccgacgctgccttcaaaaatcaagtcgcctacgaaagcgcaagttttgccttcgtcttcaaaaataaacgcaaggctgcccggacagtggccgggaacttcgaggcattttattttgaagcccgcatattccagtatgtcgccgtcttttggctctacgcttacgacggttttttcgagttttatctgcccgaataggcggctcgtctggaattccggattttcgatgagctgtttgccttcggtaccggctataattggcgcttggcaggcggcggaaatttttgcggcgtcgccgatatggtcccagtggccgtgtgttattagaaccgccctgagcttcaagttttcctctttaaggcgcggcattatttgatccgccgagccgaatggggcatcgacaaggactgcttcgccctgcgatgcgccgtaaactaagtacgagtttgtatcgagctgcccggacgggaatgtttcgattttcatcttcatttttaataattgtacgctttgagccaagttgcgagcaggtctttccattcgtcaatgggcttgtcgagtttgcggagggcatagccgtgtccgccgctttggaatatatggacactcgctgggactttcagttcctttagagcgaggaaataggatattgcggagttgacgaggccgtcgtcgagcgtttgcacgatgaatgccggaggggtgtcctttgtgacgggcaattcgccggcgagcctgtacattccgttgtagtcgtgcccggggttcttagagtttttccagcgcttttcgttgccgggttcgtcgcaataggcgggataaatcaggatagttccgtctgggcgcgcggagagcccgtctatattgtctattggctcgtataatttttttgcgtagtttgtcgatgcccttgccgataggctcgcccctgcggagaagcccattacggcgattttatttgggtcgacattccattcttttgcgtttgcgcgcgccgtcctgatagccctttgggcgtccataagcgctcccatgggattgttcgggacgcggtattttagaacgagcgccgagactccctgcgaattaagccattcggcgatttccgtgccttcgtgcccgtaagcaatcacaccgtatccgccgccggggcagactacaaccaatcctgtgggcttgtcggactttgccttgaaaaattccagagcaggcttggagacattgcgtatgattagcactttgtctttcttgccaatccaagtatcttcaattttagacgattccggctcggcggcggatttaccaggcattttgccttccggccataaatcgaatttttcggaggcgagagtaagcgacaccgctgcgaatgcggacagggcaatcaataattttttcatcttttttccccgtcgaaattattgtgttcgagccattcttcgtacaaatctttccattccgatacgaggtcggccttgttgttcaagccgtagccgtggccgcctttatcgaacatgtgcaggtttgcgggaactttgttctttttgagtgccagataataggcgattgccgcgtttgcgtagaagtcgtcctgcgtctggacaataaacgcgggtggggtgtcttttgtgacattcaagttttccgcaatggcgtaagttgaattgtagtcggcatcgcgcaagggtttgccggaccagcgcaagtcgttgccgggcttgtcgcaataggcggggtacacgagccctgtgaagtctgggcgagtggaaagggaatcgattgcgtctattggttcgtaggtttttttgtcgaactgggtggaggcgcgggcgcagaggtttgcgcctgcggaaaagcccattatacctatcctatttgggtcaatattccatttttgggcgtttgagcggactattctgatagcgcgctgtatatccataagtgcggcttggggcttgtttggaacgcggtagaatagaattgcgcacggaatatcttcgtccgaaatccagttggcgatttgcgtgccctcatgattgcttgcaagccccatgtacgcgccgccggggcagattatcataaagcccgtttccctatgcgtctgcgggaggaatacttcaagtctcggcagttctcttatttccgggatttttccgttcttgtctgtgattttgtcggcgtcggcgccgggcattttgccttccggccaaacggggatggtttccctcattacattgtcggcgtcggcgtatgcgagcgcggcggctgttattgcgagaagtgcggctatatttctaataatatgtttcataaatttgtcctttgatggaacattaaaacggtaaagcccgaatctatcaagtaaagtttttgagcttgcggatattgttttgtatatttttcttatggcgtttatcttgctttccttgtggaagtctgccttaatttcagcacatttagaatataattggagtgccctttttgtaaattttttgcgaaggcacgcaatgatttttaactttggctaataagtgcctagcggcggagggggaggtaggcatttatatgcggatatttaaaaaaaagtcccgctgctttaaaaaatgaaaaaaaccggacttgaaagtccggtttttgaataaaagctgttagcagttttcgtaacgctggcggagcatattgttgaaagcggccaccttcttcttgcggcgcttgatttcgctcggcttttcaaagtatcttttctggcggatatcgcggattactccttccctgtcgagcttctttttaagtctgcgcagggccttttccatcgcttcccccttgcggagtttaacttctacgggcatctttgattcacctccttctttctttgtattcccattgggaattaaaggttcaatatttttattttatgcggcgcacgtcaagcggaaaattttaacagccgcaaaaaatccagactttgttttgcggctgtttatttgcggagaatctttgttatatggaaaaatcccccgaaacttttacgcggtagaaatcgccgtcgctttcccacgacttgtcgattttactttcgggaacgaggcgcttggggaaaataattgtcttttgggagtcctctgcggatttgtagtcgagcttcgagaatttgccgtctttgaccaaaacgtcaactttcccgccgccgtacgccggcagagtgaatgagaaatctttccagctttccggcgccgcccacgctactttcatttcgcctttctcattttggtgcaatagcagattgttgaaagcgtaaatgaagtttccggcagacgacacaaaccacggattgttcccggtttcaagaatttcccacggctccttgaaaaggccgacgcccgacattgagagaatggcggtgtcgtaggcgttctttgcgtcgccaatgcaggagaatgatgagctaagccagcttgcgtaccaagagcaaaccgattttccgacgggaaccatattgccagccgaatagatgtttttataaaagtcgcgcacggcggctgtccccttggggtcgtccaaagaaagaaccgggaatgggaaatatccgcatattgtcacaatgcttttttctttgcagccttcaaacggtatatacatttcgtcgttttgcgggagggtcttgcgcaacccggcggccgtttccctaaaagttttcgcggtctcggcatcgactccgagaatgtcggcggcctttgcggcggtctcgaatgagtatattgcgccgcacgaggttaggaatgcgttttccactgcggggccgaggcgttcgatgtcggtgcatttgcctattgttatcctgccgccgtggttgtaaaccatgtgcgagagcaggaacagggcgcactctttcattacggggtaggcggtttctttgaggaattttttatcgcctgtgtatagatattgcttccagcccgttgccgagattgtggacatatggaagacgtggtcgagccagagtccgtcggttgtgccttccgagccgtcttcgtttgtttcccatacgtatcttgcgcctattttgttgaaagtcggggcgcggtagtatgaaaccctcattatggcgggggcgaggagttttctgcggaatacacacgggcgttcggagaggtcgaatttacccgccgacattgccccgaccgaagtgtagaattcgtcccagccgaagtatctgccagaccagcccgcgccgtgcccgaatatcgtcactgggaacgaccaccttgtggcgacggttttcatgtggtagagagatgtgaggtatacgtcggatattgccttgtcggggattgagactttcgagccttcttcgtagaattttttccattctttcttatggtcttcgagcagccctccgaagcctgctttggcggcttctagcagttttgcggagcgttcgtcgcgcacggattcgggaaattcgtcttggcgggcagtgttcgagagctttacgacgtccgagtattttactttttcgccgctactttttgttattttatttgcgaggcgctcgatgtctcccgcaatatccgtattgtagttgtcggcatatagggcgacgtacgatatttccgctggggatttgtcgaatgaagttgagaacgacgcgtaatttttgccggcctcgaaggttgagggcttggagggcaggatttgtatttgcccgcggtacacttttaatccgtaggcggtgtatctgatggaggcgcgctcgggggattccagcttttcgggcttttcgactaccattcgcggcgggtttttaaccgagtccgcgtcggtgagaaagtatgtgaattttacatcgacttttgctgacttgtcattgggctcgaccactttttttacggcgagcatatcgagacccatcggcacgaatactgttgtttttacagtagcctctgcatatttaacagtgcactcgattagtgcgttttcgcggtcgagcttttgttcccacgagagaggcttcccgaggggctttccgccgacggtaatcgaagtcttatagtgtcccatagtgattagggctgaatagttgtctgtgcgggagtaccttctgccggcccagaccacttccggatagtacgagcggtattttttctggaattgttcgccttcaaagtcgatgctcgtgcatatagagccattgcctacaaccggcggaacatagtgctttggtatagacgcgtcctccgaaacgaccgttatggcgcgcgccgcgagagctgaaaacgccaaaatagaagatatgtataataatttcctaaacatacttggggattattatttgtttgtttaaaaatcaataagtaaaagactatttttatttttaagagttcaattttttgcttagggtactttgcggcaaatttcaaaggttaaagcggagcttatttttgccgttttttgcgcgcctaaacggcttgacgcgctattttttggaattaaaatggcgcgaaaaatatatgaagactttatattacgactgttttgcgggcataagcggggatatgaatctcggtgcgcttgtggacgccggggccgacgcggcggagcttgaaaggcggctgcaaacattgggtgtcggaggctggaggctcgagatatcgcgcgagagcaggcttggaatatttggcactcgcgtgcatgtcgcgctagacagcggcgcatgcgaaggcgcggaaaactttggccacacacattcggaaggctgtgcacattcacaccgcgaccacgagcattcctataatgcttgtgaacattcgaatcacgaccacgaacattttcacgatactaacgaacactcccagcacgaacattctcacaacacccgcgaacatttccatcatacccacgaaaactcccaccatactcacggacattctgcggaaaatttagcatattgcacctccaataatgggcactctataaaagaaagcggagaaattgaaacttcagccgaagctctcgcgcacaacaaccgcaatgaaacggcgcacggcggggcggcagcgcaccaccattcacataggacattcggggaaattgccaaaataatagaaaattcgggattgtccgaaagggttaagcgcgactccatgaaaatttttagggcgctcgccgaggcggaggccaaagtgcacggtgttgaaatcgaaaatgttcatttccacgaggtcggcgcggtcgattcgatagtcgacatagtcggagccgccgtatgctttgagctgctgggggttgacagaatagtgtcttcggcggttgagcttggttcgggcacggtgagatgcgcgcacggggtgatgccggttcctgcccccgcgacggcggagcttgcaaaatctttcccgtcaaaggtcgggggcgccgcgcatgaggcgacaaccccgacaggcgctgcgattatagcttccatgtgcgatgcgtacgagccaaagctctcgggcaaagtttcgtctgtcggcgtcgggattggcggccgcgacgttcccggaatcgcgaacgtgctgagggttatggtttacgaaacgcgccaagagcccctgacgcttaccgaagagatggcgcttgtggaggcgaatatcgacgatatgagcgccgaggagcttgcggaatttgcgcagtcgctctttggcgagggcgccgtggacgcttggcaagagcctattgcaatgaagaagtgcagggtgggcgtaaaagtgtgcgcattgtgcccgccagaggccgaagacagggtggcggcggctttctttgagaggtctggcacactcggagtcaggcgcatgcgcgtacgtcgggacagccttccgcgcgaggaaactgtgtttgagtcgtcgttcggcaaagttcgcgttaagaccgcgtgcttcggcggaataagaaagtcgaaggcggaagccgatgatattgcgaaaatttctgcaaaaacgcgaatgccttttggaaaattgtcgagaaagatattagatgaatttgaaaaaaaaggcgctgagtgagaatttgcgcgggctgggcagggttgccgtagccctttcaggcgggcttgacagcgcggttttgctgcatttttgcgcctccgttttaggggcggaaaattgcgctgccattaccgccgacaccccgcaaatgcccgcttccgagacggacaattccgaaaaaatttgccgctatttgggagttcgccgccgtgttgtcagaagcggcaggattcccgaagatataagaaataacccgcccgaaagatgctatttgtgcaagagggcgatgttttcagaatttctaaaaatatgtgccgaagaatctcttggagtcttgtgcgacggcacaaattcagacgatttgtcggactaccgccccggaatgagggcattgagggaattgggaatccgcagccccttgctggaatcagggtggacgaaggcggatgtgagggaatacgcaaaaaatgcgggaatgcccgtcgagttcgccccgtctggggcatgcctaatgacgcgcttcgagacggacgcggagatatgtgaggcggacttaaaaagggtggacgaggctgaaaggcgcgtgcgctctcttggattttcgcaggtaagggtgagggttcacggcaaagtcgggcgcgtggagctcggcgcggcggacttgggcaggttttatgcgaatgcggtagaactcgcgccgaagattgcggagtttgtcgagggcgcgggattcgcgcgcgcgtgcatcgatttgaaaggctatgaaagcggaagcatgaacgtatgaaagacggtttaaaagaaattttgcgctcgtataagaacggggaaatcggcgaggcggaagccgagaggctgatagattcaatgtcgataataaagctgtcgcacacgtcgatagacgctgcgagggagcgccggtgcggtgctggggaagtcatttacggcgcgggaaagactccgtcgcagattatagatatagccagggcgatggtcgcgcgaggtagcggagttttggcgacgcgcctttcgaccgagtcggcggaggcctttttgcgcgaatttccgcgcgcgagatattgcgggatagcgggggctgcatggataaattccgattcgccaaagccgcgcgtgcgcggggaaatcgcggtagttagcgccggcacgagcgacatgcccgtcgcggaggaggcccgcgtgacggccgaatttctgggaagccccgcaaaggcgttttacgattgcggagtggcggggatacacaggctcgccgacaggctcgaagaaatacgcaaatgcagcgcaatagtggcagttgccggcatggagggcgcgcttgcgagcgtcttggcgggcttggtttccgttcccgtttttgccgttccgacgagtgtcggatacggggcgagtttcggcggaatttccgcgttgctgtcgatgataaactcttgcgcgaacggcgtaagcgtagtgaacatagacaacggttttggcgcgggttattgcgcgcacttggcaaacaggttgtgatatggaaaatagcggcggaatattggctttggcggcggctgctgcggcatttggcgcggtgcatacggcggcgaatccggcgcactacctgccgtttgtcgcgattggaaagtcgcatgggtgggggcttccgaagattcttgcgtttgctgttgcctgcggcatggggcatttgctctcatcggtcgcggtggggggcttgggaatcgcatttggcgcgggtgtcggggaggcttcttttctcgacgccgtgcgcgaggacataatgaaatgggcgttccttgcgtttgcggcagtgtactttttcttcggattgcgcgtttcgatatcggggcgtgggagaatgcattgctgcgaagccgattcgggcgcaaaaaaaatcggcgggttgtcggacaaggcgagcttttggacattgtttttgatttttacgcttggcccgtgcgaaatactcgcgccccttgtgatggttccggcttctgatggaaactgggagggcgtttgcgccgtggtggcggcattttcggcatctactttggcggcgatgctcgcctgcgtatcggcggtgtcgctaggcttgaattttataaagagcgacactttctttttgcgaaggtgggggcatgcaatcgcgggggctgtaattctgctatgtgcgcttgcgctattttttgaatcgcattgatccgctctcggcttcggcttgcagtctatgcgagtaatttgcgctccgcatagagcaagatggaacttttgccctaaaaagccgtcgaaagagttatgctatgacttgcggcagggatattatttgcggtgttcaacgccggaacaatgctcgtaagccaaaaatacaaaatagagggcgttttgatgtctgggctaaggggcgtcggggttgctgcgatatatagccccgccgcattttttgtgccgtttccggaatcgcccgaattttgggcgctgattgtattggatggtgtgctgtcgtcattttttaactcgcgcctttacgcttccgccgcaaggtttggcgccggcaccacatcgagaataagcatgcttgccgtaatgatgatagtccgcaaggtggcaatggaggctgtggcttttgaaagcgcggcggtttattatccgctgtgcgcaatatttttaagcggcgcgataaacttgactgtatttgcactgcatagcggcggcgttttttcataatagcgcgcctaaaaaaatggctcagcaaggcggggaggatatacccggtgttccacacaaaattgcgttaaaaaaaagacgcctcaatttgggcgtcttttttctctgcggtatctgccttttttagagttaaaacgggaaggggttttggggatcgacaggagccgcgtttttagccggcttctttttttcctgctccggtttgtatatgcgcattgattcgtcgaacggcgttgcgcgcgtgtgtacggcaagcccccttacgacgattgcctttttaggcagcacggggcatatatattcgcatgcgccgcagcctatgcagacgtcttcgtgcacatgcggaatgtagaggctgtttttaggatccccgaacggaatcatttctatcgcctgaaccgggcagtgctcggcgcatgcggcgcagtcggtcccgtcggtttttacgacgcacaggtcttccttaaaaattgctgtcccgattttctcaaagcgcttttgctcctcggttatgaatttaatcgcgcccgttgggcaggcgtcagaacagcttctgcatgcgtggaggcaaaagccttcgagatagtccatatacgggcgcataaatcccgatagaccccattgccctgtggacggctttaagatatgcgccttgcatgccgcagtgcagatctggcaacccgtgcagttttcaagaaaattttcgacgcttaccgagccgggcggcgaaggcattctgcttcgcggatcggacgggtcgagcgagtacggcgatatattgtcttttgaagccgccgaatttttgcccgcggcggaatcgttttttgcggcggagcagagtattgcgccgagcggcaacaggccggctgcgaatgagcgcctcggcattttgaaatctttttttgcggactcgtttccggtgcgcaaaagaccgttttcttcgggtttgccttcggcgtgcgcgtggttcgcaacgcagttttcgtcaagcattccttcaaggcgcgagaatctgtttttggcaggtttgttttcttggcgactgagtctttgttcttcggactttccttcttggcgactgagtctttgttcgcgagaaattcccttagcgcggacaacgttgttttcggcgcgcgccttttctttatgagatgcgataaattcaaaagatatggattttttggggcagtttgcggcgcagttaaagcatagaacgcatctggagaagtcgagcgtcttgccttttgaatctatgcatttgcttttgcagttgcgctcgcacagcccgcaggacacgcatgaagacttgtcgattgagagcctaaaaacggccgcttttgaaaatagcccgagaagcgcacccaccgggcagattgtgttgcaataaattctgcccaacaatgcgcttgccgcccaaatcgctacgagaattataattgccaccgcaaaagatgcgagggcaacagtcggatctcccccgacaggaggaatggaatatacgccgaagtttgcgagcaaccttccgctttcgtcaacagccacgctcgccgccgggtggacgatgccccccataatttttccgtaaagggaatacggctctacaaatccgaagagcgccccgtagccaaatgcgacggccgccgcagacagcgcgaggaatatccaccttgcaaacgggactgccggcgagtatttaagcgcagcgaaagtctttttgcagaattttccaagcgccgtattttttaagaggcgcgattttgcaggatacaccgagattcttctcaaaatatccattaaaattccgaacgggcatgcgaaagagcagtacgccctcccaaacgcaaacgccgcgagagagaatgcaataaacgcccagcctgcggcaagcccagccccggacagagcttttaaaagagatggcgcatacataagcgacgtcgggttcgccgcccaatacgtcttcccgaggctgtggtacacatcgaggaattgcgcgcttataaggcagaacaacaatagcgcgacggcaactctcgccgctttcagaaatttaaatgttttcataaaaatcttgcgggtaaagcgtaaaacttcgggcgacggcggcgcgaagtttttttatattcgcgccggagagttttgctacgccacggagattctcttcatgttgagtttggagaggtcggttgtgccgactccaagctcttcggcgagtgcgatgtacttaatttcgtcgagtgcgtaaggttttcccattccgtgccgcttcgcgatggaggcgaaaatctggactgccgccgtgtccgccgcgacgatgtctgtagatattatctggtacttggagactggcgcaaacttcggcgatttcccgcgggggccgtgttcgagcattacgcggtacgcgtcaacgattgttagcgttgttttttggtatgtggagtagtcggcaatgcactgcggcatattgttgcggtgccaccattgcctgtcgaaaatgcagcccatgtagtttttgagcgcgcaagtgattttcgcgccgccgtggtgttttaggacgggaatgtttatgaaaacatctgggttaacggtaagcttgtgcacttttgcgtgctttagggatttcccgcggggaatgtcgtggtcaacaaacatgaattcgtcgtttccggcgaccatttttccgccgtttgattcgactttttcggcgatgccgctgattttatatctgttttgccagtcgttgccgcaagtgtggtcaaagcacaatacttcttttgcgccggcctcgaagcatttttttacgacgagtcccacgaggtccgggtccgtgttggcgccgacttccggcggttggtcccaaccgatgttcggcttgatgacgacagagtcgccctttttcacaaagcgccccatgccgcccatctctgcgattccgcgctcgaacatttctgcggctgttccgccgaatatcgcggcgatgtcgaggggtttttggggatcgtttttagcttcggcgaaaagttctcttgaaaaaggcagcgttgccgccgccgtgcccaatgcggtctttacaataaattctcttcttttcatacccggtaatattgttggtaaattttgattctacaagcattaaaatgcgtataaaattcgcataaatttttgccttgcaaaatatgcggtctgatttttcatatcgcgttttttgcggaaggggactgtaaaatctcctttttataggaatcggaaaaaatggaattttacaacggaatattttcgtcggactggcaatttgcggcgcttgtgttttgcgcgctgcttatagggttttccaaaacgggaatacagggggcggtagtggtttcgattccgatgatggcgttggcgtttggggcgaaggagtccacgggtgttattttgccgatgctttgctttgccgacttgatagcagtggcatattacaggcgcgacgccgactggcggcttgtcttaaagcttctgccgagcgctgtcgtaggcttttttgcggctcttgttgcagactcgtttgtttcggggcgcgggttcggaatactgatggcttcctgcatttttattggcctggttacgatgttcgtggcgcgcggagaacgcgctcagaaaatcgcaaaatccggaaaatgcgcagtattgttcgggatactcggcggatttacgacaatgataggcaatgccgctggcccggtgatgtcggtctatctgctttcggcggggctgcccaaacgctcctttgtgggaacttccgcatggttctttctgcttgtaaactatatgaagataccgctgcaagttttggcttgggacaatataggcgcgcaggctttaaaggcgggtgcgtgcggcatacccttcatatttattggggcgattctcggggtgcgcctcgtaaatatagttcccgaaaaattcttccgcgcgctggttgtgctttccactattgtgggcactattattatggtgatttaaggatttttgcggttccgcccgaaaatccggcttttggggaaagcaaatttatagtttgccgatatgcgcgcataaaaagcaaaaaagggcggataagctccgccctgccggtaagaattttttgcggccgcaaaattagcggcctactccaaattcggcgtccgggccgagaatgtcttctattagcatcaagcggttgtattttgcggtcctgtcggatctgctcatggagcctgtctttatttgtccggcatttacagctaccgcaatatcggctattgtggtgtcttcggtctccccggagcggtgggatattatggtggcataacccgcgcgtttggcggtctcgaccgtcttaaaagtctcggttaaagtgcctatctggtttaccttcaccaatacggcgtttgcgacgccaagcttaatccccttttcgagaaattttgggttggtgacgaataggtcgtcgcccacgagctgcgtcgtctttccgagggcgtcggtcaatttcttccagccctcccaatccgattccgcgcaaccgtcctcgaccgaccatataggatatttcgatttgagctgcgagatgtattcgaccatctcgtccgaattcctgacggaggagtccgattttttaaaggtgtaggtttttttcttggcgtcgtaaaactcgcttgaagctatgtcgagggcaaccacgatgtcgctgccgaatttgtatccggcatctttggcggccttcgccattgattcgagggcgtcgtcggcgcttttgaaattgggcgcgaaaccgccttcatcgccgactgccgtcgagaggccgcgcgctttaagaactttcttgagcgagtggaaaacctccgctcccatttggacggcttcgcgcatggagcgcgcgccttttgggactatcataaattcctgaatgtcgattggtgcgtccgaatgcgcgcccccgtttacgatattcatcataggcagcggtaaagtgcgcgcgtagaagccgccaagatacttaaatagcggcagccgcacggcgtttgcggccgcttttgccgccgccatagacacggataaaattgcgtttgcgccgagccttgccttgttttttgtgccgtcgagagctatcattttattgtcgatgccgatttggtcgagcgcgtccatgccgcgcagggcgccgaatatttcgccgtttacgtttgaaacggctttaaggactccgagcccgccgaagcgcccgcgcgatttggcaccgccgccgtccctcagctctactgcttcaaattcgcccgtcgatgcccccgaagggacggacgccactccctccgcgcctcccgttaggcgcacgaaagcttcaactgtggggttcccgcgggagtctattatttcccgcgctcgtatttcttctatattagtcataatcataaagacattttatttatcggaaagttcttcggtttttatagcgcgcgaatttttttgcacgggcgaaagactgtcggaactttttttttcttggtggataggcgtgttttatcgcgggagttgcgggagattaggtaggaagttttttctaagtattgacaatcgcgggagtcggattaattgataatggaatatgagcgcggatattgtcgatatggggtatgaagtctttgaacgccgcggcgagcttggaaagacgctcgcctatgcggtggttcgcgggctttgcgaaaacgcccaaaagcccctcttgtgcgatttttccggaggcgcaaagaattacagcggcgcggatttgcttgcggcgtcgtgtgcgctcgcagaggtgttgcgcgcggagagccttggcggaaggcttgggatagcgataccgccgtcgtttatagcttgcgttgtaaactatgcgtgcgtgctgtccgggataactcccgtaaatttgaactttacgctcgggccagtggcggccgcaagctgcgtggcaacggcaaagataagggaaatgataacggcgcttccgtacagcgcaaaaatatcgaaggcaaaccccgcatttccgtggtcgcagaaagttatggacgcctcccagatgctcgcgcaaataccgcaggagaggctcgatatgtggagggaggcggccgcaaagggcaatccggccgacatattgtcgcattttggaatacccgaaaattcgacggacccaaagaaagaggggacgctcgtgtttacgagcggcagcgagggcgcgccgaaagctgcgatacttactgagcgcaacataatcgccaactgcttgcagacaaaactgtgcggactatttgatagcgacgacatacttcttgcgaacctgccgatattccacagctttgggctactgtttgaagtgtggtatatggcgatagaggggcagaggacagtgtctttggcaagcccgctcgacataaagagcaatgtgcgcgccgtgaaggaaaccggtgctacggctattataggaagcccgacgtttttcagggcgtacataaagcacgcgaatgcggaggatatggcaacaatacgcaaggcggttgccggcgctgagaagactccaaacggcttccacgaactttggaacgggaagtttggcgacacttaccgtgagggctacgggcttaccgaggcgacccctgtggttggagttaatttgcctgagcgcgattttgggtggtattgcaccggcacccgcaaggggtcaatcgggaaattgtttcccggaatgtctgccaagatactcgacgcctcaactttgaagccgctaccgtttggaatgaggggcttgcttgctttgcgtggggcgaatatatttgccggctacctcgacaaccccgaagcgacaaatgctgctcttgttgacggctggcttgtgaccggcgatttgtcccgcttggattcggacggatttctgtacatagacggcaggctttcgcgcttttctaaaataggcggcgagatggttccgcacgcgactgtcgaggccgccttgaatacgcagttgggatacgccggttctgacgtgccttcgcttgcgatatcttcaaggcttgacgaggggaagggcgaggcgatagtgcttgtcgccgctgtcgatataactctcgccgaggcgaaggaggcgctaaggcgcgcgggcataagcaatctatggatgcctaagcatcttgtgcgcacggacaaaataccgctattgccgagcgggaagctcgatttgaaaaagctttcaaagcttgcggcaggcgactgagcggcggcagatttttttattgtagttttgctacttcccgcaaagttcgtggggcgacgcttcgcgcttcagaacgtctttttttcattttttcaatattttaaaaataagcaagttaaccatttaattggcttaaatttttttcagtgcaatatattgagaaaattattgcaaaattagaaaaaacatctaaaaaaaattttatgaaaaagagattacatatatttatcattctcagccttttcatttcgccttttgcaatttacggtgcagacgcctttttgttcatgggaacgggaaattccgaaaatcccgcgaatttgagcgacagaagccaatggacgtacttatccacttacgacagtggcggcgacgactggaattttagggtgtttcctgttggaaccgacgacagaatacctactgacaagggaaaatacgcaagcggtgcgataggggccgaccagtctcagcagataacatcttcgtcaacagtgttgttaaagcggtgggtgatgggcgagccgcaatccgacgggtctgtctcatttggaacgacagtcaccgaggcaactacatttaaatttacggaaagttttacggcgggcgcaatgaatgcgcgcataaataatttgatgacaattcaatttgaagatgccgaaaatatagacttaaatcttagcagtctgacattgcgtgagatagcgcacatgtatataaaaaagacaaccgctggaagcgtaaatataaatgttggaggaactataactattgctccacccggaaatcaaaaaggcgtaaatttagatttaggggcgtatgatggttttatagacagcattagtgctgatgcattgaacatacgggatgtgctcgatataagcgtcaatatgtatgcgtatagcaccgactttgcatctaccgttatgacaaacacaaagggcgacctgaagatgacactgaacgtcggcaagttaaagacagacggaactgcaatatattcgtttggtacgacaacgaagaatgatacggaagtaataacggtagattttggaatgttaaatacggatgaaatatcggcaggtgaatataaaatattctgggcggacgaatggtcgaaggggtttgccgatgcaggctctcttgaagactttgatttgcgtaccgacatattggacgcatacggaatcaactacgatattgcgtgggacgggcagaaccttatacttacggttgttcccgaaccgtctatggtagcggcggcattggggcttctcgcgtttgcagtggcagcggttcgccgcagaaaatagcggctttttaatgaaatccggcgcgagtctgccaaaagcggcctcgcgtttttttgcgccgcaatgagaaaataatttattattaaaaatcgatcggtttattttttaggtaaaatcctgccgtcggacaatgccgggcgcggcggcgcacatatgggttgaaaaatacggatttatagggaaagagatttgttgaattatgataaaagttagtctaatgtttgcggcataatgggaaatatattcggtaaaatattcagagtcgccacctttggcgaaagccacggagcggcagttggctgcgttattgacggttgcccttcgggcatagagctttccgaggccgacatacaggtacagctcgaccgccgccgcccggggcagagcacgatttcaaccctgcgcaaggagtccgacacttgccgtatattgtcaggcgtgtacgagggaaaaacgctcggctctccgatttgcgtgatggttgaaaatctcgaccagcgcccgggcgattattccgagattgcaaaattatggaggccgtcgcacgcagactacacttacgatatgaaatacggcttccgcgatccccgcgggggcggcagaagctctgcgcgcgagacaatagggcgcgtcgcggcgggcgcggttgcgcgcaagatattgggcgaaagcgtcgtaatacgcgcgtgggtcgagagcgtgcatgcaataacaatgccagcactgtcatccatgccgacagccgaggagattgaggcttcccccgttaggtgcccgcacaagcaaaccgccgacaaaatgattgaatttataaaaaaggcgaggtcggagggcgacagcgtaggcggcattgtaaggtgcaggatagagggacttcccgtaggacttggtgaccccgtattcgacaggtttgaagcggagcttgcaaaggctatgctatcaatgccggctacaaagggttttgaaataggcgcgggatttgcagcgacgcgcatgtttggctcgcagcacaacgacgctttttgcctcgacgaaaacggaaaagtgtcggttgcgtcgaatcgcgcgggcggcgtgctcggcgggattacgtcaggggcgcccgttgatttcagggtggcattcaagcccaccgcaacaattgccaaagagcaggacaccgtctcgcgcgagctcaagcccgcaaaggtaatagggcgcgggcggcacgatccgtgcgtattgccgcgcgcagttccgatagtcgaggcaatggcggcgattgtcgcggcagattttctattgattaaccgcacggtgcgcatttagcgcgccgcgcagcaaaggagaagcgcaatgcaaattcccgcgtattatataatgggaaccccgacatcaggacggcgcgggattgtgcgcgacgccatagagcggggatccatggacggagatttttcgatagtgttcgtttcggagaacgagaagccttccgagagcgactcttcgatagccaaggccgacaatgcaggaattgtaaaatattccgacgccgcagatgctgcggtaaagattggcgcgctcgatacctccaaaataacaagggtattttatgtggcggattcaacaaaaaatccggcggacgaagttgagagcttcaaagggctctgcgacggcggaaagataaggcttgcgagaatatggtcggttgtcgactgctcgatggccgagaaatttccgaaggagacgtcaaaatatctggatatgctcgcgcactttgccgactgtgtactgctttcccgccgcagcggagtgtcaaacaaaagcgtcgaggagctgaagctgagatgggaaaaaatgcgccacccacacttggttgaatacgttgacaagaattttaaaaccgaaaacccgatagagctcatgatagacgaggcgcggagaatctcaatgattttcgacgattacgacgccgtggacgagctcgatatagacgccgaaaatctccccgaagagccgttcagccttgagcgcaagcccgacccgtaccttgcgaggcttcagagtggaatgagggaaaatcccgtcgagaatccggcggagtatgcgatgaaagcgaggaaaatggaaaatgaaaaataaatttgcgctaaacgacaaagtatccgcaagcgtgaggaaaatgtctccatacacgccaggagagcagcccggcgagagcggctgggtaaagctgaacacgaatgagctaccgtacgcgccgtccccgaaagtgcgcgaggcggtaatatctgcaatgggccccgacggtggaatgctaaggttgtatccggatccttattcgcgtgagcttagaaaggcagtcgccgagtactacggaatggaggccgagtacgcgtttgccgcaaacggctccgacgacgcgctaaacttggcggtcagggcgttctccgacgagtctcttaaaattgccacaatagacccgagctactccttatatccggttctcgcaaagatacagggggcggagataatccaaataccttttgcgggggacctcgaaattccgttcgaaaaaatattctcgagcggagcgaacatatttttctttacgaatcccaatgcgccgacaggcaaggggttcgggctgaacgccgttgcggaaatatgcgaaaactttggcgggatagtccttgtggacgaggcatacgcgccatttgcaagggagaccgccattccgcttgtaaagaagtacgaaaacctgatagtgacgggtacgtcttccaagggctggggacttgccggaatgagaataggttgggcatttgcgcagccggcgataatagaaattctcgacagggtgagggacagctacaatttagacaggctcgcgcaggccgcgggagtcgcggcgctgagggatgccccataccatttggaatgcgtggggaaggtcatagcagaacgaagcgcaactgaaaagtttttcgattcgataggctggaagtatataaagagctcgagtaattttatattgtttgagccgtttcgggacgggaagaaggcgtcggtgtcggaggcgtcgtcgctctttgaatatctgcgctcgaaaaaaatactcttgcgctattttccgaaagataagaacgtaaacaagtcgatacgcctgaccgtggggactccggggcagatggaggcgttccgggcggcggcaatcgagtggaagaaaggcgaataatgaagtcgagaatatccaaaatagcgcgcaagacaaaggagactgacgtaaatatagagctgaatatagacggttccggaaattacgagatagacacttccataccgttcttcaaccatatgctcgagctctttgcgcgccacgggctgttcgatttgaaaataaaggcttcgggcgacatagacatagactaccaccacacagtcgaagacgtcgggatcgtcttggggcgcgcgtttcgcgaggcgctcggcgacaaggcgggcatttttaggtacggattttttattttgcctatggacgagactctcgtgagagtcgcgcttgacttgtcgaacaggccgattttggtgtacgacttgggcgacaaggacgcgcgcgtgcgcgacttcaatgtttcgctttgccgcgagtttttccaggcgtttgccaacgaggccggggcgaatctgcatgtgtcgctgatatacggtggggagccgcaccatgttgcagaggcggcattcaaatgtttcgcgaaggcgcttagaagggcggtcgagatagacgggcggctcggaggggcgcttccaaccacgaaaggatcgatataaatatgtcagtcggcgcaaagacggcgataatagactacggaatgggcaatctgcgcagcgtgtaccgcgcgtgggaggccgttggcgcaaaggctcggattatttcttcgccctcggaaattgaaggcgacgatttgctcatctttccggggcagggagccgttgcggacacaatgaaactcttaaagagcaccggattcgactcagcgatacgcgattggatagcggcagacaagccgttctttgggatatgcctcggcttgcaggcgctcttcgagttttccgaggagggcggcggcacggaatgtttgggcatatttgagggaagcgtaaagaaattgaacctcccgcgcggttataaagttccgcacatggggtgggataatgtggaatttaggcgcgagggaaacgagcggctgcttgaaggattgtcttcggacgaccaattttactttgtccacagctattatgttgatacgccaagaactgacatcgtattggggacgactgaatacggcgggcaaaaatttacgagcgccatatcttgcggcaatcttgtagcctgccagttccaccctgagaagagccagaagaaggggttgctcttctattcaaactttttgaaatgccactcgcgcacttaaatttttttgaatttttttgaaagccgggcgtgagtttactcggcttttttatttttcccctgggctttatcttattgcgaaagcggttcgcaataccccgcattttttatttgcgcccaaataatgcagggaaatgcacggacaggctgaaaaacagataggttgcaagtattgcaaaatgcaaggtgtagtacaatagacatgtacaagggtgtgcaatactttgtgggggatgcgcgatattttgtttgtcaattaaag

SEQ ID NO: 228 - DNA, 18624 bp, Unknown
  16S sequences of unknown bacteria
atgacgcctgcgggatcgccgcccgccagatgggtgccgatggcctgatccacgccgccgatgctcctcaggtaggcaacgatctcatccgcgcccgcgccgatctcctctgccacctggaagcagaggtagacagtgccgcagagctgatcccggatctcactgagcacatgggcagtacccagcagcatggcagcatgaccatcgtgtccgcaggcgtgcatgacgccctccaccttgctcttgtaggggacctcgttggcctctgccaccggcagggcatcgatgtccgcacggatggcgatcttcttgccgggcttgccgccctccagggtgccgatcacattgttgtggcccacggtgatgttgggaatgcccagcttgtccagctcctcccggatgcggcggacagtgcgttcctcatggtgcgaaagttccgggttctcatggaactcccggcgcatatcgatcacatactgctcatacttggcagccagttctgctatggtcatggttttctctcctcctgcggtctgttttctgtggaatctcagacctatcataccgctttgcatcggtaaagtcaatgcctgtttctgacagctcgtttctaagcacttgcttatatgcaaaaccggctctttacgccgattttacatggattttcccagccggatgcaggagcaggagcggtataaatgcattttttcctgcaaaatcgcaaatctctgatggaagccttgtataaaagcgccaaacaggtggcaaatttgtcaaaatccttggtaaatgattagaataaacagtcatttagtgaattcatatagtaaaacgaaaatccaactggtataatatagttgattgaacatttgacaaagcatgctgccggaatccgacagcatgcgcacacaacccgaacaaaagaaggataccactttttccggtggtattcggtatttcatgaaggagaggtcaaacatcgtgagtaagaagtatgtttatctgttttcagagggcaatggctcgatgcgggaactgctcggcggcaagggcgccaatctggcggaaatgaccagcctgggcatgcccgttccccacggcttcaccgtgaccaccgaagcctgcacccggtattatgaagacggcaagaccatcgcccccgagatcgaagcggagatcttcgaatttgtttccaagctggaagcactcgcgggcaagaaactcggcgataaggaaaatccgcttctggtttcggttcgttccggcgccagagcctcgatgcccggcatgatggacactatcctcaacctgggcctcaacgatgaagtggtggaaggcattgccaagctcacccagaacccccggtttgcctatgatacataccgcagatttattcagatgtttgccgatgtcgtggcagaagttcccaaggaatacttcgagcgtgccatcgacctgatgaagcagaagaagggcgtcaagcaggataccgagctggacgctgatgatatgaagcagctggtagagcagttcaaggcgctctacaagggccacatcggccgtgacttccccaccgagcccaaggtacagctcatggagagcgtcaaggcggtattccgctcctgggataacccccgtgccatctactaccgccgtcagaacggcattccctcgtcctggggtactgctgttaccgtgcagatgatggtattcggcaatatgggcaacgactgcggtaccggtgttgcctttacccgtaaccccgccaccggcgagaagaagttcttcggtgagttcctggtcaacgcccagggcgaagatgttgtagccggtatccgtactccccagagcattgatgagctcaagcagctcatgcctgaggtttacgatcagttcctggagattgccacccgtctggagcggcactacaaggatatgcaggatatggagttcaccattgagcgcggcaagctgttcatgctccagacccgcaatggtaagcgcaccgcccaggccgctatgaagatcgcctgcgatctggtagacgaaggccttattactgaggaacaggctgtcctgctggttgacccctctcagctggatgccttcctccacgatcagttcaatcccgccgagctcaagcgtgccaagatcctggctactgctctgccggcttctcccggtgctgcctgcggtcaggtagtctttgacgccgaaactgccaaggaatgggtagcggaaggcaagaaggtaatcctggtgcgcctggaaacctctcctgaggacattgaaggcatgcacatctccgaaggtatcctcaccgtccgcggcggtatgaccagccatgcggctgttgtagcccgcggcatgggtatctgctgcatctcctcctgcggtgacatcaccatccgggaaggcgagcactgcttcgaggtggacggcctcatcgtcaacgagggcgattacatctccctggatggctccaccggccgtgtttacctgggcaagatctccactgtgggcgctggtctcagcggtgattacagccgtctgatgggctgggccgacaagttccgcaagctgcaggtccgtgccaatgctgaaacccctgccgatgccgctcaggcttacaagttcggcgcggagggcatcggtctggtgcgtactgagcacatgttcttcgatgagcagaagatcaaggctgtccgggaaatgatccttgccaagacccagacccagcgccagaaggctgtggataagatgcatgtgatgcagcgtgaggacttcatcaaggtattcgaggccatgcagggccagcctgtgaccatccgtctcatcgacccgccgctgcatgagttcctgcccaaggagggcgagaacctggaagctctggctgcagagctggagaccactcccgctgctctggaaaaagccattgtagagctgcatgaggtcaacccgatgatgggtcaccgcggctgccgtctggctgtctcctatccggagatcgccaagatgcagaccgaggccattatcgaggctgccatcactgtaaccgaggctcataaggactggcggtttgtacctgagatcatggttccgctcatcaccgacctcaaggagctcaagtacatcaagggcatcatcgtggctgctgccgaggctgttctcaaggctcacgacagcgacctgaagtacatgatcggcaccatggtggaaactccccgtgctgctctgctggctgatgagatcgccaccgaggctgacttctactccttcggtaccaacgacctgacccagatgactttcggcctgagccgtgacgatgctgcttcctacctgggcagctactatgacaagaagatcttcgacttcgatccctttgctaccctggatctccggggcgtaggccagctcattgagcgtgccactgaactgggccgctcggtgaagccgaacctcaagctgggcatctgcggtgagcatggcggtgatcccgcttcggtagagttctgccacaaggttggactcaactatgtatcctgctcgccctaccgtgtgccgattgcccgtctggctgcggcacaggctgccatcaagttcccccgggactaaggcatctccccaataaggcataataaaaatccccgtgcagtacgcacggggatttttttgcgttccgggaagacccggtcaggacggaatcctggacgcctggcggaagaggatcagccccaccaggaagagcagggcgatcatgcccacgcccaggctgatattgccggtgatctgggagaccacgctcaccactgtggtgcccataaaggaggcacccttgccgcagatgtccagcaggccgaagtactcacccgactggctggagggaataatgcgggcaaagtaggaccgggacagggcctggatgccgccctggaacatgcccaccagcaccgccagcatccagaactgtgcctgggtgcgcaggaacatggcaaagacggcgatgccgaagtaagccaggatacacagggggatcagctgatcacccgagaacttccgggccagccgtccgaacaggatggcgaaggggaacgccaccacctgggtgagcagcagcgccagcagcaggccggtgctgtccagtcccagggcttcgccataggcggtagccatgtcgatgatggtgtagacgccgtcgatgtagaagaagaaggccagcaggaagaggaagattttcttctcctgccgcacgctggcaagagtccggcccagccgtgcaaaactctcccggatggcatggggctgacgctcgacgaaatgcttctgctcataccggcggagcagcggcagggtgaagcccagccaccacaaggcggtgatgccgaaggagagccccatggcagtgaccatggaaagccccagcgcaccggagcccagcaccagggccaggcatccggcaaagggaatgcagctgccgatatagccccaggcatagccctgggaggacacatgatccatgcggtcggcatcggtgatgtccgagagcatggaatcgtaaaagatcaggctgccggaatagcccacccgggccaccacgaagatcagaaggaaccagagccagtgggcggcaaagcccagagcgatgcagccaatcagtcccacgcccagaaacagcaggaagatgggctttttgtagccctgggtatcggcgagggtaccgaacaccggtcccagcaccgccaccagcagggtggcagccgacgccgcatagccccagtaggccaggtactgcacattggaaagcccggcctcctccgccaggaagttgaagtagatgggaatgatggtggaaatgagcagcgtgaatgcggaattgcctacatcatagagaacccagctgcgctccgccggggtgagtttcagtttgttcatgcgtttgctgcctcctgttccggcttgggatcaaaggtgcgcccatagatggggtcctctgcctgaccgctctccaccacccggtcaaagtccccgatgagccgggctgccagctccgctgcctgatcgaaccgccggagcagttccgcattgctgtcctcgcaccggggttccgggtcagggccgaccaccagcccgcccagcttctcaaactgacctgccaggcgcagggcggtgaagatcacccagcgtttcagagccgaaggcgccaccagcagatccagataaaagaccatgccccggagggaatccagcacctgttcctgtgtgacttccgggaagaaatcggcgatcacggcggcattctcctccgacggcaccagatgtccggtggggcggtggcttgccgggtccagcccgtcccggagcatgagcgcccgctccagctccgattcgatccgggcatggctcaggccgcttgccgcctccttttccgccacatagtcatggctgagggtatccagcgcgaaatggcagaggaacccgtatacataggcccggtgtgccaggctgtccggatgcatctgcaatacccgggcggcccgctcaaaaaaatcccggcccggacggtcatggaattcatggcccagccggctcaccggatttttcgagaggggcttatagtaaaagaacagatccgggccgtgcagaccgatggaatagagctggggatagcgtgtaatggcctccagcggctccggcgtaagcagccgggcggtttcccgtcccagacaaaagtgtgcgtatgtagatggcaaagtgaaatttctcctttccgacggcagatgccgcccgggaacaattccctggggtcatggtaccgtggggcagcacacccatcgcctcccaccggaaacactttggcagctgtctgtgcgccatgacagctctccggctgtgatgccggaaacctcagcggaattgtatcattgtccagctataaaacggatcatagccagtccttggttattatatcattttttggcctgctccgtcacccgcacagcgtaaattgtgtgtaaacagaaacaaaaaagcccgcctttttaaggcgagctttcatgctgtcagcacaaggggttcggagaaaggtatcccgaactgcttctgccaggatttttacttcttgcccgaacgctttgccacaaagttggcgagcatgggggtcaggaaggaagtgataataaccgaagcggctacctgcgcggtggcaatgggagccacagctgcataggaggggtccacagcagccagagcgccggggttggatacaccgctggcggcggtgctggagattgccgcaccagctacgccgttgcctccggtgatcttatccatgaggatggtcacaccgcctactacaaagacggtgatcagacccagcaggataccggacagaccgccctggaacagctgctggatggacattccgcagcccagtgcaaagccgaccacgatgatggacggagtaacaccggcagagagggtctgcttgaaccacggggacacattacccaggataataccgaggatcaggggcagaatggagccgatgatcgaccagatggagatgctggcaaggccggcagagctcagggcgatcatggtgacggtggggccgacactcagcgaagtgatggcaacagcgcccttgacggcatcgtcgtcatactgggatacaatgcccgaatagagggcgttgttggcaaccgataccgcgctgatgattgccagcgaggaaagacccaggaagttatcgccgaagaggaaggccacacccaggcccaggattaccgacatggcaaccttggtgccgatgatgacagcaccgatcttgatggccttgggggtacttttgatatcaatggtagcgcccatgaagagcaggaatacaccaaccagtgcgctggtgccggtaaccataccggtgaagaagccgccgatctgcagcacctgcggtacgaaggaattgagcaccacgccgatgagcatcggaacaacgatggtatcaccggggaaacgcttcattttcagtttgctcataaccgtaaaactctcccttatgtgttagtccagaacgataccgccgtcgcagtcgccgatctcgccgtttacaaagcttgcagcatcggaagcgaagaacaggatcatctgagcaggctcgctcgggtcagcggcgcggcccagggggatcatgccgattaccttggcgctcttttcagcgtcgtcagacagagccttggtcatgggagttacagtgaaggacgggcatacagcgttgcaggagatgccgtacttgccgccttccttggcgatggccttggtcagaccgttgacaccggccttggaagtggcataggcagctgtacccagcagaccgccgccgatcttaccggctaccgacgatacattgacaatccggccgcccttcttctcgatgaagtagggatagatagcggagcaggtggtgaaggtaccggtgaggttgatgcgcagggtgcggtcccactcagcatcggttacttcctggaagggaacagtggatacaacgccgccgcagttgatgaggacatccacacgctcaaagtcgcccagaacctttgccataacggcacggatgttgtccttgtcgcccaggtcgatcttgtaaaccgagcagttgcccagctcttcagctgtggccttggccttttcctcattgaggtcgaggattacagcatgaccgccgccgtttacaacgccgcggacaacttccttaccgatgccctgagcaccgcctgtaaccagaactgtttttcctgtgaagtcaaacatgataaatgcctcctgtattcgttcccttccattcttcggaagggatcactttctttattttgttggggtaccgccctgccggcaaagagcgggttttcgattgacaaacaattaaccatcaatcttctgcctaagattatagcattgcaggcatcgaaaaaatatggtatcatagcctaaaaagtaaagctgattttaggctgacagcacaaggaggaaccgctatggatgaacagctcaaatgggaactgatccaggccgcgctggatggagaggagctggaccggatcaccgaccgggctgcccattacctgggaagccccctggtggtcatctccaccaccagcaatatcatcgcccattccgcctccctcaccccgccggatgaaacctggctgcacgctgtggagcggggatatatcaccctggaatttgtggcgaccctggcaggctgggacaagcacaaggaccacggcacccggtatgagtgcatcaccgttgccatcaacgaccggcgccggcggttctacaagctcaccatccattcccagctgctgggctatctcaatgtcaccgagctggacgggcatttcgatacggtcagcgaggaggagtaccattttgtggcccagctcattgccaaggaggtctatgcccggctcaagggacaggacttctcccgcaaggcccgggacgaggacttcctgctggaactgctccacggcagctttgtgaaccgggggcatttcatcgaccggatgcgtctgagcggcttcgatccctcggcccagtaccgggtgctgtgcatcgaactgggggacttcctctcctataacgccgatgaggataccttcaagcgggatctgctggaactgctcccgggcagcaccatgatggtcagcgaccaggtgctggtgatcctggcctccgaccggctcttcctgccggaacgggccccggccatgctccggaacctggacagctacctccgctcccagaagctcctctgcggcatcagcgatgccatcggcgacctctactacttctccacttaccgggatcaggcgctcagtgctgcccgctaccgcaagtatctcatcgaccagtccctggcctatacgttctatgatgaggtcaaggtctatgatattctccagcagatcccccacagtgagctgatccactactgttcccggcaggtctatgagatctatcaatatgacgctgcccagcataccgactatatcaccaccctgctggcctatctcaaagccaaccgcagcgtgaagtccaccgctgcctatctgcacgttcaccgcaatacggtcaactaccgcattgcccgcatccgggagctgtttggactggacctggacagcttttccactgtccatcagatcctgctctcctgccagatgatccggctgctccaggattaacccccatgaaacaaaaaatggcgttgtttcccgtcatttggggtttgacggcggctcggttttgtgtataatgagtatacaggcagcctgtaatttttttgagattgttactttgtgtatcacacagatgctgccccaggagggttattatgaatattttgattgttggctgcggcgataccggttcccagcttgccaatgtactggatcacatgggcaatcaggtatctgttgtggaccgcaaccccgaaactgctgcggaactttctgactcctttaccggtatgtttacggtgggagttcccattgaccaggatgtgctgcgtcatgccggtatcgaaggctgtgatgttgtaatcgcggtcacccgggacgacaataccaacctgatggtcgctcagctggcccgggatatcttcggcgtgcccaaggtaatctcccgggtatccgatccccggcgggaagaggtattcagcagcttcggcttgagtaccatctgtcctaccaacctcacggttgcttcggtggtagccgcactggatgaccgccgcaaacataccgaagaagtttatttcggcagcacccggatctcctttgaacagatggagatcgaccgccggtatctgggtgaatttgccgaagccattgaactgcccaagggtactgccctgatcggtgttctgtcccagagcggcaagctgcggctgcgcggcgaaggcatgcagactgtcatcggtgaaggcgatgtcctggtactggcccgttccatcggctgatgaggaggatctatcgagatgaatgttattgtagtgggcggcggtaaagtaggctattatctggcagaaaccctgctggaacatggtcacaagccctttgtcattgaaacagataaggagatctgccggaagatcgccaacaatctggatattccggttatcaacggcgacggcaccaccctgggagccctggaaagcgccagcgtggaacattgcgatgcctttgtcagcgttaccggacaggatcaggtgaatctgatcgcctgtcagctggcaaaaaagcgctatggtgtggaacgcaccgtagcccgggtcaacaaccccaagaacctcaaggtgatgaagcgtctgggcgttgatattcccgtatccagcaccgacagcattgcccggctcatcgaacgggagatcgatgtggcaaccatcaagcgtctgctctcgatcaaccggggcgaagccaccatcagtgaggtggagatccccaagaattattcccgcaacggcaccagcctgatggacttcaaccttcccaatgaatgtgttatcgtatccatcacccgtggggacagcctcatcattccccgaggcaatacccagatcttttcgggcgataagctgattgtcatctgccgcaacgagtacctgcatcagctgctccatgccctgcgcattgaataggaggttccctctgtgaagaataaaaccgttctggtcaccggcgctgccaccggcatcggacgcagcaccgcggaactctttgccgccatgggctatcaggtggcaatcggctgcaaccactcctttgccgagggactgcagtttgcccgggccctgtccgaaatgggcatgagcaccatggcagtcaaggcagacctcagccagcccgatcaggtggacgccatgttccggcagatcgagtcggtgtggggcggtgtggatatcctcatcaacaacgccggtattgcccagcagaagctctttactgacatcaccaatgaggactggaacgccatggtgggcgtgaacctctcgggcgtcttttactgctgccgggcagccctgccctatatgatccgccagaaggcgggcagcattgtgaatgtgtcctccatgtggggcatctgcggcgcctcctgtgaggtgcactattccgctgtcaaagccggtgtcatcggcctgaccaaagcgcttgccaaggaagtgggccccagcggcatccgggtcaactgcattgcccccggcgccattgccacccgcatgaacgacaacctggacgaggaagcagtggccctgctccgggaggaaacccctctgggacggatgggcacaccggaagagatcgccaaggccatcgccttcctggcactggaggacagtgccttcaccaccggacaggtgctcagccccaacggcggactggtgatctgactataagctgaaaaatcctcccctccggttccgccgggcagggaggattttgttatatcagcatactattttacagatcgtatatattcagacagaacagggagggacagaacgagagcctcccgccccagccaacctggattttcgggcagagaaaacgcggaactttaaaatactattcgtttattataaagaaagttatcttttcagtataaaagcgccggtcattcatctgaccggcgctttggattttactcctgctcgtattcgtagaaccgctcctgatagagggtggtgaagatcacctgcatcagcgggtaaccctcgcccatgacggtatcccggaggatctctgccacacgctcccgtacctcatcggtgcggtcgaaccaggacacctccacaatgggaaaaccgggcacctgttcccctccggcatagaaactgctgtgtgccagctccaggatcagccaatcctccgggcagccaatggcctcggcgagcttggggatcagcggagtgctgatggcacgcatctgcttgtcagtaagtcctttgatggtgatctgcggcatgataagtcctcctttgtcgttccaatccccggcttttcagccagccgggggatctgcacctgtattgtatcacagctgcccgggacagcacaagccttggctgctcttgtcagatcccctccggtatgctatattgaaaccacaaaccccactaccgcaaaagccaggccagcgccgccgccagaggcagggtgatcccctcccccggctggatggtctgcaccggcgcggagtaggtgtgttccggttccccggtgctctgccgggcccggcggcgcatctcctccacccggcgctcggcatcctgctgcatccgggcaaactccccggcggaaaatcccgtgggctgccaggtattcatgctcattcctccccctcatcgggcaggagctccagctcccgcatgagatccagcagattccccagcgcccagatggcccgggcatctgccagacggttctgcttctccgccgggagcaccgctgccgccgcttccagcaatcgcagttccggcgcctgggaagccagcagctcccgcaatgcctgccgcagccggcggtaccgggcagcttccccgtccgggtcctcctgccgcaccgctgagatcagctcccgcagttcggcccggccctcggctgtatccagaagatttcccagtgccatggcattcacctccggcagagatcccgcagcagcgcctggggcccgggctgccggagcagctgtgccatggcatccggggactgcagcacttcggcgatcatctcgcttccatggggattgagcttccggagcgcctggtcaaaggcaccccggtcaagctgttccaggacccggtccgggtccagtcccgcctgggctgccgctttggcaaggagttcccggtccggtctttctgtggtaggattcatcacactcacgccctttcgtatccactctatgccccggcccgggaaaatatccccggcccactcaggaggttatgttttatgaaactcaccgtattcagcgactgccattgcaatctggaaaatgccatccgcatactcaccgaatcggaggcggactgctatctgttctgcggcgacggcatccgggacgccgaaagtgccgccgatctgctggacaagcggctcattgccgtgctgggcaactgcgaccggggcgaaaccggtgaaaccgaacgcctgctggaactggacggcgtgcggattctgctcacccatgggcatggatacagcgtcaagtcctcgctgctgcccctgcgccgccgggcgctggaactggatgtccagctggtgctctacgggcacacccatctgccggcgctgtctgaggaggaaggcgtactgttctgcaatcccggcagctgtatgggcgaccgcctctatgccgagatcgaactccaggacggcaaggtagccgatgcccggctctgtcaggcagagcaccgcatcacccgccgcatgaagcccacctggtggaagtcctgacgccccatcccccaaacaaaaaaccacccggagagtccagaccctccgggtggttttgtattttatgcggttattcctcttctccggacgcttccagggcagcccggtagagatcgcccttcttgtagccggtggcacgggccacctccttggctgccatggtgggagaaagcccctcctccatgcgccggcgtgtcagctctgccgcctcctcaaaggtgagttccggctcctcggacggctttgccccggcgatcaccagtacaaactcgccccggggcgcgttgtcccggtaataggccgccgcttcggacagggtggtgcggcgggtctcctcatggagcttggtcagctcccggcagacagcgatctcccggtcccccagcactgccagcaggtcttccagggtgcgcagcagcttgtggggcgcctcatagaacaccatggtgcgggtttcgttcttcagcgactggagatgctccatccggctggatttattgacactcagaaagccctcgaaggtgaaccgggcggttgccagtcccgaaagggccacagcggtggcaatggcagtggggccgggcaccgacagcaccggaatgcccagcttgtgacaggcatccaccagctgttcaccggggtcggagatgcagggcatgcccgcgtcggtgacaatggcacagtcctcccctgccagcagacgggcggtgatggactgggatgcctcccggatattgtgttcatggcagctcaccagcggctttttgatccccaggtggttgagcagcttgacgctgacccgggtgtcctcggcggcaatgaaatccaccgattccagcacctctgccgcccggggcgacagatccccgagatttccaatgggggtacccactacatacagtctacccatgttttttctgtgcctccttgggaagattggcatacttgccatagatccgcagcatttccggggaaaatcccccttcgccttctacaatcagcggcggcatcacctgcagaaacggcttgccgccccggcgtccctccagcagaaaaagccagggagcggtatccggacgctgctgcaccatgcgcaggcgcttgggttccaggccgtttttgcgcatggcttccatcacatcgggcaggcgctccggacgctggcagacacagaagcgtccgccgaatttgagcagccaggccgccgcccggcagacatcgtcaatggtgcaggctgtttcatgccgggcaatctggtcgctgtctgtttcggacagaatgccccggccctcgatcttatagggcgggttgcaggtgacaacatcaaagctctgtccctcgggcagggcggagagatcggtgagatccgccagcaccggcaccacctgtccttccaggccgttttcgtggacggtgatggtgagctggtcaatggcctggggctggatatccaccccgtagctctgacggggctgggtctcctcggtacggtaccaggccagagccacaatgccgcagccggtacccaggtcacaggcccggtccttgcgccggggcgcggcaaaatccgaaagcaggaacgcatcggtgccgaatttatgctccggggagacacagagcctgatccggtcacccagggcttcaaaatgataacggtcattcatgggggaaatacagcctcctccggcagtgctcatcggttgttcccggcagaaaaaagggcccgtccggacagaaccggcccggacgaggccttttgcgctgtatgggaacagtcgggtccggcagatcagagctgcggacgcttgaaatcggtattgggggtaatgcttacttcggtgatggtctcacccggacgcatcaggcgtgccatgacaacaaagcgctgctggctggtctgaccataggcacgggtacaggtggacagggtgaggatcttatccgaggagttcacatccacggcaaagtcatgcagacttcgggccttggcctcattgatgatatactgcaggccggaagcacccgggtcgctgacgatatagttgaaggattcctcggtatagaacaccgcaaagaccttccaggtcatctcctccgactcggtggagtagtggatatagggagtgctcttgcagaagttcaggtagtggaagctgggcagctgaccgaacatgatgtcactggcccgggcaatgaacggattggcggtgtagttggtccagttgtgaccatacagcaccgtgttctgggagatctggctgctggtgccgaacttggtatccgaatccgcccagattacgccatagtagctgtaattcttgtcatagcccttggcggagtagtagaggttatccggtcccactacaaccgggtagttgatattggtattgggaatgcgcagccagcccacaacatcgctgttcttggccttccaggaggcgatattggctttgccgctggagccgactgtggaggggtcaaaggtaccccagttggaggcagtggtctgggacccggacgagcccgagcccggctcagtgacaacattgtcggcactggcagccagacgctgggccacaacggtttccagacgggtgccggacaaagcggtaacagtggcggacgaggtgatgtccggagcgccggtaccggcatcggcgatgttggtggtgtcgtccgaagccatggacgaagaaccgcggtcggtatccgcatcggcggggctgaccagatgggcaatgccatagatgctgccgcccacggcaatgaacagagctgccgccagacctgccatacgcagacgggcagtcttcatggcctgttcccggcggctgcggcggtcagcgggcgcggcttcactccggcggcgggacgcactgtgctctgccggttccgaagcagcccgacggctggcggaacgggtcatgcggtccagtgcggcaccagcccggctgggacggctccctgtctcccggcgtggtgcagtacggctgtcccggctcatacggggctcggcttcccggcgtgcggtgcggtgcggattctcccgggcggaggtacgctcctcccgccgggtcagatccggtgcctcctcattccgggcacggctggcgtatgcggcacgataacggtcatattcgctggaaatctcccggcggcgttccgcttcccggctctcgccggacggacgggccttgccccgggtttctcggttctctctctgcattcgtttccctctcatctctggtctcggtgcacgttctgctcacgcagtttctactctttattttatcatacccatctgtcccgtcaagtgtctgggttcctcttttgctggcagctctggacaattttccccgccgatgctacaataaaaacaaatgttcccagtctgtaccatcgttcaggaggtatcttatgctcacatcccatcgtttttcctgttctctcggaactatttccctctattttgaggacgaagccctcatcggtctggatctggagggctctgccggctgcggggaacggctgatggcccagctcgcccggcatggcatcgatcccgctgccttccgccccgaagccacccccgctgccctggcagtggaacagtggctcatcaactacgccgccggcagcaaggaccccttcaccctgccccggaagctctacggcaccccgttccagatctcggtgtggaacgccctggaagccctcggctatgacgaggtgatctcctatgccgagctggcccggcgggtgggctccaatggataccgggcagtgggcaccgccgtgggacacaaccccattcccatcatcattccctgtcaccgtattgtgcggcaggacggcatcatcgggcggttcggcgccggggacggcactgagaccaagcggaagctcctgcgcctggaaggacacagctactgatgcgggaaaggactctcatcagccggctgcgggatctgcgggaagacgccgacctgacacagacccaggtggcagcggttctgcacatgtcccagaccggctattccaagtatgaaaccggcgaaaatgatattcccacccaggtgctgatccagctggcccggttctatgggaccagcaccgactatctgctggggctcaccgaccgccgggaccctctgtaaaggaggaagcgcctgtgaaccagtacccgagaatccgggacctgcgggaggacgccgatctgacccaggcgcaggtgggggaacggctggggctgtcccagcggacctacgcctattatgagagcggtcagcgcatggtgccgccggaggtgctctgcgccctgggggacctgtacggcgtgagtgtggactatctgctcggacgcaccgaccgacgggagatgaaccgataaaaagacggcagtgtggaaaccctccacgctgccgtttttctgtatgcagagccccggtctacgactgtgagggcaggacttcctcaatatcccactctccgaacatctccttgagggtcacggtgtagctctggtactggtcgatattgtagttggcgtgttcctcgatgtcccatcgggcaatgggctcggtgcccggcccccagaaggagttctgttcgctgtcggcataccgcacaaagacgatctgtgcctccttggtattgaagctcacgtcccagagatcgagcagcaccggcagataccagatgggctgtttttcaggataggcatagacgccgtattcctcataatagcggtactgttcccggggatcggcgcccaccggcacactctggtgggtgaactccacttcctcgccgaacagctcccgggccgcgtattccacctgttctttggtgatgaactgccgccgtccggtctccccggcaagctgctttgcaacatactgcgcctcggtggtattggcgccctgggtgatgcccggtgtggtgccgtcggtacccagcagggcggtgagcagcagatattcctccggcagatcggtatagcccttccggagatcccgggcataccggggatagacaatgagctcctgtcccagcagacgggcaatggcaaggccggtgtcgtcatgggtgaaggtggtgtccacaa

SEQ ID NO: 229 - DNA, 17864 bp, Unknown
  16S sequences of unknown bacteria
catcggtgcatgcgtcaaacggtatactccgctttccgcactctttaacgtcaactttccatccgcgataacggctttggccgtttcgcccgccgtgaacatcatcgagtcgctccctttttcaaactgcgtgctcttctggctttccgccgtttttgccgttacgttccgtaccgtaccctctccgtaaaatccgcattgcccctcataggacatttctacatagcattcgctcgacgcttgtttcccgttgctcgtttccacgtagaaggtattatcgtcgcttcggactacggatagcgtttctcctttcgccaccgtcagcgttgcgaccgtcttctccgctccgcctttcgtctcccgcgctttgacggttacctttgttccctcgatctcggctccgtaataagccccgccgctctcgttgtccgcccgcatgaatgcggttatttttccttcgctttgcaaactcagtattgcgttaccgtaaatcggcagcgccgcgctgcggtttccgctcacctgaaaactgttttcgccgatttgttttacttctccctcaccgccgctcaactgccactttcctgcccaattttgcgatttcttgttgctcagcagtgcgccgtacggcatgatttcaatttttactttgccatcctgtacgacgtaactgtttcccgacagaacgtcatgcaatttttctccgtttttcacttccagcgaatggacgtcgacctctacgccgctgcgcactttgcctgcgggatttaagacggtcattataaccgtatcctgatagttcctctgaaatttccataaaaggttgtcagaatctacgcctaaatctcgtaaaacgccatacttgaacaagccttcgttttctgcccggaattgtccgagcgctttatacagatgaaaaatatcgtagttccatgtactgcgatcccagttcatcgcatcgaaaaacgaatgatcgaattggctgaccatgccgatttcttcgccgtagtaaagggaaggcgcacccatataggtcattaacaggagatgaacagccatagccttttcgacattgcccgacgtttcatctaaaaggcgcatggtatcgtgatcggccgatatcgtatagagtgaaaggcccgtcgcacggggcagacgaacgaccgtttcgtaacatttcgcgctcagtgccgcgagcgattcagccgtaatttcctttgccgaaaaacttctcacgcccgccaaaaactcctggctccaatacgtatccgccgcatagtcggtatacatcgttgatgcggaagcgttttcaatacacagtagcgaatcgggcgcgacctctttcatatacttccgcatatcttgaatgatcttcgtgccgttggtattcatgccgccgaacagcaccgaagaatcgagcctccaaccgtctataccgagccgcaaataatattgcatgaccgaatcgggagaagaataaatgagcttttgcgccgcaactttgccgaaatcaacgatgggaccgaattggttggatttaatatttccgttctcgtcccgcatgaataccgaataataaggtgatgactgttcggtcgccggcttcgtattccacaagttttcgccgtttacatacaccgatgcctgcgtcaggaaagcaaacacgccgtcgagcataaacctcatattattttcatgcagtttttccgtcaataaagtcagcatcggttcactgccgaaagtcgagtcgagatttgcaagatccatcgcgccgtaacccgcgttatgattggcgagccatatggggtttatgtatagtccgtttacattgagttccttaaaataatcggttttttgcaaaaggccgttgagatcgccgccgaaatagtccaatcctccgctgtgtgtcaaaccccaaatattctgattgatcgatccgccgtacttatcggaaaaagtttcaccgttgtaaaaactgtcgggcatggcggaataccacagcatgcctttggaccaatcgggcgttgaaaaattgatttgcgccagaaaatccgacgatagcgaatcgggaacggaatcccctttgtaggtgttctccgcattatagacaatgctttccacattgttttttacgataaaatgatagcggtaagcactcttttgcggcggaatctcgcctatataatagtcgtaatacccgttcacgtccgcccgttcgtattgcatggaaacgttcgtccagcggcaatcggccgcgggtttatcgagatcgcaagtataccgcaaaatcacttcggcggcatttcctcgcaacaaccgcagtcgcatagttaccgtgtccgtgtcggtcggctcgatatgcgatacgtacggcgcgccgatatcatgatataactccgccgtggcgataggttcatcgacacgtgaagcatctttccccgaatctcctcccttctgacaactacccagtaacaggcaactgcaaaggattaaaagaacagagaggatcataagaaaaatatttttagttttcgcttgcatgattattcccccatctggtatcaagagaacgtacgatcggtgaagaccgcagtatccttataattttctccgagacggagtccgtataccttgaaattccgatattcaaactttccgtttgcggaaaacagagatacaagtccgccgtgcgcgaaatcgctctcatattcgagcacaggttgacttgcgaatgtatcggagtcaccgcccgtataatggtctgcaaacagaaggatctttcctccggacaccacaagtgtcaaaaagacattacttttgaaagaactgcccaaatcgacagacgccaatttttccccgccgtattcgacaaatgcttcctgtttggaattgatgccgacaaagaacgcaccgtttttgccgcagccgaccgaaccgccgaacacgaaaccgatctccgctttattgagaatattcgtttgctgaatactcttgatatccaatgtcgctacgaattccgtcaccgctgccgtatcatgagcgaccgtatatgcctgaaactgcatggaagcgatctcgtatgcaacccgaattccttcgataaagattggtccgctcgtatatccttccactctttcagaaagcagtaatttcatttccgtaccgaaataaacagacaaaataccacgatcggtcattatcgccataatacggacgggttcatcgggcagggttcctgcctgtaacgttcttaatacagcagaacctttcaacaattcgaccttaccgctcgggaaaagcctaagagcgtgatctgcaccgaaacgcaatgcgacatttccgtctcccttatgaatccttacggaataatctgcgcggaatcccttgaaattgccttgattattttttaacgccgtgacttccgcagtctcatcgttctgtaaaaatccgccgttgaccatttgccacgagccgccttctatcttatactgaacgagcgagtacgatgcggactgtgaggatgtttgattacaatctccgtacgaggcgtgcgcggaaacgctttgaccgtcttcaacggcattaccgaaacagaaatattcaaagacggcctcggaagaaccgtaattgacaattcctgcgttcatatcagagaaattacaatataagccttcggccaacaaattgaaatctgtttcttccggcgttttatagcgtgcggtccaatacgtacccaaacgttcaagctgtataacgagttctccctcgacgtcgtctatcgatgcgaaaatcgtcgcctgtccgttgatagattgccctaaaaccaacttcacactacccgaaacatatgcacgcccggcaaaaataaaattgttttcgctctgcccaacggtcacccccatataatcgccgtcttttttcggagagccgctcatctgcgtcttgactgtaatatcgcacatcggtgcatgcgtcaaacggtatactccgctttccgcactctttaacgtcaactttccatccgcgataacggctttggccgtttcgcccgccgtgaacatcatcgagtcgctccctttttcaaactgcgtgctcttctggctttccgccgtttttgccgttacgttccgtaccgtaccctctccgtaaaatccgcattgcccctcataggacatttctacatagcattcgctcgacgcttgtttcccgttgctcgtttccacgtagaaggtattatcgtcgcttcggactacggatagcgtttctcctttcgccaccgtcagcgttgcgaccgtcttctccgctccgcctttcgtctcccgcgctttgacggttacctttgttccctcgatctcggctccgtaataagccccgccgctctcgttgtccgcccgcatgaatgcggttatttttccttcgctttgcaaactcagtattgcgttaccgtaaatcggcagcgccgcgctgcggtttccgctcacctgaaaactgttttcgccgatttgttttacttctccctcaccgccgctcaactgccactttcctgcccaattttgcgatttcttgttgctcagcagtgcgccgtacggcatgatttcaatttttactttgccatcctgtacgacgtaactgtttcccgacagaacgtcatgcaatttttctccgtttttcacttccagcgaatggacgtcgacctctacgccgctgcgcactttacctgcgggatttaagaggacaagaatattcataccttgatagcttctttgatatttcatcagaagattgttttcatccacgccgaaactgcgcaaggtaccatacttaaataagccttcgttttccgcccggaattgtccgagcgccttaatttgattaaaaatatcgtagttccatgtactgcgatcccagttcatccctacgaaaaaacgatcggcgtcgagcgtacccgtttcctcgccgtagaaaatcgtgggcgaccccatatacgtcatgaccataagataaagcgactgcgccttggcaacatcgccgtccatcaagtacagaatgcgatccatatcgtgattggtaagcatattataactggaatgcgcaacggcacgaggcagcccgagcaccgcttcatatagattggacgaaagcaaattgattgtggatttgttcacctttccgtccatgaatgcctctatcgctttcaaaaaacgctgattccaatatgtatctgccgcgtaatccgtgtacatacccgcttcgttggcattttccaagcacaacagtgaatcgggcgcgacttccttcatatattttcgcatatcctggatgatctgcgttccggaacgcccgtcggaagcgacaaacagtatcgccgaatccaacctccaaccgtccacaccgcaggccgttacatagtactgcattatagaatcgggcgaggaataaatgagtttttgcgcatcttcgctggcaaaatcaacaacataaccgaattggttggtaatgaggtttccgctgccgtcacgcatgaatacgttataataatccgaattcttatcgctcgccgccttgccttctgtgggccaaagggaagaagaattgacgtatttggaatttccgacaaagtaattaaatacaccgtcaaacatcagtctgagattattttcgtgcagagaagaagacagttttttcagcatctgctcatttccgaacgtggaatcaatcaatgtaccgtcaaaaaatccgtatcccgcattatggttggcgagccaaacgggattgataaagagagccgtacagttgagttctttaaaatagtctattttttcatacagaccttgaaaatcgccgccgaaataaccgagcccgcccgaatgtacagcgccccaaggggtgcctgaaatcgcgccgccatacttatcgttggtcggatcgccgttatagaaactgtcgggcatcgcagaataccaaagcgcaccttttgaccagtccggcgtggaaaaattcacctgcaataaaaaatccttgctgaatccattaaaaggattttgatattcgccgtttgcatttttctgcgcaacttccgcctcgcggcccgcgtaataaacagtctgcttattattccgaacgacaaaatgatagcggtaggccgatttctgtgcagggatcgtgccgataaaataatcgtaatagtcgttgacgtccgctttttcgaaatccatttccacgcgctgccactcggcagtttcgcctgacgcagacaaatcggtcgtccattccaccgccacactgacagcgttgccgcggcgaagccgcagacgcacagtcacgctctcgctgtccgtcggttcgaaatcggacaaatagatatccccttggtcgtgaaaaatgtcctctttcacgatatcctcgttgatcaatgcgtccgaacggccgtcatccttattgcccttatcgcaaccgacaacgagaaacaccgcgcaaacgaaaagtacgcaagagagaagacaaagccaaaagctttttcccgaaatcgaatgattcaataatgtttcctcctttaaccttttaccgctcccgccgctacgccgttcaaaaaatattttgaaaagaacgagtaaatcagcaggataggaatactcatgatgaccagccctgcacacagtacgccgtacatagaattattctgcgcctggaaattgatgagcgcaatgggcagagtttgcgcggccgcattcgtaggcaaaacgatgaacggccaaaaaaagtcattccaggtcgccgtaaacgtagtaatcgcgatatacgctaaaacgggtctgatcaaattcaaatcgatataaaaaaacgtttgcagtatgctcgccccgtccaggctcgccgcctcgtggagatcgtttggaatattcttgatatatgtcacccctaaaaagatacccgttccgccgaccgcaatcatcacgggaagcagcaacgcccacagagagtcgatcaatccgaattcacgaataagtaaaaacaagggaatagtcgttacctcaccgctgataaacatggaaaacagagtaaggtaaaaaagtatattcgagcccttatatttaagtactccgatcgcaaaaatagtgagggacgccgttgcgatctgaaatacgaccgcaacgaccgcgacaatcagactgttcacggcattgacggaaaacccgcctttcgtccaagcctccgaatagttttccggatgtgcaaaagagatggaaaagggagattttatgaattcccctctcgttttgaacgaagtgctcacaacaaagagcatggggtacagaatcgcgatcgtaatcagcgtaatcgtgattcctaaaattatgttgacgataaagttgatgcgcttttggcgttttaaactcgtctctttttcactcataacttttttctacctttgccatcagtttatttgtaatcactgtgaatgcccctaaaatcaccgaaagcatgaaagacatcacgatcgcccaccccatacggctctgtttaaatgcgtatgtaaatatgatcagccctaccggtcgcgtctgcggcatagaacctccttccaacataaaaaacatatcaaaagatttcataccgccaacgaacgaaagtacgagattcattttcgtcgatgagatggtaagaggaaagataaatcgccataaaatcatccaacggttcgcaccgtccagcgtggccccttccaaaacatccttagaaaccgcattcatattgacgaaatacaaaaccattgtaatgcctacaaagcgccatgtattggctatgatgatcgaaaaaagcaccacgtcgggatcgttgagccaaagtacctgttcccacccgaagagttcccaaagtttaaaaagaagccccacatcgtaggagtaaataaaattccacatgaccgctacgactgcactgggcaggacgcagggaatatacaaaagcactctgtacaccgactgcatcccgcgccccatcgagtagagaagataggcgagaaaaaatcccagtaccgtctgtaatatggtggacaaaacggaaaattcaaaagctacccatagcccgttccagaaatcgccggaactttccgaaaaaagccagatatagtttccaaaatcgttccaccgtacgtttacgacgcttgcacggatacctgtaaaacttaaaataaaggaaaatacgataggataaacgatgagtactcctacaccgatcaatgcaggaatggacatcaaatatccgcaaacattgcgctgtctgcgaaaagcctttgtgttcagcataaaagcgtcaccttgcttcgggcatcgcagctttacaccaatccgaatagctttcgatatttgcgctgctgcgggcatatgtactgggaatgatttctttcgcaggattattgtacatgaggtttttcagagcttttttcaactgttcatagcgctcctccatgatttccgcgcccgtaccgtgtgagttgctgccgctggaataataggaaatcttatctccgatcgaattgtaagaggaggtcgtattgtaatcgggcacatagtcgtacagggcggtaaaggtcatcgtttccaccatttcttgctgtacctcgtttgcatacgtcacgtttttgttcgccataatagacagggtggaatcgctgaatatttgctgcgcttcatcgctcaaaagatactcaacgaacttcttggccgcagatttttttgtggaggaactggaaatgcagaatccgtcgtaaccgccgtacgaatagccgtaggtgctgtcgtagccatccaaagaattgaaaatttcaggagcgggcaacgtcatgacgccgacttcgaattccgcctgctcggtaatttcgttgagaagattgttattgagcatcgccatcagacactccccgtcgataaacaacttttcgctcgcgtcttctccgcctgccagcaccgcatcgccgaacacgcccttcgaattccacaggcgcaatttatccatggccgctgcataggcattccaatctgtttcatcttgggaaatgcgccccgtcagataattctcgtcggaactcatgccggataaaacatcgtagtaggcaaacagcgccttccacatgaacatgaacgtgccgttggtgccgtacgtttttaacggcgtgacgccgagatctgccgcaaggatatccgataaaagctgttcaaactcttcgagcgactcgggttgtgcccagccatattcattgaaaaccgttttattgtaataaataacgaatcccgttgcacggaacggtacattgtaatgcccttccccgatctttccaagttcccacgcccgctcgtttttaaaacgggacataaatgcttcgtcgttcatgaactgctccgtcagatccgccgccataaaatcctctccttcaatgagtatttcacgcatctgatgtgaccaataggaaaatacatccggcatagtaccgccgagccacgcagtattgagcgcgctcatcatattgttataatcgctcgtagaatattccaccttgatgcttggattttctttcgtaaagttttctgcgatctcgtcgaatgcctccgcacattcgggccaatagtgcatgacgcgaatagtcacgggttccgtcggagtaggcggatcgtcttctccccagtcatcgttaggcgtggagccgcccttgcacccgacgaatgcaaaacaggcgaagcacatagaaaccgcaattgcgcaagcaacaagtttcagccagattttagtttgtttcatcttttcttctccttttcattttatttataaaaatgtatgactacatttccgccgccaaaaggggtaaagaaatacttttcggtataagtattttcccgaagagtgaaatctatgacctcgtcctcaaacccgcgtttacccataaacgtactctgtcccgtaaaattcacttctcccgaaacatgatgatgcggacctaaaagattgcgcagtccactataaaacatgacggaaactttgttttgtccttctataacgaatttccgaatatccagttcatcatgtacggaaaacaaacatccgacaactctgtcgttgattgcaacctcggcacataccgcgttcatgcaatcgacactgagtcccgcaatcgaggcatcgcccgagaaataaaacgatttttgaaaatttccactgtaaaaaaacaaaccttgctgtgtaagttcacgggaaaaatccacttgaggcaaagcgtccacggtaaacttgccctcgcattgcaaaacgccgccccgcgatgacgtcacagaatcgggatatacaccgaaacgaccgcacaaataaacagcctcgatttccagctcataggaaaagcggttgcgctcgctctcgaacactttatccggatcgattttcgtacggttgggttcgagtatatattccaatgtaagttcattcataccctttctgagttcgcaatcaaacccacggatatctctgtcgagaaaagaaatatcgtccaaacggtactttttgccgttccattcgattgtttgaacctttccctgttccaaaaacacgcggattttttgatcgatctttgaacagacagagtagcgtacccgcaacgatttgtttgcttgaagcgttttactgatttcataaatttcgttttgtacgaaaagcacgtatttcggtaaggtaaacgcatttccgtcaatgctgtacgcgcatttgtccaaagcaagtcggttttcctcgtcccattcagctgaaaaagtatgcaggacttcgctctggaaccttatcggtacattttcccgtgcgcagtttccgaatacaaaacctctgctctgcatgggctgtaaaagcacgcgcgtttcgcaaaaatcctcgcccgaacaggcaacggcgcaatccccctgtaaaaatctgcgctcccgaaaagtgcccgcacggtcggaaaccaatgtaaattcttttgtgtcggaagcactcttgttcgccaaaaatacatgcgtctcgccgtccttttcgcacacacgcatacgtacgtctttcaacaatcgtccgtcatcggacacgcagtagaagtttctgcgatatccgataaattgcagagccttaccccaaagttcagcacggttttgaacgacgccgccgaaaggaagttcgttttgtcggctgataagctcctcgagcgttttacttttttcatattcggcaaaccgaggcggcgcggtggtaaacaatattcttccgccattttttttgtattccaacaacaatttagccgtagaaccaagtatgctttccacgtgcggcacgatgatcaacccgaattcggaatttccgaaacacagtctcgtgcccttgatccgaacgcgtcccgaaagcgcaaattcgtccgccgtttcaaagtctgtttgcaaatcgctgagcgcttctatcaagagccgataagcattgctgacgacgcgcgcgttctcctccggttcgcaagcggcattttccagagcgctgatcaccagtatcttatcgcgaaattctttgcccgaattaaattcattcactgcatgcatccaatcgttcagataatgccattgcgcaaaccatggctcctgcccggaaaagaatgccggataatctcttttgcggttaccgacgaccgaataagcagaaaagtgcagacatgcgctgttgatccccgccgcagcctgataaccccaaatccaggcaaattgcgcgaaatttgtattccagccgctgcatccgaacgtttcgctgatgactctctccaatccctcttggcttttaacgcttcccaacgtctttaccaatacatcggagcacaatctccttccgagaaaatcgataccgggataacgcatcgagcgatatgcgagatcgcaggatcccgcaatctcgccctggtacagaagtccgtcctcggcgggaaggtgtcccgtcaaaatcaaatgattgcggcggcaccattcgtcgagttgttttatgtatgattcgataaataagggaaataaaattttgatatagcgaaggcggaacttcttatatttttttcctccgcaaagcacgcaaaccaaatcgtcttcaaattttctgccgtaagcgttttcgtatttttccgagagcacgggactataggagatatacccgtccatttgcggttcatccgtgaaaatgcctttgatgaccgtaccgaacaaatgtccgagtttgtccctgtatttttcgtgcgtacaacggataaacgcgcggcaggcttccggattcaaaagatcgacataatgaagatcgctctgcgctgcaaaaaagcagtctgctcgctcgggggtacaactttcccatccgttattcgtccggcgaaaacatgccgctatccgcatacccctgcacgccgccaaagaccgctcaaggcggagacgttgaatacacagcgaggcatcgctcgccaccaccaagccgccggcaaacccgctcggccaaccgtcctcatcgtacagccatacctccaagccctgtttccccgcttcgtcggcggcgatctccacagcagaaaaccattgttccgaaagatacggggttttcaacccacagcgcgagtgaataaaaaaacccgctattttctgctgcgcaaagccctgtatctggcggcgaatctccctttcgttgaggacattgttccatgcccaaaaaactttattcccgtatatgtccatcacatcctctcaccctttcatccattcgtttatttaagcaaacggaatattttgccttctcccgcatcaaacgagagcgtgaaactaccgtcatttaaggataccttttcatattcttttctctcggggttgaaatactccaatccgctgacacccttttcggagtcaagtatgaaatcggcccttacgctattcgtataatcgttattgaacagcatgacgtgtgaattttgcgaagcgtctttattttccatatacgaaacgataaagtcgccgtccgttttcgggcgcaggaaataatcggaaggcagcattttcaccccttcgtacccttcggcggtgtgatacgccgccgaaacgtcagagttcataacaataggagaaagcgcgcggacctgccaattcaaagctgaaacgccattgaacaaatcttgatcgcgtatcgttccgtctcggtaaatcaagctatcataaaaaccttcgccctcggtatccgattcgcccggacatacgtaattaaagtatgaaaatgccttaaagccgtaagccagataggaataaatgttccagcgaatttcattgaggtcggtcattctcttttccgtaaagccagtggactgtaaaaaactatgcgttttaatcttgccgctcgtataggcaacgtcgcgaataacttccatatccgaaaatattttgctgtcgtacgattttccgcccgctaaaaacgggtaaaaatcggtgctgatatactcgctgtccggacaggcatccacatacgcctgaatatactcgcggtatgtaggcgaaaacgcccctgttccgtagctcggcaacagattggtaaagggaacgagattgggcagagcttctctgtattggtcgaaatagcgtttgatcgttccctgaatgacagccgtcgtcggttcatcctttaaattgacaaagcggcaataaggactgtcaagctcagcatagtactcttttatttggtttaaagaaaagcggttagccccgtttaagtcctcattcgcgcaaataccatagacaatgcggtatttgcagcacagttcgtctatctgtttccaatcctctatgctgtcccaattttccgtatcccattgaaacggaaagagattgaagttgattcccgcctgtgcgagccggcgcatttgtgtatcgtgcgaggcgatattataacgataatatgtcacccaagaaccgattaaaatctgctcgttcaaatcaacgggttccgttgcctcgggtatatcttcccaaggtttaaattcttcgtccgggtctaaaggatctacaacgggcggatcaggtttcggcctttccgtttctttttccgcttcgccgcaagcgacaagtgtaaacagtaaacaaaaacacagcaatatgctgaaaatcttatttttcataacggtttctttttccccttttccattaccatcaggcataagattcccgcaacgaggaacgtagaggctaagacagatacacccgtaactgcactgccgcatccccgtgcttttccggaagcatgaacggtaatctgtaatgagtattcggttccccgaaacataactttgaccgtctgtttgccggctttatccttatcgtatccgcttacggtaaaatcggacgcacttgtttgcacggatttcaccgccccgctttcataaacttcttccgctaccaaggaggaaacgtcgaattcctcgccctgttcatattctgctttgctcgtactcacccgataggaaacgacctcgtcaacatattcctcgactccgatctcaaaagtcgcgcttattacaccgtttaagttttgtttcgaaacagtcaccgtctgcttgccgacggcattcttatcgaagccggaaatcgtaaagtcatcaagcgtgagagtctgtgtagtgccgtcaagcatggtcagcaagaaactgccccccgccaattcttctccctgcatcacgtccgcaggcgcggtctgtaccgtaagactctttgcgtaattatcgagttccacgcccttgacgtaaaactgcatgtcgctgataacggaatccgcgttggttctgtcaccgaatgcgatgcagggaatgcccgtccacgcctcgtccttaaatttcacatcaaattcgctgacgtatgtctgtccgccgatttcgagaatgtatttcaaatgcgaaccagtcatttcggacgtcaccgtataactgattccttcggattgatttggcgcgccgatttcagttttgacatcctcatgccaacctgtttcgtcgttataacggcacattacgtaggcaggcgtaccgcccccgttcatatttacacgtacatgcgagtcgagctgtgcatctttgccttgagaaaaaaccataaaaggtactgtccagccccctgtcgccgcaggtgtaaccgtcattctcgtaacgaaagtcaattcggaaatatttttttccgttccgtcctttaattttagtttcccgtctgtaataccgtcaagaacggtaggaatataaacagtcgaatcgtcgccatacaaaatcacttcacccgtagcggggtcgtattcgtttttaccataatcggccgccgcgaaatcagcgagatcggtgcgggtttccaccgtaacctcggcacgggcggatgccgtctgattgagcgtttcggcggacacaacgatctctttttttcccgataccgccgatgaaaaacccgatatcgtaagttcatcctgtgaaagcgtagccgtacttccgtccgcatatttcacgtctgccgttacgcccgtcaacgccgcacccttttctacgtaggcgggggcgtttactttcatgtccacgatataattggcgatttcgacatcctttatgtacattttcatgtctgaaaacactgaacctgccaccgcgcgcgcaccgatgccgaaacaaggcgtgagatcctctgtccacgcattttctttttcggcggtgtttgagaattctcccgaatccgtccgcacggaataatcatttccctttacttggataatagctttataaggagtaccgtccgccacgtagccgattcccgtttcggaaatgacggtttcagtgtttttaaacacgtacatattgttcagcgtattgcggaaatgatattccatcgtcgtatcgtcatttttcgcgaaaacgataaaaggaacctgccacacttggcttttggcggaaatcgtagcttccagaacgaaagtcagttcggaaaaatttttttcggttccgtttttcaatttaatctttccgtcgctgataccgtccaaaaccgtcgtaaaatagtctttcgtatcattgcccgtcaatgtgagcgtacctgtttccgaatcgtaggtatgatcgccccaatcggttgcagaaaaatcaatcaggttcacaaactcctgcgcagcaggagttgttgcggctgccgcaaccgaaacaaccgcaaacaacataaagagcatagccaatgagaaacaccataaaattgcttttttcatttattttcctccctgaatattatttgaatttccaaacggattcccgttccacaatttcggcatcgaaagtttccgactgtgacaactcatctgcaccctctatcatattttttaaaagacaaaacaccttgcgcccgtacgcttttttatcaaaccccactgtagtgagagcgggggtactgtacctcgcgatatctatattgtcgattcccatcacagatatgtcttcaggtactctcatccctgccttaagaaaggtgtgaatcgcgccgatagccatcaaatcattcgtagtaatcaccgcgcttgcgcgaatacacgtttgtaaaaaatgtttagcaatattctgcccgctctccatatcagtcgtatacggcggagcattttctaaaataataccctctttatgaaatctttcgcgatatgctttctgaaatcccatgcaacgttcatcgctcgtagaacggatatctaaacccgagaaatatacaatgttttcatgcccacagtccgcgaggtattggaccgcatcgtgcatgatacgtcgtttatctgtttctacgaacacatattgccgaccattattctcgattttattgccaaaaacaactttgatatcgttattttccaattcggcaagaagtttaacacaggtttccatcattccgagagtaatgtaaattcccgctacacgcatagatacaaggtcggcaataatattttctccccgattttttaaatccgccacgacaacaacgtagccgcttttataagcctcctgctgaaatccgtccatgatttcgctgtacacgggattggaaaaattgtcgataagaatcgcaacgatattaagatgtttttttgccaatcccttagcgatagcgtcaggtttataaccagttttctgcaccgcatccatcactttttctactgtttcttgcgaaaaattgcgcgaaccgtttaacacataagaaacggtttgagcagatactcctgcgatttttgctatgtctttccgatataatttcataaattacctccccattctcccgttttaaaaaaactatgcctttcctgattttatttgctatccgtgtagcagattttgcgatttaaatataacacaaaattttcacattgtcaatacattttgaaaaaataattattgatttattagagtgcctttaaatggatatgaagttaatggcatcgcggatatatatacccgctataggtagacaaatatctttgccgcattttgatgaaatactcatatacggtactcgtcgccctcgacagcatttttgctatatcgggataactcattcccgacattctgtaatccaatgcaagattcatgttttccgttaggttcaacgatgctataactgcgtcaacgatcgaatagtcttcttcctccgtttcttccgccatggcttcaatcttcatatttgctttttcaaggcttatatatttctgcatgtagcagtatttcctgcataacattctggttacgatcaggcagcattctatttttatcgtgatccttttccctcgtttcgagatatacaggaaat

SEQ ID NO: 230 - DNA, 27647 bp, Unknown
  16S sequences of unknown bacteria
cagaaattacacctgccgtaaatacgccggtgatagtttcgactgcgcttggacgcgcggtgcgcggaagttcggcaagcgcgctcaatatgaaaccaggtgacttcatatatataacaaagagcgcggggatagaaggtacgggaataatcgcctgcgattttacagatgagctgaggtctgtactttcagatgaggaaatagaagaggcaaagtcgcttctcgattttgtgagcgtaattcctgagggaataatcggcggcgaagttggaacgtccggaatgcacgacatcaccgaaggtggtattttcggcgcggtgtgggagatgtgcaccgtgtcgggaaacggcgctaaggtttatccggagcgtgtgcccgtgcttccggtaaccgagaaaatctgtacgcactatggtataaactttttcagactcatatcgagcggctgtatgctgatatcagtaccgcaggaaaacacagccgagatggaaagacgaatgcaggaagcaggaataaggctgacctgcatcggcgaggtaacagatgcatcgctcggcattactgcgcactatgcagatggccgcagcgaagaaattgctccgcccgcagctgatgagctttataaagtaatgaagagataattcaggtaaaataaataggtttattagaaatttttcagagatttcaatatttaaaagaagaaggaacgatatgagaaaaattcactacagctggtacatatgcgccgcctgcactctgatgctgtttgcatgcatgggaatgggcgccaacggcttttcgatttttatgccgatgattcaggaagcatacgggtttacgagcacgcaggtttcgtcgtttataacgataagaaatcttgtctgcttctgcgcgatgttttctgtcggcctgtattacgacaagctcggctatcgcataggcactacgcttgctacactgtttgccgcagcagcatacataggctttagtataagccgtacatacgcgatgttctgtgtgagcacggcgataatgggccttgcttattgcttcggtactatgattccggcggccattcttatgaacaaatggtttgtgaagaacagggcgctggcgttgtctgtttgcggagcgggcacgggtgtggcgatgataatactgccgccgatatcgacggggcttgtggatgcaatcggactttctgcgacattcagagccgagggtattttcataataataacggcagcgtttgtagcgcttatagttagaagcaatccggaggatataggccttatgccgctcggggcggagatagatgatgcaagtgcggagaaaagcagcgctgtgcaaaatgagaacgtagaagaaacagccgcgaaaattgatgcatcagaacaaaatgatgaccgtctgccaaagattctttgggtaacgcttatttctgcaagtatgctgatgggtgctgttgccagcgtaggttatgcgcatttatcagtgctttacagcagtgcgggatttgattcgggatatattgcggctatgataagcggcattggacttctgctcacacttggaaaattacttttcggatatatggcggaccgcatcggcggatataaaacaagtatgattttctggatattcttaattgcgggcgatctgctttgctgctttgcatatgcaggaagccatatcataaatataatcgttgcgtttacgctcggtataggttatgcgctttccaacctcggtacatcggtgtggtcgaacgatatgggaaaaggtgcgcagtacgcgaagcttgtgcggtatctgcagatatcgatgtcaggcggcgcgctcataacttcaaatgtaccgggaatactcgcagatctgtcgggaacaggaagctatcttccggcatatatcatgtttacggtgttctgcttagtatccgcggcattgacggcagtttcatacagctattatggcaggataactgccaaatattgagtgcgaataacagtaaaaattcagacgtaaaaccaaaagtatatttctgttgacgaaacagtcaaaaacaaatataataaattagtacgacaaaattgtcttttgacagctccgtcggcgcggtttgggtcccgcgcaatgggacgccgtgaaccttgtcaggtccggaaggaagcagcaataagcggaagctcttatgtgccgcggataagccttttccgatgtctgcggagctgtcaaaggacaattttgttttagaatatcggacttttcaaaataataaatttctgaaatcgagagaaaatccagggagaaacgagatgtatcaggcgctgtacaggacatatagaccggaagtatttgaagaaatactcggccaggagcacatcgtaaaaatattaaaaaatcaaataaagaccgattccgtgagccacgcctatttattctgcggcacgcgcggaacaggaaagacgaccacagcacgaatacttgccaagggtttaaactgccttgcagacagcgaaagaccgtgcggcaaatgcgcaagctgcctttccataaaggaaggcacatttatggatgtcatcgagatggacgcggcgtcgaataacggtgtcgagaatataagagagctgcgtgagagtgtaaaatatccgccggcaatcggcagaaagaaaatatatataatagacgaagtgcatatgctttcgacggaagcgtttaacgcactgcttaaaactctcgaagagcctcccgaatatgtagtattcatacttgcgacaacagagccgcagaaactgccggctacaatactttcaagatgtatgcgcctcgattttagaagagtgtcggaaaatacgctcgtcagcggaatgaaggcgatatgcagggacaaaggcatagatgtgagtgaggatgcactcagactcatagccgcaaatgccgacggctcggtgcgcgatgggcttagcattcttgaccagtgtctttcgggagggcaaagcagagtgacgcgcgacgatgtgctcgaatttctcggtacgtcggggatagaaactttcatcgaaatgacggactttgttctttcaggaaagacggcggaagcgatcctgctgctttcaaatgtgcttgcagacggtaaagatgtgcggcagtttatacgcgactggctttcccactatagagggcttcttatttcaaaatttgtaaaggacgcagcggatatactcaatatatcgagtgaaaacgcagaaagacttaaagaacagtcagataaaatagatatcggcgaaataaattatgctatagtggaaatatcgaagacgatggctgacgcgaaatggtcgacgcagccgcgagttctgctcgagctgtgcatagtgaaactgtcggaaagcagcatgcgcaaagagatatcggtgcatacgccgcgccgaagtgaacctatacagaaacacagcataaaagaagagccggcagtgctgcagacgcaggctcaaaatacagaagctgaagaaacagatttaattttgcaggagcttgatgaaggtcggcagagtacaggtgcggatgcaaagactcaaaatgcgcctgtagatacacagattttgaatagacagtcagagcctgaaaagaagatggacctcgatcttctctggcacagggtatttgaggacggagaaaatttcaagacgagctttaatctcatcagaagcgggacgagactcatctcaattgacgataaatacttttttgtacaggcgtcaaatagcctgaagctcaggtacttgaaagaaaatgcaagtacgcttgaagaccttatggaaaagcatacaggtatgcggcgacagctcaaatgcggcgaggaaggctcggcaattccgggtacagacggcggagaaatacctgacagcttgcataaagcaaataaaagtaaaagcgaaacggacatagaggcattaaaggcgcttgcggaaagcgaactcggcattgaaattgatatcgaatagcagcactaaagagagcggggcagaagagactggcagcaagcaataaacaggcgcaatgtaaaaatcgaggaaataaaatgctgtgtctgaaaaataaaacgaataagtaaaagtacagtcggaaaaaacagactgaaaaacagaagtaaatcatagggaaaatatagaaggagaaaagaaatgggcaaaggaatgagagctggtaagaagccaaacccaaataaaggaatgggcggtaatatgcaaaagcagatggcgcagatgcaggcaatgcagagaaaaatggaagaactccaggaagaaatcgataaaaaagaagttacggcaacatctggcggaggcgcagtttcagttacggtaaacggcaccaagcagattgtaagcatgcagataaaagaagaagctgttgaccctgacgatgtcgaaatgcttcaggatctcattattacagcggtaaacgaagcgctgagacagatggaagaggtttcaaacgcggaaatgagcaaacttacagcaggcctcggcattccgggaatgtaagaataaaataaaaaggtattaaaaatattattatgaaatattacgcaaaaccactcggaaaacttatcggtgagcttgcaaagcttccgggcataggcggcaagactgcgcagcgtcttgcgtttcacatactttcactgacagatagtgaagcggaagcgctggcgaatgcaattacagaggcgaagcatactatgaaatactgttctatatgcggcaatctcacagatacagatccttgcgctatatgtcaggatactgcgcgcagcaaaaacacaatctgcgttgtcgagagccctaaagacgtgcttgctatggagagaataaaggaataccgcggacagtatcatgtgctgcacggtgtcatatcgccgatggacggtattggtcctgacgacataaatctgcgtcagcttatcgtaagattgcaaaacgatacagaaataagcgaagtgatactcgccacaaatcctaatattgaaggcgaggcgacggcaatgtatatagcgcgtctgataaaaccgtcaggaatcaaggtgtcgagaatagcgcacggcattcctgtcggaggcgatctcgaatacgctgacgaaataacacttcttaaagctgttgaaggccgcagagagctttgataaatagagacgagaaagaatttgaaacgtaaaagcacaaatataagagcgcgaaatagtcgcgctctaaaattttatattatatttttttgcaagaccgagaagatacacatatttagatcttgcggcaagaatgctgtatgcagcatagtcaatagctgcttcgtctgtcagctcgttaaagagagcctctgcccgttcaaggtcatagcgggcttgctttatattttcaataagtatatcgctttcgctttcaggcttttttatattggcggcgatatgctgtacattatcgcgggcatttgcgagagcggaggaaatgccgcgtgccgctccggaaagatttattctcataacaactcctcctatgtaatagtccttatgcttctattttattcaagtacggcatattttatacggataaagatttttatgcggtgcagcaaaagaaagcgaagtgagtaaaagagctcattttaagttcattgtatagttaaaaagcactgcagttgacaaaggaggaaaattacagtatgggcacggaaattatggtatttttggcgtacggtctggggatttttataattttcttttttggcagattactgcttttaccgcttaaatttgtgggcaggcttatagcaaacagtcttctcggcgcaggactcatcgcgcttataaatatagtaggaagcggatttggcataggcattccgctaaatattgtaaatgcgcttattacgggagtgctcggtgtgccgggagtgcttatgcttttattgatacttaattaacaatatgaatttcggaaaatagagcattcagagttttttaataacgttaatcagggtgaaaatactcattatttatcgaaaaatatcaaaataacgatttttgacaaaagttattagcactaaaatgcttgttttttaacaattagttttgtataatagtatctggacgccgttcggcgtttataaaatgatcttataggaggattaaatgagcactatttttattctgattatttttgcattcgtagtggcgctcgctcttttggttctcaaggctgatgcaggaagagacattcttgttaagattgctgctgctgttatagcggcgggatcaatctggactgccgtagaatttttcagatcgggagaggacactgtgaatattgcaatgcacagtgcagagtcagttataagctatgctatgcttgcgattgaagtaatccttgccctggttgtgatattcctcggcatcaagcacaagaagtaccttgcgtcggtacttgcggctattcaggccccgtttacggtttggtttgaacttacaaaagcgcaccacatcgaggtcgaaaacaatgtcagcattgacagactttcgataattatgattctcatcgtaggaatcgtaggaagccttatcacagtgtacgcactcggatatatgaaggacttccagcatcatcagggcggacctgacagaagacctctgttcttcttcctcatgttcaccttcctctcagcaatgttcggactcgttgtttcaaacaacctgctctggatgttcttcttctgggagattacgacgctttgttctttcttcctcatcggtttcacaagaacggaggaagctgtaaacaattcgttccgtcagctcgtacttaaccttatcggagggctttccttccttacaggtataatcgtgctcgggtcattctacggaacaatcgaactttcgacgctcgttacactcggtgtacagggttacggagcacttatggtagtacctactatgttccttgcgcttgccggactcacaaaggctgcacagatgcctttccacagctggctgctcggagctatggtagcgcctactccgacatcggcgctccttcactcttcgacaatggttaaggcgggagttttcctcatccttaagcttgcaccgtgcctcggcttcaatatggcaggcattatggttatgctcataggcggaattacattcctcctcgcatcgtttgccgctatttcgcagtcgaacggcaagagagttcttgcatactcaactatcgcaaatctgggtctcatcgttatctgcggaggcgtaggagcaacgggcgcagtatgggcgggcattatgcttctcatattccacgctattacaaagtcgctcatgttcctctgtgtaggtactgcggagcaccagatcggatcaagagatatcgaagatatggacggcctcttcggaagacttccgagactcgcgtcatttatgatgatcggtattgcgggaatgttcctcgctccgctcggaatgctcatttccaagtgggcggcaatgacatcgtttatcgactccggaaacttcttcctggtagcggtgatctgcttcggaagcgcggcaactgcgttctactggactaagtggctcggcaagctttcggctatcgtggctgcaagagaaaacatagagagcggagtaaacaaggaagaaacgtttgtacacggcgcgcttgttgctatggaaatcgttatctgccttatattcccgtttgtttccaagatatttgtaattccttacatagaaggcgtatggggtgtatcaaacctcgcggcaacattatcatcgaacaatatgataattatgtgcgtaatgctggctgtacttctcatactcatacttctcttctacggaaagacaaacaaaaaaattgttcctatctatatggcaggcgccaatacaggcgacaaccttacatatatgggctcaatgcagactgagatgacacagtcgctcagaaactggtatatggaaaagtatttcggtgagaaaaagatgaatatgcttggacttgcttcgacgattacaattctcggagtagcattcgccatcgcaatcggtacaatcatcacgatgatgtcggtaatgggaggtggattctaatggtaaagatcataatttgtgttatagcataccttatccttgctcctgtcatcggcggacttctcgcaggtattgacagagttatctcggcaagaatgcagggcagacacggcccttcggtattccagccgttctatgatttcttcaagctgctcgaaaaggagcctatcactgtaaacaacgtacaggatttctacattgcgtgcttcctgctcttcatagttgttacaggctgcttcttcttcgcgggaatggacctcttgctcgtgatattcacactttcactcgcaagcacattccttatcatcgcggcgttctcgtcaaattcggcttatccgcagatgggtgctgaaagagaacttctgcagatgatggcgtacgagccgatggtgctcatcacagcaatcggtttctatctttacagcggaagctttaatgttgccgatattattcacaatagcaagatgagttttccgtatatgataggaattttcgccggatttttgttcattctcaccatcaagatgagaaagtcgcctttcgatctttcgatgtcgcatcacgcacatcaggagctcgttgcgggtctcaagactgaattctcaggcaagactctggcgatggtggaaatcgctcactggtatgaaaatatattcctgctcggatttgtattcctgttctttgcgaacggaacaatcgcgggaactgtaataggtatagttgtttgtcttgtaacgtacttctttgagacgtttatcgacaacaactttgcaagaatgaagtggaatgtagctcttaattcatcatggcttgtggcaatcacgctcggtatgataaatatagtagttctctactttatgtaaggaggtgtagtaatgtcatatgtaacaaagtcaccttgggtcattcattacgatggctcaagctgcaacggatgtgatatagaagtattggcatgtcttacaccaatgtatgatgtggaaagattcggtattatcaatacaggtaatccgaaacatgctgatatatttctcgtaacaggctcggtaaacgaacagaacaaagccgtagtaaagcagatatacgaccagatgccggaacctaaagtagtagttgcaataggtatctgtgccaataacggcggtatcttcagagaatgttacaatataatgggcggagtcgacactgtaattccggtagatgtatacgtaccgggctgtgcggcaagacctgaagcgatcatagacggcgtagtaaagggcctcggcgtactcgctgagaagagagccgctatggacaataagagtgccgcaccggcagcagctgagccgaaagcggaagaaaatacagaaacagaaggaaaggaggaagcataaatggaaaagaaatatttgattcaggaatttgaacaggtaactccggaacagcttcttccgagagtaaaggaaatgaagaagggcggatatagactcggtcaggcctgtgctacaaagcaggcggacggaaacatattcgttatgtattcattcgaccttgaccatgtattacacaatttgaaggttaatgttccgacagatctcaagctgcagagcgtaacgggcgattactggagtgcattcatctatgaaaatgaaatgcacgatctcttcggtatcacattcgagaaccttgcgcttgattacggcggccgtttcttcaaggtttccgagccaacaccttggaacccgcagaattaggaaaggaaggcagaaattatgggtaaaagaactattattcctttcggacctcagcatccggtacttccggaacctattcatctcgacctcgtactcgaggatgaagttgttgtcgacgtaattccgtcgatcggctatatccacagaggtcttgaaaagcttgttgaaaagaaagaatataccgaaatggtatatgtaatcgaaagaatatgcggcatatgctcgttcggacacggctggggagcttcggcttccatcgaaggagctatgggtattgaggtgcctgaaagggcagagtacctcagaactatctggcatgagctgtcaagaatccattcacatctcctgtggctcggacttcttgcggacggattcggatttgaatccctctttatgcactgctggagaataagagaacatgtactcgacttatttgaaaagacaacgggcggaagagtaatcttctccgtatgtaaagtcggcggcgtaagaaaagacatcgatgccgcaacactcaaggaaatatcggatacgctcaacgcgctcaagcctgagatcaagaagcttacagatgtattcctcgaagacgcttccgttaagaacaggactgtcggcgtaggcgtactcactaaggaagacgcgattgagctcggagcagtaggccctgtagcaagaggctccggcgtatatcaggatatcagacttaccggaaacggcgcatatcacgaactcggatttgagcctatgatcgaagaagcaggcgactgctacgcaagaacaaaggtaagaatcagagagctcttccagtcgatcgagcttatcacaaaagcggtagagcttattccggaaggacctatcgacgttcctgtaaagggcaatgtcgacggagaattcgtactgagactcgagcagccgcgaggcgaagcatattactatgctaaaggcgcaggaacgaagttcctcgagagaatgcgtgtcagaacgccgaccaaccagaacattccgtcactcgttaagatgcttaagggctgtgaccttgccgatgtacctattttggtactcacaatcgacccttgcatcagctgtacagaaaggtaggtgcgcgcagtatggcaacatttaaaataggcaaagtagtactcggaagtttatttaaaaagcctgcaacccgtatgtacccggtagtggcaagagagtggcaggacagaacgagaggacacgtagaaatagacgtaacatcgtgcatcacctgcggtatctgtcagagaaaatgcccggcaaacgcaattactgtaagcagagatacaagaacatgggaaattcagagaatgcagtgtgtacagtgcggcgcttgtgtggacaactgccctaaaaagtgcctcacgatgaagcctgagtatacagctccgggcggtgagaaggtaatcgacacatttaatattccggaagcgccgaaaccggcagcaccagcggcaccggctgcggatggagatgctgcggctcctgctgcgggcggtggtcttaagtgcgatacggattcctgcgtattctgcggactctgcgcaagaaattgcccttgcagcgcgattaccgtaaacagagatgaaaaacagtggactgttgataagagcgcctgcgtacagtgcggactctgcgttgagaagtgtcctaagaagtgtctcgtaatcgaataaaaataaaagttcattttaaagaaagggccgtgagtattttttctgcggctcttttttgttatttatttgcacagaaacaagaggcttttttgtttacaaacacaaaaaaatatggtaaaattatatataaaaccatttcaattcagttggaggaaaaattaaatgagcaaaaaaattatgaagactatggacggaaatacggctgcagcgtggacgtcatatgcgttcacagaagtagcgggtattttcccgattactccatcttctccaatggcagaagtaaccgacgaatggtcggcaaacggcagaaaaaacattttcggacagactgttaaggttgtcgagatggaatcggaagcaggcgcggcgggagctgttcacggctcaataacatcgggcgcgctcactactacatatacagcatctcagggtctgctccttatgataccaaatatgtataaaattgcaggagagcttctcccttgcgtgttccacgtaacggcgagatcgctttcatatcatgcgctcagcattttcggagaccattccgacgtaatggcctgccgccagacgggatttgctatgctctgttcaaactccgtacaggaagttatggatcttgcggcagtagcgcatctctcgacaataaagggcagagtacctttcattcacttcttcgacggttttagaacatcgcacgaaatccagaaggtagaatgtaccgattatgatgaactcgcaaagctcgttgactacgacgcactcgcaaagttcagagcagatgcgctcaatcctgagcatccgacaataagaggtactgctcagaaccctgatatctacttccagggcagagaagcgagcaacaagttctacaatgcacttcctgaaatcgtagaagagtatatggctaagataagcgaaatgaccggtcgtgactataaactctttaattactatggagcaccggatgcggacagagtaatagttgctatgggctcggtatgcgaagcagcagaagaagtaatcgacatgctcactgccaagggtgaaaaggtaggacttgtaaagatccacctttacagacctttcaaggcagacgcattcctcgacgctattccgaagacggcgaagaagattgccgtactcgatagagttaaggaagttacgggcttcggagaacctgtatacgttgatacatgcgcggccttcttcaaggcgggaagacaggcgacgatcgtaggcggccgctatggactcggctcaaaggacgtaacgccggcacagatcatctccgtatatgagaacttaaaggctgacgagccgaagaacaacttcgtaatcggtatcgttgacgatgttacaaacaattcgctgccggtacttccggaaattgacgtagcgggcgagggtactgtttcatgcaagttctggggactcggcgcagacggtacggtaggcgcaaacaagaactcgatcaagatcatcggcgaccatacggatatgtatgcgcaggcatatttccactatgattcaaagaagtcgggaggcgttactcagtcgcacctgagatttggcaagaatccgatcagatcgacttacctcgtaaagacggctgacttcatcgcctgccacaatcaggcatatatcaagcagtacgatatcctcggagatatcaaagagggcggaacattcctcttaaactgcgagtgggatacgatcgagcagctcgaagcagaacttcctgcaagcgtaaagcgcgctctcgtagagaagaaagtaaacttctatgtgatagacgctacaaaaattgcacaggagctcggactcggaaacagaacgaattccgtactccagtcagcattctttaagcttgccgacatcattcctattgacgatgccgttaagtacatgaaagacgctatctataattcttacataaagaagggcgaaaatatagtaaatatgaactatgcggcagtagacgcgggactcacgggctacaagaagatcgatgttccggcatcgtgggctgacgcaaaggacgaaaacgcaagcgaaaagaaggttcctgaattcatcgaaaaggtagttcttcctatcgcaaatctccagggcgataatctccctgtaagcgcgttcagcggcagagaggacggacattttgaatcaggaacagcggcttatgagaagcgcggtgttgccgcttccgtaccgcagtgggacgcttcaaagtgcattcagtgtaaccagtgctcatatgtatgtcctcacgctacgatcagacctgtgctcctcacggacgaagaagcgaagagcgcaccggcaggattcggcgcagtagaaggcaagggactcaattcatataaattcaagatgcaggtatcgccgctcgattgtctcggctgcggaagctgcgtagaagtttgtcctgccaaggaaaaggcactcagcatgcagccgctccacacgcagatggcggaggcggaaaactgggagtacgctatgagcgtatcgcctaaggaaaatccgctcgacaagtacagcgtaaagggcagccagtttgaacagccgcttctcgaattctcgggcgcatgcgcaggctgcggagaaactccttacatcaagcttataactcagctcttcggagacagaatgtatgttgccaacgcaacgggatgttcgtcaatctggggcgcttcggcaccgtcaatgccgtatacaaagaaccacaagggacagggacctgcatggtgcaactcgctcttcgaggacaacgctcagtttggactcggtatgctcgcgggacagaagcagagacgccagagaattatcgatgcagtgacacagcttgttgaatgggacatctgtaaggaagagggtcaggcttggcttgatactaaggatctcggcgaagagtcgaaagcaacatcggcagcgctcattgaagcgatcaaaaagataaacgctccttgtgacgagtcaggcaagcttatcgacatcgtaaaagaaggggaagaccttctcgttaagaagtcgcagtggatattcggcggcgacggctgggcttacgatatcggttacggcggactcgaccacgctcttgcatcgggcgaagatatcaatgtattcgtactcgatacagaggtatattcaaatacaggcggtcaggcttcaaaggctacgccgacaggtgcggttgctaagtttgctgcttccggaatgaagacaaagaagaaggacctcggccttatggctacttcatacggatatatctacgtagctcaggtagctatgggtgcaagccagtcacagctcatcaaggctatcaaggaagcagaagcatatccgggaccgtcactcatcatcgcatacgctccttgtatcaatcacggtatcaagggcggtatgagcactgctcaggagagaatcaagaaggcagtagaatgcggctactggcatatgtggagattcaacccgcttcttaaagaagaaggaaagaatccgtttattctcgattccaaggagccgacaggaaacttccgcgacttcattatggacgaagttcgttactcgtcgctcgtaagaacattccctgaaactgcggaacagctcttcgagaagtgcgaaaacgaagcgcgcgaaaggtatgagacatataagaatatggcagcagaggcataggtttgcagcgtatatatcggtgaataccaaaagagtcagtgaaaaacactggctcttttttgtataaagaaaaccacgcgtttgacgcgtggctgtattgttatgtattgatacaagattcgatcatgtgcagctgctccggactcttctgcgtaatcagtctttcgcagagcgcgctgcgaagcggcgcggcttttagtctgcatcttaattacatattcataaatccagacatcatgcagccgcccgcggcgccggcattcagcacatcgccgatatttgcgggcgatatcccgcctatcgcatataccggtaagccgctgctttcgaggcaggctgcttttagaaaatcaaggccttttctgggaagcccctttttacagtcggtttcaaagatgttgccgaggactatctgtgttgccccaagttttgctgctttccgtacttcatctatactatggcacgacacgctgattttaatgaaatgtgccaaaaaattatctatatcatataaatctgaattgtcattttcatgtttttccgtattgcagcaaaaatctgcgaaggataaatgaaggtgtttacagcataaggcgcgggctgtatctatatgtgagtgtataaaaagcgtaacaccgtatttatcgcagattttttttacccgtgccgcaaagaccgcatattcttcacgattaagctctttctcgcgaaggatgacagcgtgcggctcaagcgcagctattttttctatttgactgaaatatgaatcatcgctgcctgcgagctgcctgtttgtaacagctatatatttactgaaatcatatgtatgtttcatgagccgcacctgcgatattatacatagagatagtcgttgagaactggctgcaagccgccggcctccatatccttgtacatgcgctcaaacgaacggttgtcatctatctcaaactgctcgtcgccaacatcggcatcttccttgccttcgtattttgtttcatggtcaccgacgcccgtcgacactccggcggagacctttgttgcgcatatgtgagttataccgtttctgaaacgctcgttttcacggctggagaccgtgatgccgacataaggaaggaatattctgtaagcacagagtatctgacacagttccttttcgccgacatcacgcggatttatcttatcgttgttgatgatagggcgcaggcgcggacagctgagactcagctcggcatgcggatattttctgtttatgtaatatacatgaagcgcgcttgcaagcgcgtcttttctgaaatcatcaagtccgagcagcgccgaaaacgatacgccgcgcatcccgccgcggagcgcacgctcctgagcgtcaaagcgatacggccagattctcttgtggccgagcagatggagcgtttcgtatttgtcgctgttgtatgtttcctggaataccgtcacgtaatcgacgccgcactcatgcagataagcgtattcgtcggtgttcaccggatatatttcgatgccgatatttttaaaatacttgcgtgctatctttacagcctcacctatatattcaagatcggagtatttgcggctttcgcctgtaagaattagaatctcttccattcccgtagcggcaataacctgaacttcatgttcaatttcttccatagtgagcttctttctgtgaatattgttgtagcagttaaagccgcagtagatgcagtaattctgacagaagttggctatatagagcggtgtaaatatgtagaccgtgtttccgaaatgctttctcgtttccagttcggctcttcttgccatgcgctcaaggaatggagctgcggcaggggagagcagcgctttaaaatcctcgattgtacaggtttcgtgggaaagcgcacgctcaacatcttctgctgtgtatttatcgtaatcatatgcgttcatctgcgagattactttttcctgtatatccgattcaataacttccataccgggcaagtatgtcatatgatcgattctcgatgacgggtcctgctcgagccttttctttctttccgcggcttcgggcggcaaggtgtcgttgtctataaaataaacctgagtttcttcgttcattttaatctcctttcttatctgaggaaacctgtgagagggtcggatgcacttccgcctcttgtgagaacgcgtcccatacccgttacatatgccgtgcgtccggcttcgattgcctgtctgaaagccctcgccatcgcagggatatctcctgccgttgcgatggccgtgtttgccatgatagcggcagcgcccatttccatagcctcgcaggcctgagaaggcttgccgatccctgcatctacgataatgggaagatcaatttcgtcgatcaggatttgaataaaagcttttgtcgcaagaccgctattgcttccgataggcgatgcaagaggcattactgcggcagcgcccgcattttgaaggtcgcgtgcgacattgaggtcgggatacatataagggagcacaataaagccttcctttgccaggatctcggtagcacgcaccgtttcgtagttatccggaagcagatatttcgcatcgtgcattatttcgatttttacaaaatcgccgcagcccatttcacggccgagacgggcaattctcacagcctcatcggcatttcttgcgccggaggtgttgggaagaagggtaacccctttgggaataaagtcgagaatgttttcgctcggctgagtgttggctcttcttatggcgagcgtgataatctcggcgccgccttcttccacggcagcgtttatgagattgagattgtattttcccgacccgagaataaagcggctcgtaaattcgtgtccgcctaaaataagtttatcctgcattttatgtaattcctttcttttaatcactcagtattaatcactgaaattatccgctgcagcggaaacgtctccgagtataagctcgatgaccttgtctgcctgatgacccgcgcatactgctacgcgcggagccataagaccgattccgccttcaattccgctctttccatctccgcatacgtataagcgctcgaatatttttttcgtttgtatatcgttgcagtttccgtagcccgccattccgtttcccgaaacgatgcgcatttcgggacatgcggaaagaagagaggatatgagcattgatttgttttctgccctgtcgaatgcttcgcagacgatatcatatgatccgaaaagctcttcggcattgttttcgtccacggttttgcagcatacttcaacgtcgagatacggattgatttcagcaataatgtctttaatggcctctgttttaggttttcctatgtgcgatgcgctgtaagcctgcctgtttagattagtaacgtcaacaacatcaaaatccacaagaaaaaggtgaccgacaccgctccttgcgagcattacggctatgtttgagccaagaccgccgaggcctgcgacagccacgcgggcgtcggcaagctttgcctttgtttctgccggaaagcgggaatcaaacgcacgctccaattcttcttttgagataatatcaaccaccccctacaaagctgacgatttctaccgagtcaccgtcacggagaatggtttctgcgtaccttgatttcggcacaattgacagattgatttcgacagctattcgcgcgcagtcatagccagatttatgaagataatctgccagagtctgtccggatgcgtccttttcgcagccgttgattttaagcattttacataccactcctttccgaaacaaaaaacagagctgtcacgaagtttcatacccgaggtggtatgccccttcgtgacagctctgccgtcactctgagcaaagcatagcacataaaaaagaacctgtcaacaaatttttgacaattgctcttagtaaagtgccagtgtatgcaggctgtacaatatcttaaaatgtataaaaatacattttaagatattggcgcggaaaagttgacagaattataaggaaactgtataatacgaaggtattcataatttatttattaacaatgagaggagattaaggatatgaaatcaacaaaaaagatattagcgcttcttctcgttttcgtaatgttgtttgcaacgcttacagcatgcggcggtggagatgacagcgacacgggcgacagaacggatctcgtatacggactttcggcagatccgagcaagctcgaccctatggcaatggcagaaatgagctcatttactgtaacatatgccatttatgacaacctttacgaagaagatgcagacggaaactatgttccgagcctggcaaaggatattgaaatctcagacgacggactcgtatatacaatcagtcttcgtgatgatgtaaagtttcatgacggctctcagatgacggctgacgatgtagtattctcgatcaaccgtacaatcgacaagggctgggcattcgatatggcaggctacattgaaaatgtagaaaaggttgatgagtacacagtaagagtaactcttcatactccttttggcggaatgatcggcagctttgcttcgcctttcttctcaattatgagcaagaattatcttgaaacaaacggtgacgatgccgcggaaagaaagccgatgggaacgggtgcttataagttcgtagaatgggtaagcggcgatcacatcactctcgaagcaaacgaagattacttccagggagctccggcaataaagacgattacattcaagccgattacggataagaatacaggtctcatttcgctccagacaggagaaatcgatgcattcctcaatatcaatgcaactgatatcccgacagttgaagcagacgacagcctcagtctttacagcacagatcttgctgccgtgcttacattcaacatgaacgtagaaaaggctccgcttgacaatgtgaatataagaaaagctatagatctcgctatcaacagacagaacatcatcgatggtgcgcttgagggcagaggaacaatcgcaaattcaccgatagctcctacctgcgaaggatattcgacaaatgtagaagcaacagaatgcgaccctgaggcagcaaaggcgcttctcgcagcagaaggctatgatgaaaacaatccgctcgtaattactatgaagatcaaagaggacgccaagaaccagagagtagctcaggttattcagaacgacctcaagcaggtaaacatagatatgcagatagatgttatggaagcaagcgcttacagcaatgctatctataatacaggtgattttgaagtaacaatcttgagctggtgcgcaatgttccctgatgcacattcgcttctcttcagccagtaccataaagactgctacggcggtacaggcaacatcactcgtatagtgtctgacgaactttcgagtatgcttgaagctgcggcaacgatgacgggagaagagagagtacaggcttatgacgatgttgtaagaatgattcaggatcaggctatagcagcatatctcgtttacgagcctactactatcactacaaacgctcagctcaagggcgtacaggcaaatacgataggaatttacaaggtaaagaattggtcttggtaggaataattccgcaaatcgaaaaaaataatgaagtcaaaagtatcgtttagatacgaagatagagcggagcttgactcgccggcggagataaatctgccggcatgcaggctctgttttgaatataggacagatatgaggtattatatatgggaaagtacattggaaagcgtcttcttatgatgatagtagttgtattcggcatttcgtttatcgtatttacaattatgaatctgacgccgggaaacgcagcttatatgatactcggacagagcgcatcacctgagcgcgtggcacagctggaagaggaacttggactcaacgatccgtttttcgtacgctattttaattatattgtcgatatgctgcacggtgatttcggcgaatcgtacaatacagggcttcctgtatttgaggaaatatttacgagattcccgtcgactcttaagctttcgacagtagcgatgttttttgcagcacttatcggcattccggtaggcgttatttcagcagtgcgtcagtattcctttacggatgcaataagcacaacactggcacttctctttgcttccattccatcttttgtaatggggcttgttcttatgctcgtattcagtcttcacctgagatggcttccggccacaggacttgacagcatcgagagctatatattgccggcattgacgctttcgactgcaactatggctacactcgtaagaatgacgcgctcgactatgcttgaagtgctcaagcaggattatataaggacggcaagggcaaaaggcgtaaacgaaagaactgtcgttttaaagcacgcgcttaaaaacgcgatgctgcctatagttaccgttataggagttgattttggctatcttctcggaggtacggtagtaatagaatcggtattttcaataaacggacttggaacgcttcttattacagcgataagaatgaaagacacgcctactgttatggcggcaataatgttcgtaacgcttgcatacagtattgtaaatttggtggtcgatattatttatgcgtttattgatccgcggattaaatcacagtatgagaggggttagctgactatgagcagaagaaatgcgaaagaagaaacgcagataaagagcagaagtcagatggcttctatctggatgcgtttaaaaaagaataagatggctatggcaggactatttatgcttctggctatgattttgatagccgtgtttgcagggattatcgccgattacgataccgaagcaatacagcagaatatgccggagcgtatgcagactccgtccgcaaagcattggttcggaacggataattttggacgcgatgtatttgcgcgaatcattcacggctcgagaatatcgctttcgatgagcattatagctatggctatcgctgttgctatcggtgcggtcataggcgcgattgcaggatattatggcggcaaaacggacaatatacttatgcggtttatggatatacttcttgcgattccgccgatgcttatgtcgatatcaatagtagcggcgctcgggcagagcatggtaaatcttctaattgcgcttgccatagcgtatataccggtgtttgcaagagttatccgttcatcaattctttccataaaggatcaggaatttatagaagcagcaaaatcctgcggcagcagtaacggcagaataatatttaagcacattataccaaatgcgattggacctatcatagtgcaggcgacgcttgctatgggagcgacgatacttataattgcctcgcttagttttatgggtcttggtgtcaagccgccttcgcctgagtggggtactatgctttacgaaggaagagactttttgaaaggcgcaccttatctcgtgcttttcccgggcggagcaattacacttgcagttatctcgctcaacctgctcggtgacggactgagagacgctcttgatccgcggctgcgaaactaaggaggagaacttatgagtaataaacttttggaaataaaaaatatatcggcagaataccgcacagatgacggagtttcaaaagtgcttaacgatgtaagcttctcgctcaataacggagaaacgctgggactcgtaggcgaaacaggagcggggaaaacgacaaccgcgcttgcgataatgagattgctgccgaagcgcacaggctttattacggggggcgaaatagagtttgccgaagaaggtaatcttctggaaaagaacgaggaaattatgaaggccatacgcggacacaggatatctatgatattccaggatccgatgacgagcttaaatccggtaataagagtaggagagcagataaaggaatcgtttgaggtgcatatgccagacctttctgatgcggaaatggagaaaaaggtagatgaaatccttgaaatggtaggcattcctgcatcgagaaaaagggaatacccgcatcagttttccggtggaatgaaacaaagagtagtaatcgcaatggcgctttcatgcgaacctgagcttctgatagcggacgagccgacaactgcgctcgatgtaacgatacaggcgcaggtgctcaatatgatgaacgaactcaagaagaaactcggtacatcaatgattctaattacccacgacctcggcatagtttcgcagaactgcgaaaaggtagctgtaatgtatgcgggctcaattatagaatcgggtacagcggaggaaatattcacaaaggatgagcatcatccttatacagttggacttttcggttcaattccggacctaaataaagttacagacaggctttcgccgatagatgggcttatgcctgatccgatggaccttccggagggctgcgtgttccatccgagatgtcctaagtgcatggaaatatgcaagacaaaggttcccgagacggtttcgctcggcggcgagcatcttgtaaaatgtcatctgttcggaggaggtgaaatagatggataagcctgtacttgaggttaatcacttaaaaaagtatttcaagacgccggcaggacagctacatgctgtagacgatgtcagctttgcgatagaaaaaggtcatactcttggagttgtaggtgaatcgggctgcggcaagacaacgctcggaagaactatactgagattgatagagcctacgtcgggagaaatctatttcaacggcgaggatataacaaaattaaaaaaggacaatatgaaagcgataagaaggaaaatgcagcttattttccaggatccttacgcctcgcttaatccgagaatgtcggtatcggaaatcatcaaagagccgatgatagtaaataaaatgtgctcttccaaaaaagaactcgatgaaaaagtaaaagagcttatggagcttgtgggacttgcaccgagacttgtaaacacatatccgcatgagatggacggcggacgccgccagcgcgtaggtattgcaagagcactggcgacaaatccggaatttatagtgtgcgatgagccggtttcggcgcttgacgtttcgatacaggcgcagatattaaacctgatgatggatcttcaggaagaaaagcagctctcgtacttatttataacgcacgatctgagcgtagtaaagcatatttccacagagattgcagttatgtatctcggacaatgtgtggaaaaagctcctacagaagagctttttgcgcatccgagacatccatatacaaaagcgctgctttctgcgatacctgtaatagatatatcgcagaggggaaagaagccggagcttcttacaggagaagtaaattcgcctgtaaaccctgttagctactgcagattttattctcgatgtaagtatgcgtgcgataaatgcaaggagcactcatatgagcttaaggagatttcaccggggcatttttcggcctgtcatatgaattttacgggagagattgagtaacttttgattgagtaatttaagtatataaataggataaaaggcggaaaggatttacggtataatgaatcagaaaaaaattgagaattacgcagatttagtgctgcagcgcggagtcggtcttacagctggcgatattctcgtcatagaagatccatctgtaacgcaaatagagtttttgagaatacttacgaaaaaagcatatgagctcggcgcaaaagatgttgtcattcattttgccgaccaggagctcactaagataaggctcgaaaatgcagcgatggagactctttctgaaatgcctgattggtgggctgagtcgcgccgctattatggcgacaaaaaagcttgcttcctgcgtcttattgatgagagcccaaacggcctttcgtcagtatcgacagatagaatagccgcctggaaaaaagctataaccgagccgcttaaagacctcgccttccgcaagaaagaaaatcttgttaagtggagtgcgcttgcacttccgggaaaggagtgggctaagctcgtatttcctaatgcatctgaggaagaagctgtcgaaaagctgtggaatgcgatatttgacgcctgctatgttacagaggaaagcggtatagacggctgggacaagcatattgacgagatgtgggaaaatgtaaagaagataaatgcgcttaatataagaagtcttcattttacaaattctttgggaacggatattacaatggatatctgcgatgatggaatttttacagggggtatatgtcactgccctgagccggatggagaagtgtttgcaccgaacattccgacggaagaaatactcgcaacgccgcataagcttaaagtaaacggcgaagtttacagctcgatgccattcgtacacgcgggtaacatcgtagacggcctttatctcaagtttaaagaaggccttgttgttgattacgatgccaagctgggaaaggatatagtaaagggaatactcgagacggacgaaggctcgcggcgcataggagaaattgcccttgtaccgtttgattctccgataagaaagagcggcgtgcttttctacaatactttgtttgatgaaaacgcctcttgccatattgcgcttggtgccggatattccgatgttataatgggagaggatagaagcagcgaagcgcttgaggaaaaagggttaaacctttcagcactgcatgtggactttatgttcggtacggaggatatgcgctgcaaggcgacatgtgcggacggccgcgaagtcgagatatttaagaacggtagttttaacctgtaaaacataataaaggcatctgccggcgtacaaatatttgcttgatttcagcttgacttgcagttgactaagattgatgacaataagaggctctatgacttcggcgaagttcatagcgccttttatgttagaatttaaaagggcagcgtccttctggaatacatctttattcgtaaatggcagcatatttgttatatgctcgttcggtatcgtcgtaaaaatgttgttgttacataagagagaacacaacagcgccttggctgcataaagacaaagctgcgattttgatgtatgaaaccgcaagccagaactggttttagcagctgacagggcgtatattaaagctccgtacctctttggtcggaacgaagaatatatcttttcaatttttacgtttataaatgaaaacatgtaagggtgggactcgtataataaaaaatctgtaaatttcctttgttcattataacaaatatattttacagaatttcaccgataggttttattacgagggtaaaaagtaatttgcggcaagatttctatcaattagtatttctaatcccaatattatatttgttaaattccaaattcttctgagtatttaataaagccatgaatatgaggtgcgcttgcgcttattttaaaagccataaaattttctttgggcacgtcaaacggcggttttataccgaatgtacatgctggcaaatacccgaatcttgaatagtatttttcacttcccaatacaactgaatatccatagcccaaattcttagcgatttcgtgtccgctttttattaaagcagttcctactcctatcttttgatattcaggtaggacagatagcggtgctaatgctaaaacagcagtatcttcgacatatgcttttgtaaacataatgtgtcctgcaatatttccgtcaatttcagcaaccaatgataattccgggatgaatgcctcgctctttctcagcgcgaccactaaatcatgttcatttccgtctgcgtgttcggcattagcaaacgcactttttattactgaatatacggtttcataatcttttgatgtttcttttctgataaacatacagtacctcataaaattccgaacctattgattatttaattgtagcataaccgctttaaactgtccatgcttccattcatatgtgtaccccgggataggtatgagtgcaggtaaaagaatattaaacaattgcctggttattttattgtaaacgccttataagaaaagctttgattataatcgggaaatggctaaaaatcagacattcagggccgttaaaaaagaataaaaatttttgcaaaaaatatgttgacaaaacatttaccaggtggtaatatataaaagctgtcacttgaacggtaagctcaaaaggttgaaagaaaattttgaaaaaatttttaaaaagtcattgacaagaaccggacagagtgatagaatataaaatgttcgtcggcgaaagaagacgaacagcaaaagagcgatagaagctcttaggaaccttgaaaacttcatagtgaaagaaagaag

SEQ ID NO: 231 - DNA, 8574 bp, Unknown
  16S sequences of unknown bacteria
ttcaggcatcactggatgcaggaatgaacgcacatttgtcaaagccgattgtgattgatgaagttataaaaacgattttaaggtatacaaaaccagacatcaatcagaaggtatcgtgccacgtggaatgtgtgacaaaacttgaacgggaatgatgaaggagctcaaaatgtctgaaaaacaaggtgtcatttacatactgaccaatccttcattcccggaatatgtgaagatcggctacgcagacgatatcgaccgcaggctcgcggagcttaaccgcaccgagtgcacgccattcgcgttcagggtttacgctacctacgccgttcagaccagactcaccgatatgaagatccacgagatgatcgaccggataaacccggagctgcgctctatcgataatatcaacggaaagaggcgtgtccgtgagttctacgcgatgagcgccgaggacgcttatctgatgttccaggcgatggccgagattcacggaacgacaaagctcctgaaaaaatacgagccggatccgaagcaggcggaagaagaggaaaccgcgaacgaagtcaaggagctggcacgagaaaagaaagagccgttttccttcgatcttgtcggcataaaccccggtgagacggttgagttctggtactcggcactgaaggattcgggaatggtctgcaaagtcgttgatagcaagcacatcgaatatgagggggagacatatactctgtcaggctttgcgaagaaaatgacaaattcaccgagaagcgttgcgggtcccatgtatttcaaatataaaggcgactggctgaacgatatcaggaggcggcttggcgtctgattcccgaaatcaatagcatgattttaaccaaaaacggtacactgagtgtaccgtttttgtattcacgctgccttaatccacaaactcataaaccggttcgctcgacgttctctgcgccgggtcatagtagtagtaaccggtcaggtaatccttccgttcgccggaatttataccggacagtgcgaagtctatgcgcacggttccgtcttcctcgtaatcggcgtaatctttgattttcattatgcgtacgtagcgggacaggtcttttccgctgtcctccgcgatatattcgaacacttctttgaacggcaggtaaagcgtatgtcttccaatgccgccgatgtcgaacatgatcgggtagctgaagggcgagccaacatatccgcagttcatcgcgacaaagcggctgtccggcgaccagagcacgttgactttttcccagctcatgccggtgaaggttttgagttcctttccggttccgttttcatagacgcttatagacgggtagatgagctttatgtcaccgttccacaaggttccggcgtattcggtgaggttcgagtgcgcgacgaatgtgtattgtccgtccggggagactacggtcgggtcgtatatcgacgggtcgatctggtattgtgcaaccattatcatccacgtgcggagggctttttttgaatcgtccttcattttcgcgagataggggagggcgtccttaccgtaggcggttatgacgtcgaagtcttctttgcagagggtgatgtattcgccgatggtttggggctttttgccggtttcgtttttgacctgcgttattttgtcgatggttttgtcgatggtgtcgcacatggccttgtacgcggcttttttggcttcgagttcctttctcgcggcggcgatcagcgagcctgagatgaagtttgagcgcggttcggcggcgtggactgccatgccggttgagagtgcgcccgcgatcattatcgcggagaggatgccagctgtgatcttctttttcatgatgatgctcctttacgaacaataacggacattctgccgtttggtgataagacgctctgtttcgcggaaagttccataaaaagtgtgtttttttgaagctttttgaaaggggtgcaggggaaaactttttctccgaaaaagttttcccttgcgaaatattatctctttgtcatttcctcataaggatcgacgttgttcgcgaataccggtttgattctgactgtccaggagaattccttttcgttcagctggtataccgggtcgagggaggggccgcaggagtttgagcctgagccgctctgggcgtagtcgatgctcaggactgtttctttcatcggaatgagttcaaagtcgtgagcggtgtttgtgagctgctcaggggagaagtgcatcgcgttgaaggagaagtcgtcggttccgctggtgacgaggagaccctgaccggcgacagaggagacgattgtccattttgttccgtagtgggcgctgttttcctgcgggcggacgtagtgctcgaagttgtctttgacggttgtcgtgaattcgcccatacgcgcggcgaggttcttgtcctgataggactcgaccggaccgtatccgtagtatctgacgttttcggtcatttctggcattgtcagctcgaggccgaagcgcgggaggaacggggctttttcgttgacctttacgtcataagtgattctcagctcgccggtcgcgaagactacatacttcacggtcgcgcggaggatgggtcttgacggagccgcggcgagggagatctcggactcgaccacggcggtcttttcgtcggcggaggcgaggcgcgtcgagtagcagtgtacggtcgctttgtcgaagcccatgctcatccactggttctttatgttgcggtcgttgtccatcggggcgcgccacacggtgagcttcgcgggctttgtgaggagctctctgccgttgtcacggatggactttatctcgccgtatgccttgtcgaaggtgtagactgtctcgtcggcggttatctttatgtaactgtcgcattcagcggcggtgattgtcacgcccgccgggatcgattcgcaggtgcaggttatctccggcttcttcgattcaaccggtatctggacgaaaccgatctcatagccgacgtcagcccactctgttctgcggttctggcggaacgagagattcaggtagtaccagccctcgccgtcagccttataatcaaggtcgaactccttctcctcctgcgggagaacgccgagagagcggatcgtgccgccgtaggtctccttgccattcttttccagcgaccagacgaggttcacgtcgtcgaggggcttgaaataccggaggttcttcacagctatctttctatcggagacgaggcgggcgctcatcggcttgattgcctgcttgagctcgagaagaccggtgtgcgggcgtctgtcggggtagacgagaccgtcgacgcagaagttgccgtcgttcgggtaatcgccgaaatctccgccgtaggtgtaccgatagttcagattgtcgtcggttatcgccgtcgagtggtcgatgaactcccacacgcagccgccgaagaagctgtcgtgcgaatagatctgctcccagtattccctgagatcgccggggccgttgcccatcgcgtggcagtactcgcagaggaagagcggctgggtgaacttctcgtcctcacagtagtttctgcaccactcggggttcgggtacatatggctctcgatgtcgaccgtctcggtgtcctgtacgcccttctggtagtccttgtgcgcgccttcgtagtgtacgagccttgagaggtcgcggctctttatgtacgcgctcatcgccttgtggttgcgcccgaagccggactcgttgccgagcgaccagaagatcaccgacgcgtggttcttgtcgcgctcaagcattcttcttgcgcggtcgacgtatgcctctgtccactcggggctgtcggagagctgcgaccacggggcgttctctatcctgtcccagtcccatccgtagccgacgcccattccgtgcgtctcgatgtccgactcgtcgcagacgtagattccgtatctgtcgcagagaagggtaaggcgcgggtcgttcgggtagtgcgaggttcttatcatgttgacgttgtgagccttcatgatcatcaggtcgcgcttcatgtggtcgagcggggtcgcgtgaccgagcagcgggtggctgtcgtggcggttgacacccttcgccttgacctttttgccgtttatgtagacgaccttgtcgatgacctcgatccggcggaagcctacaggaatgcagatgatctcactgccgcaggtgaggatgaggttatagaggttcggctcctcgtcgctccagagaagcggggagtcgatgtccgcgtggatattcccgtctgaaacgacgccctccgcgacgaccttgccgcaggagcactcgagggagtacgcgatgtcggttttgtctgttgtctttatctcaacgctcagctcgccttttgtaaagtcaatgttcagcgaaggcttcgcgaagatatcgactatgtgaaccgggtcgcggtagagcaggtagacctcgcggaagattccggaggagcgccacatatcctgatcctcgagataggagccgtcgcaccacttgaggacgagaacctttatgttgtttctgccggcacggaggtactttgttatgtcgatttcgctcgtcatgtgcgagacctggctgtacgccgcgaaggttccgtttatgtagaggtagaagcaggagtcgacgccctcaaaattgatatagattttcttcgtgtcgagaacgttcgccggaaccgtgaagtcgcggctgtagagaccgcaggggttttcgttcgggacgtgcggcgggtctgtcgggaagggatagtttacgttggtgtactggggcttgtcgtatttcagggtgttctgccagttcatgggaacggtgagcttgtcggcgtcgtccatcgtgaaatccggcgcggtgaagtccggcacgtcagccgcggagctgtagaatctgaagtcccagtcgccgcagagggatttgaagtatgcgctcgcggcgcggttgtcgtccatcgctttttcttttgtctcggcggggacgaagtaggagcggggctcttcgcagttcacgtgaagcgttgcgggggactcgtggaatccttgcagtttgatcatggtgtgcgtgtcctttcgtaagtgttataaagctttttgaagaggggtgcaggggaggaactttttctccgaaaaagttcttcccctgcgaaactaaggtgtttatctgtctatgggattaccgttgccaccctttgcgagttcgtcgacagggttgaatctgtgcgggcagtttgtcggggtggggattacgagatcggtctttgcccagcggacggcgttggtgattatcttctggacgtaggggttgtggaaagcgccgtaggtttcgtggccgggctggaagtagaagactttgccgacgccgcggaagaaggtgcagccgctgcggaagatgttgccgtgctcaaaccagctcgtgaagacaagttcatcgggctgagggatgcggaagggttcgccgtacatttcctctataccgaggtcgaagtactccgggataccctgagctatcgggtgctggggcatgatgttccagacgatttcgcgctgatcgtcgccccaggagagctgaccggaggtgccgactatgtttctgaagggcttggacatatgcgcggagtggagacctatgaagcccatgccttcgttccagacgcggtttcttactttctcggcgagctcgtcctttacttcgtggtggcacatatgaccccaccagaggaggacgtcggtgtcgttcaggagggagtccggcagaccctgatccgggtcgtcgagggtgacggcgcggacttccatgtcgggattcttgtcgaggaattccttgatggtgccgtggatgccgttcgggtacatcgccttcgcggcggcgtcagatttttcgtggcggccttcgttccatactgttactttgatcttttcagccatgatttttttacctcttatcataatgtgttatttcatattgcggcttttcgcgttcagtgtacgctgggactccgcgtctcgccgcggtcattttaatgaccacatatattatgacacaaaaattcccaaaagtcaaccggttttctgaaaaaagaaaaaatattttgttattctgatggttgaaatttactctcatatgtggtataatatatgaagcaaggggggagcggtctgaagaagaggtacctgaagagttttaccgggcggcttataactgccgctttcttcgcggttttgcaggtcgttgtgttcatggcgggcatcgcggcgctcgggaacaggtggatcgcggtcagcgcggttttcaatgtgctcagcgtcattgtcgtcgtcgtcataataaacacgagaagaaacccggcgtataagctcgcgtgggcgctgctgatactcggaatgccgctgttcggcgggctgatgtatttcgtggcggcgctgcaatcgtcgactataagattcagaaaaaaggcggcgtcggcgaagaaaatcatacgaccgtatatgaagcagaacccggcgatacttgacgcgatgcgcgcagagagccggactaaggctaaccacgcgacttatctcgcgaataaggcggactatccggtctacgcaaatactacagccgtctatttcccgagcggcgaggatatgttcgagtggctgctgccggagtttgagcgggcgagaaaatttatcttcattgagtctttcatcattcaggaggggctcatgtgggactcgatcttcaaggtgctgatcaagaaggcgagggaaggggtcgacgtgcgcgtcatgtgggacggcgtcggctgcatggggacgctgccgaagaactacgacaaaacgctcgaggcgctcgggataaagacctgcgtgttcaacccgttcatgccgatcgcgacggtcatacagaataaccgcgaccacagaaagatcatagtcatcgacggtctgaccggtctcaccggcggcgtcaacctcgccgacgagtatataaacgcctacgaccgcttcggacactggaaggactccgcgatactgatacgaggcgacgcggtgatgagcatgaccatgactttcctcgagtcgtggtatatgtataagcccgcggatccggatcccggacggttcatatacagacctctgccgaacgatttcgcgtacccggcgggggcggagggttatgtccagccttacgcggacactccgcttgacggcgagtgcgtcggtgagcttgtgtatttcaacctcatcaacaaggcgaaggattatatctggctgaccaccccgtacctgatacccgacaacgagcttgtgacggcgctctgcttcgcggctaagagcggaatcgacgtgagaatcatcactccgcacataccggataaatggtacgtcttcgaggtgacaaggtcgttctacggcgagcttatcgacagcggggtgaaaatatatgagtacacgccgggattcatacacgggaagatctgcgtgtcggacgactcgatcgcggtcgtcggatcgataaatctcgattacaggagtctctatctgcatttcgaggacgcggcgctcatctacgactgcccggcggtcgcggacgtgaagcgggatttcatggacaccatgtcgcgttccgaggagataacgaaagagaaatacctgaagatgcggaagaggagcgggcttttaatgagcgtcctgcgggtcctcgcgccgctgttctgaaatactgaaataacggacaaaaactatggataaaaaatacaggcgtctgctgtcgaataccgcgatactggcgctcgggacgattggctcgaagctgctcgttttccttttattgccgctctacacgcggtgcctgacaaaagcggaatacggtatatccgacatcatcacgcagagcgcgaactttcttatgccgataatgtcgctcggaatcagcgacgcggtgttcaggtacacgctcgacaagacggtcgacagacgaagagtgctgacgaccggtttcttcgtcaatatcgcctgcgcggcggtgattctagcgatctatcctctgctgggttccatcgcgtatttcgacgggtatatgtggctcatcattctctataccttcgtcgcgaatattcactcgctcttcgctcagtatgtgcgggcgcgggggatgacgacgcttttcgcggtgcaggggatactcgctactactataactgtcgcgctgaatattctgtttctcgtcgtgttcaggttcggcgtcaccgggtatgtgctcagtatcgtcatcgcggacgctgccatggcgctgttcatgacagctgtagtacggcttgactatgcgatacggccgaggttttttgatcgggtgctgacgaaaaggatgctccggtactgcgtgcctctgatgccgacgacggtgttctggtgggtgacgaacgtgtccgaccggtacatgataaagggcatgataggcgacgacgtgaacgggctttacagcgcggcgttcaggataccgacaatgctgatactgctgtccggaatattcatcgaggcgtggcagttctcgatgaatattcc

SEQ ID NO: 232 - DNA, 32759 bp, Unknown
  16S sequences of unknown bacteria
cctactggtcctcaaggtctgaaaggcgacaccggcgacatcggccccactggcgcaactggtcctcaggggctcaaaggcgataccggcgacatcggccctactggcgcaaccggtcctcaggggctcaaaggcgataccggcgacatcggtcctactggcgcaactggccctcagggactcaaaggggacaccggcgacgtcggccctactggcgcaactggtcctcaggggctcaagggcgataccggcgacgtcggtcctgccggtcctactggtcctcagggactcaagggcgataccggcgacgtcggccccactggcgcaactggtcctcagggactcaaaggcgacaccggcgacgtcggccctgccggccctactggtcctcaaggtctgaaaggcgacaccggcgacatcggccccactggcgtaactggccctcaggggctcaaaggcgataccggcgacatcggtcctactggccctactggccctcaaggactcaaaggggacaccggtgacgtcggccctgccggtcccactggtcttcaggggctcaagggagacaccggtaacatagggcctaccggccctactggcgcaactggccctcaggggctcaaaggtaacactggcagcaccggacctaccggcccgacaggctccacaggacccggtccagagatttctgtaaaagaagatacacctcttacctacaaacttaattttacaagcaacggccaaacactgacgacacctaacctttacgccgcgcccacaaaatacgctctggatatgtccgcagcaaacagcacatttaacatgcctgtaggaaacctgatcgtaaattatcagaaaacaggtacgaatacaatgagaataagcgtgcgttcaaaagatacatccgttccgatcagcgcggatatcgatcgaacgacaatttatggttccggagcgtcggaagcacagtttttcgacggaatacagatttcttctctcagaacattggatgaaacagttttcttagattctcaggagctgcactggatgagaatacgacaacaggatccagtatcctcgttgtggtcattatgcgtagtgcgcatgttctcctcaaaaaatggagccagaacatctatttgggtacagtggatagaatacaacacttcttacaccgcgcccacttaaattttatacggtaaagactgaaaaacagattttgtgtctgaaagacacgttcagatccagagacattataaaataccatttgggaatggcagaaagaccgccggaattataccgtcctcctgtcattcccgttcttttccagcaattctgttatccggagcaattcgtctttaaatcgaaaatgaatcgtaatctcattattttcatgcacatagattacgtcgatgagagaaaccagcaccgaacggttcagctctgttatattctgatactgctgaatttccctgaacagagaattctcagaggtagtcctgtttcctgaacggaaaatttcctccctgatattggctatgatctctgtcagttgctccatctccgattgataatgatccctcatgcgccggtattccggctccgtgatctctcccaatttccagtcgccgtacaggctgtcgtatacgctttgaattctatgcagctgacgttccctgtctcttatcagctgtttgaactgttccgtatgattttccgcgatctgtacgtcgtttatgtcgtgaatcagatctgacagtgattccaccaatcgaatctgtgcctgtagcgctccgagcaccgcccgttccagcctgtcctgccgtatagatttgacggtgcaggcttccgaagatttgtttttcctcgttccgcatttgaaataaacatattgctttgcatgagaacggtgcatcgccttgccgcagcagccgcatcgcaaaagacctgcaaatttatgaactgtattcgaaccattcgccgtacgggtgtccctctcaaacagcgcacagagagcgtcatattcttcctgagtaaatgtagcttcatgcgtattctctactacaaaccagtcattttccggaacggcaaccttatcatgtattttataacttatgacccgttgtttcccctgtaccatatgtccgatattcatcagattaaagattacatttttcaccgtcgtaccgcaccagaggccgtcgttggcctccatgcagggattgcaatagttccatcccttaagtctcttatatttcgtcggatttggaattcccatagcgttgagccgtctcgccacgccattgaggctcatcccttcataaagcagccaatctttcatctgaaccttaatcggcgcagtatccggatcgagaaccagatgatttttatcttgcggatcctttaaaaaaccccatggcggaaaagccccgataaacttcccctttgaacgcttatcgtcgaaagtttttctcactgaacgagaagtggccgctgcaaaccggtcgttgagtactccgaacatcggtacatccaaactgtagagagcctcggaatccgcataagtatcgacaaaggaatccatcatggaaataaaacgcacattttttgccggaaaatattcctccagataatacccttggtcagaataatttcgaaacgcccgggaaagcgttttcacgacgacacaattgccctcacctctctcaatcgctccgatcatacgcataaaattttcacgcgtgtcatccgtgcccgtcagaccatcgtcttcaaaaaaaccgacgatctgatagctgcctggttcaaaataatcttcgatccatgaagtaagaatgctcttttgatttttaatgctctcacttcgcagctgcgtttcattcgccgcctgtttagaaacagcgcgggcatcctccttggaaagacggatataaacgcagatcagccacttgaacggcacttcatctatcggcggagcggatattctgtcagaggatttcatttttctgattcgcgccatgaaaagacctcctccccgctgtcaccgtactgtaaaaatcctaaaatcgacagcccctcaattccttacacatcattgttttctgctgcaaagcaggatatcagcgcctccctgagagtttttccgcctgaagaaaatccgacatttacagcaatcgttccgcatttgaaagcataaggattttttatctgccgcagatatgcctccgcgcgttgatatgccggcgtcgtctgatcgattaccacattttcaatatccgcccgctccacaagcgaaattttctcttcctgaagcatgaaaagctgctctttcgtcataggcatattctcctcaaatcagattcaatccagtttatgcccctgcagcaaaatatatatcggacggactggcctgaaacaaaaaaaggacgtgtcctttgagttaaaacaggacaccgccagaattccacatattcacagcaaaaacggtagcggataaacagatgctccggtggctcccgtcgggccggtcgctcctgcggctcccggtattccggccgctcccgtagcgcctgtgactcctgtcgcgccggtcgctcccgtagcacctgttacgccaggagttccaggaattcccgatgcacccgttgctcctgtcgcacctgtcggtcccggagggccaggaaagcccggtactccctgagggcctctcggacccatcggaccggccggaccagggcaacccggcacgccctgaattccctgaggacctcttggacccatcggaccggtcgggccggttggaccgatgattccgattgtcgtaggacagcagtctctcggaggacagcagtcgtgatccggacgctcaggcggtcggcaaccatgatccggacgatactcctgatggccgcagccattcatatcctgccggcagtcttcgacatagccgtcgtctctttctgattcgctgcagcagcgttctccttcgccatgtccatcatagcgctgctgttcgggtccataaaaaaactcgagataattcatatttttctcctctctattccgactctcctcccttcactccggcgacagctgtctgccgcctctacataatattcagaaactctgaaaggtgctatcattacagaccaagatttttgaaaagataaaagacggcagggataaagggctgagagcatatcctctcaaccctttatccctgccgtcttctgattaaattttgaaatccctgtttccggatctcacgtgattcgtctttcagcgaagacgtacctccagcccgtattctccacccacatactgaaactctgtgagttccgattcgtcaaagacccgcagcagctcagcgaaatcagcagtcagagaaagctcgccgagccgggcgcgttcgacccataccatctttccctcctccgacgatatcagatctccgcgaaaacggtcggtcttaaacaagaagacgatataccgtccgccttctatcggaaactgtttcactccgcacagcacaggatgttcgatgtccagacctgtttcttctttgatttctcttatcgcacagtctacgaaagactctcccggttccacatgcccacccggaaaagtgtatcccttccagtcgtctttcacacgatcctgcagcaaaatccgggcgccgtcataaatcatacacaaaacagtcagctcagcacgttctgttctcgacataatgcatttcctctcttttccgccaacttccctacggccgatgacgccgaggtttccggtgcagccccgttttccggcctctataaaaaaagctgatttttctttcttttctcacagtccttttttaatttcatcgccgctgcagtcagcatcattttattgttgcggcgggctttgcggggacagacagcgatacagcgcatacaggagatacatatatctgtgtccgtccgggacggatcttccctcgggatagcatttaccggacacttgaccgcgcaggtgccgcactttgtacattcctttgaggccgccggcttcatcggaactcccccgtactcccgataagggaaattccccggcacagcaagtttcttaccgctgtctgatccaagcaaagatctctggatctgctctgcaaatccttctaactccgcccggtcgtcttcatccggacgccccgcggcaaactggcgcataatcgaatgttccgcaacagccgcgatagccgctacacaacggaatcctgcgttctgaacagtatctttcagttccagaagcgtatcgtcataatcccggttaccgtagacaactacgagaatcgctctcgcgctgccgccgctcgctttcttcaacgacgacagagcgatacccggcactctgcctccaaaagacggaaccgcaattatgcagatgtcctccgaatcaaatgacatttcatccatcttcagatcccgttccgttagatcgacttcctttctttcgtccgcccatgctccgcagatgatatccgccgtctttttcgtaccgcctgtaggactgaaataaatctcatacagcatctcgttctcagcgctccttttctttccgctcctcgctcacactatctctttactggaaacgacaacaatttctgtcgaaaagtaccgtctgcatattattccaaatccgtcaatctgtcaacttttaccgcgttttttaattaaaatatgaaacggggaaaacacgccgataaagctacgggagcctctcacctctaaagaactgctctgtgaaagactttctttcccttctttatttttactcccctccgaagctctgtttccgtcaggtaaagatcggggtcttcgatcctcttcccgtcgatgctgagacccccctgcagtatcagccttctcgcttcagatctgctggaaacgagttcacaggcgatgagcagatcagccgtacggataccttcctctgtcagtatttcttcagagagcttcgtcgcaggcatattctcgtcactcccttttccggaaaaaagcgcgcgcgccgtctggcgggctttcgcggcttccgcctctccgtggacgagagatgtcagctgatatgccagaatttcttttttctcattgatccttccgtcttcccagtcttccatctcttcaatttccgaaagcggaaggaatgtcagcattcgcagacatctcatcacgtcatcatcgccgatatttctccagtactggtaaaattcaaaaggcggcgtttttttcggatccagccagacagctccgtttgccgtcttgcccatctttttgccttcgctgttcatcagcagagtaatcgtcattgcataggcattttttcctgtctttctgcggatcagatccgttcccgccagcatattgctccactggtcgtcgccgccgaactgcatgttgcagccgtaatgatcgtgcagataaagaaaatcataggactgcataatcatataattaaattcaaaaaagctcagccccttttccatccgctgtttgtaacattccgcacgcagcatgttgttgaccgaaaaacacactcctacatcccgcagcaattctacatattttaagtcgagaagccagtccgcattattgacaatgacggccttgtcctcgccgaattcgatgaaacgttccatttgtgttttaaaacaatcgcaatttcgccggatcgtcgtttcatccatcataacgcgcatatccgtccttcccgaaggatctcccacaaaaccggtccctccgcccagcagaacgatcggtttattccctgccatctgcagccgcttcattagacacaaagccataaaatggccgacatgaagcgaatccgcagtagggtcgaaaccgatgtaaaaacgagcgtttccactgttgagcaattcctttatctccggttcgtcagtaacctgcgcgatcagcccccgggcctgaagttcctcataaattcccatctttctattctcctccaatcagacaattctcccgcgttccagtcagaaacaacactctgtcagattcattcgatcagaacacagaaatgcctcccgtacagcaccggcaaacatacaccccttcgtattcaggtaagagactgcagatttcacagaatcatccaaacagaatccaccgtctgcacagaaggcaaataccggcgccatgctattcttatcaaaaagaatagcagtccggaaatctgaaaacaagacacaaaatgtcacatatgtatcatttttactttttcgctgtcattctctcgaaaatgtagcccttttcctcggaagatttccatataatttccgcggtctaacacaatacgaggcagggtttccgccctcctataaacataaaaagccgatcgtatccatccgctctgatacggcctgcatcccgaaaacgggaagacctgcgccgatggaggaagccaaagatacaaatcccggcgagagagcgctatgcactttcatttttccgctctcataaactgttaccgaggatctttttctgaggctccccgtgaatttaggaggtaacctgatgtcttataataattggaacgaatattttcaagataatgaccggccggatcataaccacacagatcattgtcacccttcatcatccggctgcggccacgaaccctgttacaccggtattcccggccctccgggaccgccgggctgtcctggacctcagggagttccaggcccggaaggaccaatgggtcctcagggtcctgccggaagagacggagcagcaggtccggctggtccgcagggtgagcagggaccggccggcagagatggaaacaccggtaccaccggcgcgacaggcgaacaggggccggccggcagagatggaagcaccggtgcgaccggtccgacaggtgcacagggaccggcaggcagggacggaaacaccggcgcgaccggtccgacgggcgcacagggaccagcaggaccggcagggcaggatggcgccgcagggccacaggggttcgctggagaaaccgggccggttggccctcagggccgggccggagctgatggagccgacggaaccgacggtgatgtcggcgccacgggagtaaccggtccgacaggttctaccggcgccgccggagcaaccggagtgactggaccgacaggggcggctggccctgcgggtataacagggaacaccggagccaccggttcaacaggcgctgcaggtcctgccggagcaactggcgctgccggcccggcaggtgaggctggtccgaggggtgttaccggcgctgcaggtcccaccggcgccgctggaccgacaggaacggccggtgttaccggcgctactggaccgaccggcgaagatgggcaaagaggagccaccggcccgacgggtgctgcaggtgctaccggcgctactggaccgacaggggcaaccggagccactggaccgaccggcgaagacggtcaaagaggagccaccggcccgacgggcgccgcaggtgctaccggagccactggaccgacaggttccaccggcccccagggccccattgcgggcactatcccattttccttttccaaccgttacgaatcgggagccgaactcgccaccgacgacacgggaaaccccactcaaatcgcctatgccggctttggcggcgatacgggatactacatgtatctcaacgcaggagaatggacttcaggaacgatcaccatccgtgaaagccagtcatatccgtcttctttcgtcatgccttacgacggcactctgcaaaatatttacggagtatttgccaaccggcagtcgctgaatctggaagccggcgtgacgctgcgtcctttcctctgtctggctaccggcagcacagactctctcgttttccagatactccaggagacaatgatctattttcctccttatgtgagcggagaagagataccaaaatactccatccgccgggcaaacctcaccgggctgaatatctcccttcccgccggaactctaatcgcgatcattatgggtattactgcggaaggttccacacaggagcaatatacgacaggctccatcagcggcggaatatttatcgaataaaacaatttacggaagcggacggaacaattacagcattgtctgccgtcctttcctcataaaaataaggaggaaaccgcatgtctatacgaaatgaagtgatccggctgatcgaacaggaaaacgttcatccgatcccagttacagaagataccgacctgtaccgagatctgcatttcgactccctctcttttgtcagcctgctgacaaaactggaagaccgataccacattaccattgaacttttcgaaatggaacagtgcctctcggtgggaacactgatcgacatgatagaaataaaatggaaggagaaacaggtatgatacgaaccgctctgtacagacaaagagaaaaccggctgccggccatattagatgaaaaagcccccgtatcttttaaggaactatcacagcgggcggctctgcaggccgtgctgcccgtccagaaaaagccggccgcagcagctctgcttctgcctgacggtcccgactttctcgccgcactcttcgcagtcctgcaggcgggatggatggcgtttccgctgaacccgcagctgacaccggaagaactgtccaatcttctgaggcgggctcccgttccgctgatctttacaacgacggaactccttccgctgtgtcagactgctgtcaagtccttcgaccagtctcccggaattttctgcacagatcagatttcgcctctttccggaacgtcgcccgcgatacgtccggtatcctcccgtgaacctatgctgctgcttgcgtcatcaggatccacaggaaaggcaaaactcgtgcagctttccgaagaaaatctggattttaatgtaatcacttatctccgccatatgggatatcagaaacatcgcgacccgtccccccgctatgctttaggaactccgcttttcgggatttacggccagctggtcgctttttcctgcgttgtcgcaggttatccgtttcttcccatggccgaccacttttcactgaattcgctctaccgcggagctcaggaactcggtctcactcattacgacggcggaactctggccgcagtgctgatggataaaacattaggccacaccatcccatacgatatctcttctctgtgctacttcggtttcggtggaagcggaattccagacggtacactggaaagactctccgctgcatttccgggaataagattctggtccggctacggtatgacggaagcttctccgctgatcgcacagcctttccaggaacttccgccggataaactcggttccgtgggagtaccgctgcccggagtcacggttcggctggatacgggaaccgaatataccgatcttccgaaccgaaccggagaaattcttgcaaaaggcccgaacgtgatgctgggttattacgacgatgaggctgcaaccagagaaattctgcgggacggctggctgcatacgggagatatcggctattttgatgaggacggctacctctatatctgcggcagaaagaaaaatatgatactcgtacgcggctttaacgtctatcctgaggaaattgaagcctgcctgctccgttgcccgctggtgaaagactgtatggtctacggcgcagaggaatcctccggaacagaaacggtctgcgcccagatcgtcccgtcttcaccttctttttccgccaaagatcttcacagctggtgcgacagccgcttagctgactataagcgtccccgccgcttcgagatagtagaacatctgaataaaacatccaccggcaaaaaccggcgggtttccccaaatacacaaatatgaaactgatctgctttcagggactcaactgttatcacgcctgtatcatcacgctggcccatcatgcaggctatccctacgaacagtctttttcccgtctgtggtcagagggaaatccgcgcttcgatccgatcggccgggtgtttctgacccgaaggatgcctcaggcgctggagtccatgggcatgtatctcgaagaacccgccgtcactttgccgggccgccggcacagctggtcggaagtatctgaaaacgcttttgcactggtgggaatggacgctttccaagtcccatggacgcccctctttggattgcagcacggcccccactacttcatcgcccagaaaaaaaacggagacgcacagttttgcatcgatccgacttacggaatcgaaaatcagacactttcatccgctcagctctatgaaaaatcctatgctatgattcctgtctacatcacggataaaccggcggggttccccgagaaccccgcctctgcagctgcacaggcacatgaagttctgcagtcccacccgaaaacactgaagttctttatttcacaggcggaaaaatggatcagggaagaccccgaaactgcactgcaccccgcaaaattcacagacgcactgctgacagggcgccgcctgtaccgccgtttcctggaaaaaaacgctgtcctggagcaggcttctctctttgaatcccgcgaatatttcgccgcttggcaagctgtaaaaaacggcttttacaaagcggctctccgcctccgggaacccgaagtcttcgaggaagcctgccgaaatttctccgcgctgctgaaacaggaaatggattttgccgcggggattctcgaaaaagacaggacgtaaccgtctcgccgttgtcgttctatcgtttccgctgttttattccagataaatccggatatcctgaggaagcgtacgcttcagaagagcgatcagtgtggttttttcttctttcatgcctccgatcagccagtcgatcaccatatccgtgccgccccgggatgcgatttctacagcgaaccgcatctcgccggtctcgatatccgccccttttgcgagaaggtatttttcataagtcccgcgggtcagatcgatatcatattgatgcaggcagttggcgtccctgctggaataggcatgccgaaggatatcggatttacattcgcaaacttcgagatagcgcagcaacgcgctgtcccagtctgcgccgaaagtaatctgttcaaatgtatcatgaaagaaacctgaaaaatactgattgacaaggtcgtatttatccataaaatgccggtaaaaagtctttcgggaaactccggcggcttttaccagttcgctgatctggatgtcgtccagatctcttccggtaagctcctcttccagagcatttaatattttccggcgcgccggagtattccttcgcgccggtgaaatattttcacgtgtttgttccgtatcattttttttcataatattattcgcctttttatcgctttccgtccgaagatgaggtgtcataacaatcagtctcctgcggtccgccgtcgaaggagtcctgtgcagcggcatccgtccgaagagaaatctctcatccgttccctcgttcactgcgccggacagaaaagatcagatgggacatgtccataccataataatgcttgacaagccgcccccgaactgtcataccgttgtatcgggccactcgctgagacgcctcgttggtatcccggataatagagaaaacctcctccgctcccagcacatcaaaagcgtattctctacaggctttcgctgcttccgaagcatagccctgattccagaaaacacgctcaaacagatatccgacttccaatacctgtctttcgccacagtcctgcatggtcagtccgcactgaccgatgatctcaccgctctctttgtgaaccgccgcccacagaccgaagccgtactgctgatatctgccgatctgccggtccagccactcctgcacttccctgtcgtcaaaagcatgctcataggcatacatcgccttttcgtcctgcagcacgcggcacagcgcgccaaaatcactctgctccatccggcgcaggatgagccgttccgtttgtaaaaccattttctgctcctccgcctcggcatagcgccgatgatactccatctctttttctccgcagaatctgtccggattctgatttcttttaccttaccatattttctcatatgacaggaccccgaagctgaattttctcgtttgaaaaagatctccgcttcgttctgcggctcctgccgcacttactttccgtccccgtcgttctctgtctgactcgcggcaggactgcactgcaccgcactgcgagccctccgaaacatcccgcggaacagcgctctcgcagccggccccgccagaaacaactgcaccggcagagccatgataaaattccggcagtaagtcataatataatccgggatcaactgctcggtaagtccataactgtagtacacgcccaggatactcgcaagagccacctgaaacacgacggtaaaaatctgcatcgtaacgatgattacgatgggacggtcttccgattttacaatacgaaaagtcagacgtcttgccgcaggaccggagataaaataagcgcacaggaaaatcaggacaaattcaagccacattcctctcagagcgactaaaaaagtggcgtttacaaaatcttctccggcgataaccgtattatataatgtcataatataaaccataatccatgcggtaaccgcagtaaaaataatcgattcgactttcgtctcaggcatgattccttcctccattctcaaaaaaagaaatgcccctccgccgtccgacatcagcagagtgacatttattgtccgtaaaaccatattgatatagaacccggcaggcatccgcggcgcccgccagactgtaattcagtgtaaccgataaaaagcagattttcaagcaaaattttgccgccggcctgcccttttattcaaaaaatcccgtcgccggcccgaagtcaagaaatacaaggccgttacttcttcctgccaatggactgtattatttttgcgaaaggaggacaactgtctcgacatgcgttgaatgacagaattgatctacctggcggattctcctgatctcataaaccgctggcttttcatcttctcccgaaggacgcggttctcccagcatatctgcttccgatgcggcggacacactgttatcctgccccgggtgatttccggtgctgcgttctcgctccgttttttccattccggattcaaacggcttccgtccggtcagatagttcagatcacgcatcagggttccgggatcgcaggaaacatagatgattttttccggagccgcttccataaccgcccgtaggagctccggcttacagccggctctcggcggatccacgatgacgatgtctgccggggaatcaccttttttcccatcgctgctctcttcctcttctgctctcagcttttcgatcagaggaacgatcttctcttccgcctttccgctgataaactgaatgtttaccagtccgttgatcactgcgtttctgttggcgtcgaccacggcgctcttcaccgattcgatgccccagacgtatttcgccttttgtgcgcagtacaggccgatcgtacccaccccgcagtaaagatcgaagaccgtctcgtttcccttcagatccgcaaattccagcacggtatcgtaaagcttttccatctgtgacggattgacctgataaaacgacagcggagatatttcaaaggaaaggcccgcggattcgtctgtaatgatgttggaaccatagaccacttccagatccgtactgatctccttcagagtgcggttggaattgtgattgattacgagactcttcagctcgtaccagttctcttccgtctccacatccgcataggaatccagtccctgttcttccgccgcctttttcagacgctcttcgatctcgtcatttaaagaatctatggcctgaaacatcaggtctgtaagaagatccgtcttcggcagctttctgccgttgacaatcagagtgaccatcacctctctgctggcatgacctgtccggacgatcatttgacgcagacggcccttccgcgtcttctcatcgtaaaccgaaagccccgtctgccggatatactcccgcagcgcgtcggcagcgcgctccgccgccggcgactgaatcggacagctcctgcactccacgatattccgctcccgtccgtcataaaaaccgacccgcggccgctctgcatttctcacacttccgtctttattcaccagcgccgcgcccgcatataccgcatactgtcccttatttcggtaatgccacggatcctccataccgatgatcggctccggcgccggagcttcgccgccgtaaattctttccagcttatcccgcagctgcttttccttcagccgcagctgcgcctcatacgtcatattctgcagcgtacagccgccgcacctgccgaaatacgggcagagaggctccgtccggtccgccgacgggcgtaccagctccgccaccttgcccctggcgatattcttcttcacctccgcgatctccacgtctgccgtatcgcccggcaccgttcccggcacaaataccaccatgctttccgcccggccgatcccttctcccgaagtgctcacatccgtaatctctatcgtatatatatttccctttaaaaccatctcattttctccgtttcacctggacctctcgttttcttctttttccctctcagccgcacagcgcgtctacttcctgtctcacatacaccggaacagagctgagacagcttcgcatgaaccgaatttgcggatgattccggctccgcaaaacagcctttatccgacattgtcccggacagccgaaagaacggcgttctgtatgtttttcatcctgctcctccacgggtacacccgtcttattcattatacacaaaaaagatctcctgctgttattcctttgcaggagacctcgtttcaccaccttatttataccgcagatttttcatccaattattcccgcaatctgcagctctgcccgcaaaaaccggtaaaatttctcagccacggagatttccttctttccgaaaaaaacaatcaggcagaccatatgcccggaaccgcctgtaaagactatttcagcagttcttgatattccgccttatttttaaaccaactctccacataagagcaggaaggtatgatttttttaccctgatttttcagatagacgacggccagttccgtcatcctgccggcgattccctgcccctgcaggcttccgtccacttctgtgtgatcgatttccacaatgccttcaccgatctcagaaaacgtctgaagcgccagcgtttttccctcttcatttcgatattcgatgcggtcctccgcgataatataatacattctgatactccttttcccatcgccccgtttgccggtcaccgtcctgcatccctctggattttttgaaatgcggacggcaagtctccgtctcttcaatctccgggctgtcctgtctctgaaagaatatccttccttctcaaaggctgcgcagccttttcgcccgctttatgatacagacttcctgactttcgttttctgtcctcattttttactttttctcaggaagcttgtcctgcagtaccggccgcttcgccgtttttcgtcactgcccgccgttcttatgcgaatcgctgggatgaacagttccgccctcctcgacaaatcgtttcatcgcccgctccagctccggaacttttttgcgcagcgccacgggtttcatcctgccgtccaccaaagcatgcttggtccatccggtgacgagcagttcctgggtatctctgttgagaatctcatagccgatggtcactgacgcgtttttcaattccaaaaccatacagcgaatttccagcatatcgtcgtaccatgccggctttctgtatttcacatgtgactccgccaacggaaaatgcagatcatatttctcgttcagctccgcgtagggaaacccaagctcccggagaaattcatttctgccgatctcgaaaaaacgcagataattcgcattgtatacaattttcatagcatcggtatcgccgaaaatgactctgtaatatgcttttgtatgattcatctccatcttattttctcccttcctctgtattccattctactccatcgaaatggatttgtcatttgactctaaaagaaaaatgtcccgaaaatcagcgcctgccttctgctttcctccatgaagaaaacagaaggcggaactgactttcggaactctcttttacagcacggcttttgcggccagcgctaaaatcatatacactccaacattttattccagataaaagccgatccatcggcaggccgtctcaatcgagctgcggatcttttatcaatcggcatattttatcttcatttcgattttatccggcagttcttccagatttgtctccgccgcgatataagggtaagtctgcgcctgagtcagcgacgctcccgcctggggatctgtaaacagaacgttgaccgtcagcgtatcgtttccgtctttatcggaactcagcgtcatactgtcgatggcgatatcgtatcccgtcgtcggtttctctccgcgcattgcaaccacatagatcttgtcatctgcgacacaggccagagcccgttccatgtcccggtattccggaattacttcgctggaaatctgctgaggaatgctttcttccgtcagcggtgtaaagtccactgtgcctccggtccccttgaatttcgctataatgacgattgcggctaccgccgccacgacgatggcgatccggagtatcatctgcttccgtccgctgccgctttccgtccccctgtttttcgtaaatgccggcttcttcatattccctttcctccttcattcataaacctacgataaatctatgcggagcgaaagataaatatgcggacaaatcatccccctgccgcggaggcagaagctaattcctgaccataaaaaaatccggcagccgcaaatgcggctttctctgccggagttcttctctgaatctaaaatttttcagcgctgttcctgcgtctctgtctgcacttctgcggtgattttacagtccttctttgattttcacatgacctgtccggatttccgcgggaaagctacagcgtttcctttaccgcttttgcgatatccgccgctgtaatatgatactcttccatcagtgcctgaggtttgccggactgaccgaagcgatcctgaatacctaccatcgccatctttaccggacatttcttcacgacaacttccgctaccgcggcgcccaggccgccgatgacagagtgctcctccgccgtgataatcgctttcgtctcggaagcggcttttacgatgatctcctcatcgatcggctttatggtatgcatatcgatgacgcgaaggctgattccttctttttccagtttctctgccgcgatcagggcttcgtttaccatgagaccgcaggcgattactgttgcgtcgcttccgtctttcacacaatttcccttgcccagctgaatatccgcagcttcatcatagagaaccgggatgttgagtctgcccaggcggacgtatgcggggccgtcttccgccgcgatctttccgaggagcttctttgcggaaacagcatctgccggatgaaccactgtcatccccggaatgactctcatcagagccagatcctcgatacactgatggctggcgccgtcttcccctacggtgattcccgcgtgagtcgcacagatttttacgtttgccttcggataagcgatggaattacggatgatctcgtaagctctgcctgcggcgaacatcgcgaaagtgctggcaaataccgtcttgccggagagggccagacccgcggccatgcccatcatattggcttccgcgatgccggcgttgaaaaaccgctccggaaattcctttttgaatcccgctgtcatagtggattttgaaagatccgcatccatcacgataatctgttgattttctcttcccagcgctaccagagcgtcgccgtatgcctgacgggttgaaatcttatctgccattaccattctcctccaagttctgttactgcctgttctgcctgctcatcgttcggcgccttgccgtgccagcccgcctcattttccataaaagacacgccttttccttttatcgtctcagcgataatcgcctggggcttgtcagaaaccgcctttgcgttttctaccgctgccgcaatctgctcaaaatcatgtccgtcgattttctgaacgtcccatccgaagctctcaaacttttctgcgatcggagccaccgtgatgacgtcttcatttcttccgtcgatctgaagtccgttgtgatccacaaaaatcgtcagatttgagagaccgtagtgcgccgccgccatagccgcctcccataccatgccttcctgaagctcgccgtcgcccaacacagagtacactctggcgccgttttcgtcgattttgtccgccagcgccattcccaccgccgcagaaattccctgtcccagagaaccggtagacatatcgacccccggaactttctttctgtcgggatgcccctgaaggatgctgcccgcctgtctgagggtgaggagtgtctctttaggaaagtatcctttctccgccagagctgcgtaaagcgcgggagccgcatgccccttggagagcacaaaccggtctcttcccgccttatgcggatcctgcggatcgatattcatctccgcaaaatacagataagtgatgatgtccgccgcggaaagagagccgccggggtgaccggagcccgcggaatgaatctgtctgatgatatcgattctgacatcctttgctttttcctgcagcatttccaaattgattgccatgtttactggttcctccttaaaataattgcagcgccgcacttcgaaaaatgcggaataatttatcttaactgtgatcgcctgcgccggtatttccgctctggcagttttcaccggagtcaaactccggcgcgtccgcacgatttttgcaaacgattccggcacagtgcagaagttcctattttcttcactgtcatctgcctctcctaaaaatcacccgcagcatgaaaaccggcagagtcagcatccgcttaaagcgggtgggctgctgaataaaccgataaagccactccagaccgtgattccggtagaactccggagctctcttcaggtttcccgcccacacgtccagactgccgcctacgccgatggcgccgcggacggaggtaaactcatctctgtgctgtgcgataaaccgctcctgtttcggcgcgcccagggccacgcagagaaaatccgcgccgctctcgttgatctgctttacgatgagagcctcttcctccggctgaaaataaccgttctgcgtaccggcaactctgagtcccggatatttcttcttcatcctgtccgccgcttcgtcggccacgcccggcttgcttccgaagaaaaagatcgattcgccggtctgcgccagacgggcgatgatactctcgagaaaatcgatacccgtcacccgctcggagagaggacatcccataaccttagaagcgtacacgaggccgataccgtcaggaatgatcagatcggcggaagcgatcagcgatctcagttcttcatccttagaagcattctgaacgatctccgaattcggcgttacgatcatactgcaccccggctgctgaaaaatctccgcaaagacagcggaggcctgttctttatctaccatatccacgggaacgccgagaatattcactctgtttttcttttgcatatgatatctccagatcattgatttctttcactactgttcattttaacaaaggccgcgtcaaatgacaacaaaaggagcgctttccggcagactctgtccgctgtcagaaaaagagctcctctctgtttttttatttttcgtgctgtttcacgtcttattcccgaaacttcaccaaaatttcagctctgccgattcagctcgtcccgtatgagcttcagcacaagttcgtcatttttacaggcaagttttcggaattcctcggatttttcctcgatacgcttggcatactcctctctgttctgcaccatatcatccaccagctccagcgctttttccgtatccagagtctccacatcccccagagacggcatatcgagagatttcagatgatacagcaccttcgggtcataaaccaggcccagagttggcacgtgcatgcgcgcggcaaagatcagtgtgtgaaggcgcatgcagagaacgaaatccgcgcatcccaccatgcccataatcttgtccgtcgcgtagcgatttgacaggatgtaagacggatgttgcatccgctgctgcacctggcggctgatctcggtatcgtagggcgtctgcatggcgataaatacgatgttgcggtcgtaccgactgtaaatttcatcgcagatacgggccattttttccttaaaatcaggaatactgtaccagcttctgagagatacgcccacaaaaggcttttctgtcggaataccttcttcttccaacagctgacgggcccggtctttcggaataccgtcaaaagtaaataccggatcggcagtgacgcacatatccgggcgatccacccccatgcggcgaagctcgtccaccgaattgatatccctcagagtgatgagatccgcccggcttaccgcccgctttactctccggcggttggcaggcttgatcaccggaccgattccattggcgtaaagcatgactttctttcccatcagctttgccagattgataatcgtcagataatacatgatagattttgtggaggtcctgtcctgaagcaggcttccccctcctgaaatcagcagatcgcaccggtgaatcgcccgcagcagtccgaaaatatgaaaacggctcaccatatcgtaatcgtaaatctgagacgcctcctccggattggcgatgagaacccgcacctgcagattctcatccatctgtgtgagattccggtgaatcgcattcagaatcgcatcgtcccccgcattatgaaaaccgtagtaaccgctcatcagaatatggtacggcttctgaacagctttgttatatatggcgatataatcgtctgccatccggctcacggaataatcgtcgagaatcacctgacggccgaattttttcagttcttccatctccggcgtatcgatccgcttcaggctttcgataatatccgccgccggatcgtcgccccattgatggcctctttctctgcagcagaaattgtcggacttggcctcttccagtttttcatgacagaaaagccccatataaccggcattccccgccaaaatcaccggcttttcacaggacattgcctccagagccgttctggatacgccgacgaagagatcgcaggaggcgacaatttcattgatatccgtacgcggacctgtcatgataaccgctctccggcccatggaatcgtttatcgacgatgcgcgttgttttagtgattcctccatagtgcctccgccggcgatgatcagctgaacacccgggatctcctgatcgatccggatcaccgaatcgatcagcttttccgccatcattacagtctcatcatccagccggctgacgtggcagatcacaggtgcgtccggattcagaccgaattctctttcgatcttttcagaactcgtatgagaggaaaacttttccgtatctatgccgttgatcgtgactttgatattctgtcccgccacgccgtagctttctctcagataccggcggatgtcgtcggagacggcgacggttttatctccccaattagtcagatacctcaagcctcctccggtctcaaagacgccgtgagcggaggtgacaaagttaaatttcagagtctttcgcaccattccggccacaaaagccgggattctcgcgtgagcgtgaacgatatccggattttcccgcttgatcagccggcgcagcaggaagaaagatcggaacatcatacccgcgtttcgggtattcatcggcacaacctcgtgacgtatgccgtagtcctcgatttccctgacataaattccgccgctggaagccacgagaatatcatagccccgcctcttcagttctttcgacaactctacgatatgggtttcggcgccgccgatgtcgagccccatggttatcataagtattttctgcttcatcatttgtctattccgatgacagttcctgtcatcttgcagtattttgtctgaactttcttttcgtgattaacgctgatttcatcggacttattggcgaaatatctgccgttcagaatctgacagtttccttcgatggtcagcactacatcatatctgtcctgtacgctgccttccgcatatgtaccgtctgttagggctttcggaagttttccgggagtcacggacacttccctgatcgtgcccagttccacgccgctttcctgattccatatcttatctccggccttcagattattcgcggtcccctcccggacagttttgatctccatctgataagtaacctcctgcagatccgaagaacctgcggcagtacgctcattcttggagaatttcacataaacgccgcagaccaagacgacggcgagaagaatgacgatcacatcgatgatattgatcacgccgaaaagacgccctctttcatccataattttcttactcatcttctgcctcccttatcacattgatcacatatccgcctccgccgtatcccggaccgaggatgctcacttccgtacctgtccgcacttcaaagcctccgccggtaaccagggaagatcccgtatcgctgcactccgctttcagagtaatcttcgccgcgtaaagccccggcacttccggatacagagtatcgccggtctgcaaattcaccgattcttttctcatcggataaaattcgcaggatacgacctctcccatctcctgcttcttcactttgtcgatgacactatcgccggcatgaatgagattctgggtatcctcagtgagatttcctatctcaatttcatacgttaccatcgccgcatccgacgcctgcccttccgagcccccgcgggttttcacatagatcagaccggcagttagcgcgatgacgatgataatgatgagaatatcgaaaaaattcagcgatattcttcttcccgatttattttccatgactgtctcccttcatcatcttttcgtagaccttttccacattggcggcaaattttccgccggtaaacttctcttcatagatctgacaggaagctttctgcatccggtgatatttctctctgtcgtccatcagcgtccggatacaccccgccagagcgccgcagtccctggccggaaagaccagcccgtttatgccgtcttcgatgagaagaggatttccgccgcagtcgctgacgacagacggcacgccggcgctcatcccttcgataatcgacagactggatgtctcgctttcataagaagcgttgacctgaacgtccatgacggacagaatttttgagatatcgctgataaaaccggcaaagaccactgtcccctcaggaaatctctccgcctcacggcgcagttcctcttcataagagccggttcccgcgatgatcagcttcaccttccgcccttcttcgagcagaaaatggagcgcttccaatatgtccccgtgtcctttgtagacttcgattcttgccatgatgccgacgacgaaatcactgtcgtcaaatccgtaagaagcccgcagttctctgcgttcctctttctccggaagccggatctgctctgaaccgttcatcatcatatcgatatatttttcggagattccgctctccacgagattttccttcgtcgcttgtcccaccgcgataatccggtccgcataacgacggttcagcagttgattcgcccagcgtcccggcccgtgtttcatatagccttttacaggaaaggcgcagtggcgggtatagacgatcttttttccgcaggctctcgccgcgattcttccggaaagagagccgtgagtgtgcacgatatccggatcgatcttccggatgagttctttcagcatcccgacagcctcccggtcaaaagaccggtccgccatagcgtcgatttcatagacttccgcggaaagctgccgcagcggctgcgtcagcatgctgcccgacggaagaatgaccgacatatcgaacttctcccgatcacggtatttggcgtaattcagcagtacccggcccgcgccgccgatattcgtatcgctgattatattgagaacctttatcatctgccctccccatctgttttttttgagttttcactcagagaaactgcctctctccggtctcttcccgtctcccgctgtacgacaaccgattccggcagactgctgcggcggataaacagcgcgctgagaccgacgaaaacccaaaacagaaacatgacccgataattataaaaagaataatccgccatgctctgaaccataaaaccgcccacgctggacagagatgaaatctgaaaaatcttgctggtccggtcggtctccttcgaaatcgccgaacagagcgcccggataaatacgatcagcaggattataaatacaagaatagcgcagacgcccgcatcgctgacaatctgcaaaaacagattgtgagaatgctgagccgtcgccgtgttataactgtaactcggataaatcatattgaaagcatctgttcccggcccgatgccgctgagccagtaatccttcagcatggaaatcgttcccatccagatagccacacggtaagaagtggatccgtcggccatatttccgatgctggcaaaccggctgataatcatatccggcgctgcgagaaaaagtacgataactcccgccaggcccagaagtatgtatctccggtcgacgagtaccagaaaaatggccgccgcaaagagcagccccagccatccggccctcgaaaaagtgagaatcatgcagacgcacatgatccccgccgcgcagagaaagagaaatctcttccaccagcttttcgccgcaaacaggcaggcggcgcacagagggatggtgagcagcagatactcggacagcacgtttggattctgcagtgtagaatagacccgggtagagatcgaaaacatctcatcgtccgtccaggcagaggagcccaccgcaccgaaaatatactgataaaatccatacagggatatgagaactcccatcgccaccatggccgtcaccagaatattcagctgtctcttcgtctgcaccgcgttttctacgaggaagacagaaaggatgaaaacggtagtgagcagtcccacatagagactgcctgaaaatgtcacagaagtacaggttgcgatcacataaatcaccgcatataaaatcacgtatcgattcaccggagagcacaaaagcgtcttcctccgctccgccgccgtattcaggagaaaagtcacccccgagatcagaacgacgccaagaagagccatcgtcggcagcaccggcgcaaaaacggcggccagaaaacaccacaagaacggatgcaccagaagactgccgccgaaaacgcggtccagtctcaacccgcggtatatggacgacagcacgccgcgcagcgccttccccggtctgtaaaagatactgcttctcgccacttcatccgcatcctttgtggtgacaaaagcccggatgatccggctgcccagccactgtccgctgaaccatctgcctatcgccgcgaaaaagcgatacagcagactgtctttaaaaatcgagatcatcacagctaacctctctttactacttttttgaaaatatctttaatgtaaacaagttcgtccatcttcagcagagccgccgccgcgaagaacacgatcacccctgcggcagtcgggaaaatcagagtcagcagtttgcccgccatacccggcagaatcccttcggaaagctccgcgcagaaatgtacgatcaccgccatgacgcatgcgccgactgccgtcttcaacatatcggcgcagaattttttcgtgataaacctgctgccggatcgctgaagcggaatcgccagagccgctgcataaaccgtggaagaaatcgcggaggccagacccagacccgccagacccatcggtccgatgagaagttcacagcagagaatattgacggcgatggagatcattcccgcgacaaggggagtccttccatcctgcttcgcatagtagactctgcacagaatattctgcagagcataacccaccataccgagagacgtaaaaaacatggcccgcgccgtgagcgccgtgtctgaggcgctgaattccccgcctccgtagataaaatcgatcagcggataagacagcgtcatcacacccagcatcatcggtatgataaaaaataaagatgtgtggatcgtggaacgcaccgtctccgtcagacccgcgatatcatcccgggcagactgctgcgacatcttcggaaagatgacattcgtcaccgacaggacgaaaacgccggcgatggtcagatagagattcgttccgtaatcgatggccgacacccctccgcccccgtgaagaccggaagcataacgggaattgatcatcagcacgataggctgcacccaagtactgacaagaacgggaaccatcagcttcagaacctttttcattccttcatttctcagactcagactcggacgataggaaaatcctttcctgcgcagagctggaatctggacgatcgcctgcatcgcccatccgatgacaaaactgaccgccagtccgtaaattccgaaacgatcgataaaaaatatgtagtataaaatgataatgacgtttgagatcacactgatcagcgccggaatattaaattcatcggatgcctgcagaatacccacaaaagaatatgcgattccggtcagacacagagtcggcagcataattctcgtaagagacgcgcacaattctgcggtttcggcattgaatttcggagcgaaaagctctaccagctgctcggagagcaacatgcccgccgccgtcatgagaagcgtcagcacaccgatgactgtgacaaaattgcctgcgaatctctgcgcttccttgatgccctttttctcccggtattccgtatagacgggaataaaactcgctgcgatcgccgacgcgaagagcacgtcgaaaaaaacccggggaattcggctggccgtactgaaagcattcgcatacatctccgtaccgtaactgaccgccagcagcctgtcccgataaagacccagaagtttaccgatcagagtgatcagcatgacaaaactgatggtcttcacttgattcttgctgttttgtgacataatcgtttctctcttatatcaaatgattatttcagagcggacgccggacgtccccacagccgacaggccacggagacgtccggttccggcgctcctgcgccttcgccgctgaaatatcgattctatccgctgaggaaaaacgtcctctgtagctatttctttaacgacacgctgagaattttgcacatttcagcccgggtcagcattccctgagggcggattttgccgccgctgccgttgacaataccggcggcggtcaacgctgcaaccgattctttcgcatattcggaaacctctcctccatcgctgaaagcattcagttcctcacctgacggctccgtgagctgtataccggcctcttcaagatagcggtccaggaaacagaaagcatcctcgcgggtcatactggccatcggccggaaattcgttccgtcgcccttggcaataccgaggctcttcgcccactttacagcctctgcatagtacgcgtcgtcctgtacgtcggcaaaaccttcgtcgtcaccgtcctctgcggcaggagaaccggcagctctgtagagcataaccataaaatccgctctcctgatatcgctctccgggctgaattttcctgcacccgtaccgctgacaattccctgttcgtacatctcagcgatatagggttcggcccagtgaccgttgatatcggaaaaaataccgttgacctcaatattgatctttttgacaacgccgccggaagcgatactcagaaccgccgatccggacgcgtcttcatcaatcgtcagcaggccggtatcggaaatcgtcccgatcggatcgccggtcagcgtatactggaaattcttctgaccgattgccacattctttccgttatatgtggctgtctgagagaactgaacggtctgaccgccgtctacattcaggctggaaaccgcttttccatccgcctttaccgcgatatcggacaactgattcgtcacatagagagacgatgttccagacactccctgagaaagggaactcagagagatcgtctccatacctgccacccatcctgctgtatacgtgtttccctgaatacttccgtatccatcggatacttccgccgtgacgtccgcaggagcggatactgtactgttccccttatcgagagcctgatagctcagatccacggatgcaccctgatatactacggtgcccgcctgatccagcgtcaatgtgtccgcaactccatcggaaaccgcctgagacaccagaagcacataagtagcgcacttgcgcagcgctccgtcggaaggggaactcagcacttccacagaagaactgcccggcagcttcgctgcgatggcagaagaaccgccgccgtcgaaattcaccgccgtcacacagccctgatcgataaattcctgcgccagctgtttcatggaaattccattggaatatcccgactgacggccgtccagttcataatagactaccgttccgtccgctttgatccccagagcgcttctcggatttttatagagcagcgcgctgtcccagtcggaagaggacgtcatcgcaccgttctttacgatcacattgcccgctcccgtaccccactgagcgttttccagcgccgcattgtcataacaggaagtctccagaagaacctcatcgccgacgctgaatttttcaaactgataatacagattcgatttgtcgtccgccgtcagaaccatatagccgctgccgatggtcatcggctcggaaccttcatagacctgaacgacttttaggcgcatcgttcctttggttttcatcgtgccttcgagaattttaaacttcacggcccagccggaagaagaggttctggtggatacggttgagaaatgctcgtccatcagatacattcccgctccgttctggcgcattttgttaaaatgggtcagagtcagatattttccggcattattcacctgggaatcttctgatgcgctttcgcccccgccctgatttgtcatcttgatctgcaccgccgtgttttccactacagacgcattcccctgagcgtcgaagagaacggaaggatacccctccggactgcatttatatacgccgttttcgatgacgatgcccagcggcacgcccgtagacatggaaaagaaatcggtattcatcgccgccagcacattatatcccagtttctgcgcgtagcttacgatactgttgatgttcatactgccgtagatcgtgtcgcaggccaggataatcggagtgacgatatctcccggcgtcgtcgtgaaagaataactctcctgaattccataggtggagttctgtgaaatagtattcgtgtaggtcgctccgccgctcagttccatctgattctgatagatggtcgtccccgcaccgccttccgccgcatatgccgggcacaacgacgataaaagcactaatacgacagctgtggctgtcgtaaatagtttcatgtgtcttaatttcattttttaccccttatctctttccgctactgaatctcgtaggatccccggaccatgacataaccgtcggtctgcatccggatgcctcttccgtcgtctctcgggatgagcatgaggtgatttgcgtaaacagtataattgtttttcatgtcgatcccacgcgtcatatcggatacaccgtcagaacccggagctaccgtcagcgcgctccccgaccggagaatcatctcggtagagccggttgcaataatcttctgccccgcttcagcgaagacgacttcataggaagcgtctcccgaaacggaaggcgttccgctgcccagagcgttcgcgatagcgctgtccacataactcttggttacgataggatcggaatcgcttccgggatccgccgtcgccgcggttacgccgaaggcgcacgccgccagcgctgtcagcgccgccgcggtgatcattaacttcttggatttcttaaaaaattcaggtgctttcataattatcccccttacgtctgcatttcctgagtttctccggccggattctccgcccggagccggtgtttttctaattcagcctgcggctcggagccgcagccgtaattccgagactgacgctgagcgcgtcgtccaccgtaccgatcacttcatgatttactgtaccgatatgttctctgagtctcttcttgtcgatcgtcctcagctgttccagcagtacgacggaatcccggtcgagtccgctgccgtccgcgtgaataggtacgtgggtcggcagtttcgccttcttcagctgcgacgtcaccgccgctacgatgatcgtcggcgaaaagcggtttcccacatcgttctgcactacgagcaccggccggacgccgccctgttccgatcctaccaccggacttagatctgcgaaataaatatctccttttctgatctgcattttgtattcctcctgatttttgtttccgacttccggcctgcggccgggacgtctctcatgtacatcagtgagtatttacagaccgcggatttttaatcgcctgcgccggaaaaatccgcaccgcttttttcgccggcatacgaccaatcagcggaaacggtttcagagacgaatctatacggctgtgagaatccttctgcatttttctgactgtctgcagactgagagcagagccttggagtgcggcgtcagattccgagaatcatcgtagcgcacaggaagtaaatcgccagagaaaacatatctgtcagcgaagatacccccggccctgccatgagagccggatcgattcccaccgcttttgcggccatcggcagaagacctccgatcgtcttcgctatgacgacgatgatgagcatcgccacacatatggtaagcgctacagaagcgctgttgccatcgataaatatgacccgaaggaaattcagaacagaaagacaggcccccacgcacagactgatgcgtatttctttccaggccactttcggaaaatccttcaaatccacttctcccgtagacagtccccgtatgatgagagttgccgactgagagccggaattgccgccggtgcccatcagcagcggcatataagataccagcgcgatgacctgcgacagcatatcctgaaatttagtgataatcgctcccgtaatcatataggagcacatgagaataaacagccagggcagtctcgtcctgacgtgcttcaggacgctcatgtccagatattcatcgtcgcccgcgccggttacgccggccatcagctgaatatcttccgtcgtctcgtcttcgatgatatcgaagatatcgtctaccgtgatcatgcccaccagccggtcttc

SEQ ID NO: 233 - DNA, 30596 bp, Unknown
  16S sequences of unknown bacteria
catattccaggattgcatttcttgggtagaatcatttgaatcaaaaaatgaaacaaaataaaagtaaaaaatagttacaaaagagaatgaattggttacaaccttttcattcttttttatattttctgcactttatacgaaatttttaaattttcactgctgatttttttacatatttaaaaatacaaaatattgtgttttaattgactttacacacaatatcctgtaaaataagaacacaaacgaaaataagaatctatatgatgatatgataaaaaccatgatttagttgaaaagagggtgcttttggtggtagaaactataaaaaaaagaaacggtgttgtcgtagcatttgacgcacaaaaaatatacaatgctatttttaaagcaaacattcgtattgcagatgaaaaattaacagagcagcagctaaatgcacttacaaaagaaattgtaagtacatttcaaacaacacaagatgttcctaccgttgaacaaatccaagacgctgttgaggagcacctgattacacacggctatgcaaaaacagcaaaagcatatattctgtatcgcgctgaacatgcaaaaatgcgtgagatggatgagaaccttatgaaaatttatgaggatcttacctttaagccaagtgaagaagcagatattaagcgtgaaaatgcaaacattgacgctgacactgcaatgggtaccatgctgaaatatggttctgaaggcgcaaaatgtttttatgatgcatatgttatcccttccgagatggcagaagcacacagacacggagatattcatattcatgataaagatttctatgcattgaccgaaacttgctgccaaattgacttaattaaactgtttaaagacggcttttccacaggtcacggttttttgcgtgaaccaaatgatatccgcagctacactgcattggcatgcattgccattcaagcaaaccaaaacgaaatgcacggcggtcaaagcgtacctaactttgattatgcaatggctttaggtgttgccaaaacattccgcaaatgctattttaaatctttggcacaagcattgcagtttcaaaaaggcttaaataaagcagaagctacccaacttgcaaaaaccattcaaaatgaaattggtacagacattactatgggcactaccgctgcgtttgaaactgcattaaaagagtatttttccaataaaccaaatcttgctgttacggaacaagaagctgaaaagatgcattcctatgcagtggaaactgctatggacgatacgaatgatgcaacttaccaagctatggaagctttaattcataatttaaataccatgaattcccgtgcaggtgcacaagtaccgttcagctctttaaattatggtaccgatacttccccagaaggccgtatggctatgaaaaatatccttctggcaacagaaaaaggattgggaagcggagaaactgctattttccctatccaaatcttcaaagtcaaagaaggcgttagctataataaagaagacccgaactatgacttattccagctatccattcgtgtttccgcaaaacgtcttttccctaactttagctttattgatgctccgtttaatctacaatattataaagagggacatcctgagactgaaattgcatatatgggctgccgtaccagagtaattggcaatgtatatgacccttccagagaaattgtaaacggcaggggtaaccttagctttacatctattaatttaccccgtctgggtatcaaagcaaaaggtgacattcacaaattctatcaaatgctggatgaaaaaattgacctggtcattgatcaattgcttcacagatttaaaattcaatctaccaaaaaagtatataactatccattcttaatgggacaaggtgtttggattgattctgaaaaattggatgcacaggacagcattgcagaaattttgaaacacggcactttaagtgttggatttattggactggctgaaacattaaaagcattaacaggaaaacatcacggcgaaagtgctgaaagtcaaaaactgggcctagagattgtaacccatatgagaaaacgtatggacgacaaatctgccgaaacaggtcttaacttttctttacttgctactcctgctgaaggtttaagcggacgtttcattaaaattgataaaaaacgttatggtattattccgggcgtcacagaccgcgattattatacaaacagttttcatgttcctgtatattatccaatcaaagctcatgaaaaaattgcattggaagctccttatcatgctttgaccaacgctggtcatatcagctatgtagaacttgacggcgatacctgtaaaaacttagaggcttttgaatcagttattcgctgtatgaaagaagcaggcattggttatggttccattaaccatcctgtagaccgtgacccatgctgcggctataacggcattattgacaatgaatgtcctaaatgtcaccgtaccgaagaagaaggtcctaagtttgaacgtatccgcagaattacaggatacctggttggtactacagaccgttggaacaatgcgaaacgtgcagaagaaaaagaccgtgtaaaacatggacgataaacaataaaaacaacaaaaaaggttcagatatctgttcagatatcctgaacctttcttactcctttcaaaatgggaaagaaaagaggaattgttatggaagataccctccgaatcagcggaattatcgatgaatctattgtagatggtaaaggcctgaggtataccatttttacacaaggctgtccccatcactgtgaagggtgccacaatcctgatacccacgactttgaaggaggtacggagaaagagattactgctatttatgaagaaatttgcagcaaccctttactaagcggcgttaccttcagcggtggagaacctttttgtcaacctgcccctttagcagtactggctgaaatggtacataaaaaaggcttaaatgtaactacttatacagggtacactttagagcagttattggaaatgaaaaatcccgatgtccaacgtttactcacccaaacagatattttaattgacggcaaatttgacattgctcaaaaagatttatctctatctttccgtgggagcagaaatcaaagaatcattgatgtaaaacaatcattggagcagggaacgatagttttagcaaaaggatattgattttcctggcatcacttatcagtataaacaaaaaatgaaaaggacagcacaagatgtgctgtccttttttatttccatggaaatatctcaagctattttatattggcatactttctatcaaagtttcaaacgaagatgttccaatcatacctcttacgatatctcccgtaacaaccagtatattaccatctgtttcataaaaagatatggtatcaatacggtcagtatcaaaatgtttaatcgttatttttaatacaggctccccttttgctgttaaattggttgcttgttctaacgctgtattttgaattgatgataaaaacgactcatattcctgagcatccatttgagcaccattcaaaactggatgatactgataatatgttttattctctgtcgatttatattcatcttcctcacgctctaacgatatattagaagtttgacctttatagtctatttcaaaagaagaaaaatctgtttcatctgttgcgtatattgtaggatttgtcagtgaaaataatgttgcatctgtaaagactgaaatcttatcactgtttatcttataaataatatcagaatccgcttttttcacataatacatattatcatcatctgttttatttccaatcaacaactgataagattgttcatttactacaaaagaaatataagaagccggctcctttaaaccatattgctccagctgttcctgattggcagaagcagcaaccacttcatctgcatttaaagattccaagctgctcttaatattgtccaaagtggtatcatttggtttgatggtttcataatcaggcaagcgatatgtttttccgcttactttttcataaacgaatgcttgcgtcaaattaggattcataacggtaatcctactaaaaccattttcggcggcgttataatcgtttttattcacatactcatattgagatattgaaaaaatagttttatttaacaaattatctgttgtacccagcatatcagattctatcatgataacataaacattggatgaatcttttgcacacatataatatttattgttttttccatttacggcatttcctatataataatcatatacttcgccgtcttcatacgtaacggaaacagttgcagccggcttatccaaaccatattctgaaagattttcaacattgccaatattacttgttgaaacaggattacaaccatacttcacaatattttgtatggaatagacatctaactgattgatatccataccttcaattgtatagtaagtatctgcatccccatgcatatcgccaaacggaacgatggtatatgttccatattgattggtaattgtcatggattgtacatgctcaatgctgggagaaaccaacgtcgctttttcatctgtatcaacagaagaggaagattccgctttttgctcattggacctggttaaaaagaaagcaagcaataccgcactgactgcaataacgatagcaatcataatagtaacagttctcgttaatttatccactgcaaactccctttccttttattgccatagtgtacaaaaaaatatgtatttgattatttatattatatcatgcagtatgatgttagtaaagaaaagctcctgaaggaaccatgtccagattgtaaatattgtttgaacaaaaaactgcattgtaagataatacaatgcagttttctttcttattctattttagtcgtctacacccaaacgatactctaacgaatcctttgccatatctaaacgatgatccaactgatccagcgtacggtctagctggtaatattggtcgtaagttaaagtacctgttctcaaagccatttcaatttgattttcaaattgttccagttcaaactccacttgttctatttgcatttttacttgtccgtacaaatttacattttcgctataagtagattttggctgagtagagtctgccaattgtgcaacagactctactttgttggacaattcggtagtatcaaaattggtatttgtttgctgcgaattgttattttgtgcaggtgcagaagaagttgcagcatttgtggcatcattttgggaagatgtatttgaagaagcagttgtgctattactacttgaagcattttgtgaatttaattgttgctccaattgagaaattttatcttcaagaacctgggtatctcctgatgaacagccggtagaaattgctacgatgccaattgcaacgattaataaaaataaagtccttttcataaatctactatcctttcctaaaaaataaatacctaactatagtaattaggtataattattttaattatatcattccataaactaaagtaaatagaaagattcaataaaaatgtaatttaaattttatagattcattatagaattgcctatttgtttgaaattatgtatattctttatttttattatatgaaaaaaagatagaatgtttccaaaaagacaaaaagtgtaactaatggtccggataaaaggtaattgcaacatacttccaaaactcttttgccaaagccaatgaggaatgataaatttcacttccgctgtagtgccaaatatcaaacccctctaatctttttatttctcggtcacgcatattattattttctaccttctgaggtgtattataatgaatatgaaaaccatcacactctattcctatttgtacttttcccgtttttctgtcacaaagagcaaaatcaatgtaatatttattattacacactgttttttgcggcataatatagcttaaattccaaatgtgctgcggcattgtactgcataatgaaatgtaaaataaatgttctatcggactatgctcaaacatatgcgccataggtatggttggcaatctaaaaccggaatatgcattcaccatttcaaataccaacgcttttttacttgttctgtcatccatttgctctttttgataaaaaaatttgatatactctaacatgcaaatgatatgctcgcttgcataatatgtcttttcactgctaatttgatgatactggcagatacgcaaaaattgccttttgaaatctttctgtaattctgttatacttgaaataaaaatatggtggttcatataaagaacattctacctttctttcataattcgcataaaattgataagattcgacataattcctttattttccattatatacaatttattgtaaaatagcaagtaaaaaaataactcaaagcagttatcctgttttcattcatttttagataggagaattgatgtggcaaatgataaaataatttgtaaatgctataaagtgacagaaaaagatatcaaaaaagcaataaaaaagggagcagaatcggcaaaagacatccgcaaagaaacaaaagcagatactgcttgccggcactgcaccaaaaaatttgaaaagacagtgaaagatttactgaaataatgtataaaaaagaaaagcgcaggtatatatacctgcgctttctcttttttcgattaaacttttttatgatttacaagcatagctgcttttaataccgcaacctgtgtttttccgtcaggaatttcgttgtttaataccatttcaactgctttttctatggggattaaaattggttcaataaattcatcttcgtcgggatggcttgctccaatagaggcgactttacaaaaatataggtgaagtacttcatcacaaaatcctgcacttggatagaatgttcccaaagaaatataatcttttccaacagctcctgtttcttcctgcaattctctcttggcagcctcaaggggctggttttcgccgggatccagttttcctgcaggtaattccagcagaacagtttcataaggataacggaattgacgcacaaacagcagttcattgtcatcggttaatgcagcaatggtaacacctcccggatgttccacgacttctctttttgcagtatttccatttggcaattcaacttcatcaacacgcatttttaaaatcttaccttgatattgatactctttttttaacgttttctctgttaaattcataaaaatccttctttctatggaaaaacacttgcaatataggggcacttgtttctatattcgcataatttatagtaaggtttcttattattctatagtatcctaggtcatatagcaagggggaattttgttgtatcagtggaatcaacaacccagtgattacggtaacatatgtaaaattgcagatgaaattacatcttcttatccttattttcaaaaatgtatttacggaaaaagtctttgcggacgtgacttaattgccttggaatcaacatgcaaaggcgaacttggcagacagcctgttctttttgccgctgctttccacgggatggaatggattacaacatctattttgatttgttttaccgagcgattatgcaaagctgcccaacaaggaaaaacattatgcggcaaagacgctgcggccgcattgcagcgcagccgattgattgtcgttccatgtgtgaatcctgatggtgtagaaattcaaatacatggtgcagaatcagcaggtgagtatacaaatttggtaaaagaagtgagcaaaggagacaccaagcattggcagtcaaatgcgcgcggtgtggatatcaaccataattttaatgcctattggcataaactgagacaaatggaaatagaagatggtattacagggcctgcaatgacaagatatggaggaacctatcctgaaagcgaaccggaaagtaaatatttggcagatttgactcgtaaatgtgaatttgggtatacattagccttccacagccaaggggaagaaatttattatggatttgatgattatcttcctcccaatgcagaacacatggcaaaaagacttgccgcatcaagcggatacttactgtcaaaaccggaaggattggcttcgttcggaggatataaagattggtttatttgtcgatttaggaagccgggatttaccattgaagtaggtaaagggataaatcctttgcctatttcccaatttgatgaaatttatcaaacattagaacctatgttaatggaagccttatttttatagaaaatcatgacattgttttttcatcttatttatagtatgatgaaagcaatctgaaaagaaaggatgtttcgatatgaatgcgtctaaaaaattggcggctcttgtaggtgtaattttgctgtcaggcatgatttttaccggctgttccggcaatggacaggaaagctctcaaacttcttcagcctctgtttcttctgaaacagaaacttcatctgtccattctcaatctgatttcaattcagcagctgaggcagaatcaaatgcacaatctgctgcagtatcgccaaacagcagtacgtcatcccaaaataatacggactttgatgaatacttctctcaaaatccgattacggcagctcataatgaggaatccggttctgtttatacaaccaacgatatgcttcaggtagaagaaaaattttccggtatttgggcaaaagaagttgaccatgcctatgagctttgccagcaaaatttaccgagtgatgtattatcatctgtgaaagcagaccatgaaacatggctttctacacaacatgcagatcttgctgatattcgtgcagacggtcagcaagccggcggtactttaggctctgttcaaattgcgaccgattctgcagcttactatgaaaaagaagcaaagaaattgtatcaagtgctatacgaaaataatatatcatatcaatatcaatttgaagaatgaaacaaaggctgtgttataataacacagccttttgttgtataaacaatatcaactatgacaatcctattaaataagattcttataaaaggacgggattgatatggatattcgaggaacaaaaacacaagaaaatcttctcagagcatttaatgtagaatcagaggcaaaaaataagtatgaaatctatgctgcaaaagcaaaacaagacggctatgagcagattgccgctctttttttggagacagccagaaatgaatatgctcattctaaactatggtttaaattattaagaaacggttatcctgacacagccgacaatttaagagccgctgccaacggcgaacattatgaatggacagaaatgtatgaatcttttgcaaaacaagcaagggaagaaggatttgaacccattgccaaaatgtttgaaggtgttatgaaaatagaaaaatctcatgaagaacgatatcgaacattattaaaaaacattgaaacagaatctgtatttcaaaaaggaacagaaacggtttggatttgccgtaactgcggatatattcacactgcacaagaggcgcctgaagtttgtcccgtatgtgcccatgcacaagcatttttcgaagttcgagctgaaaattattgataaaaagccgctgatcagcggctttttattatggcataaagatatatgataatacataaaacagatatattgactaaattttaaatataatacgacgaaatattatttttgttgagataaataatcaagcaaaggtgtcagatatgtttcatctgtccaatcacactttttccctattgcctctatgagggcaacttcccatggttcgcatgcagaagggtcttttctagacacagctttttgcagcattttacaaaggcttctgtctttaaaagacattatactttcattccaagcacctctgcaataaaagcaaggtatatttttcagtttccctttcaagttatgctgatgtatttgttccactgcttttttatcataaggtgaagcaccgacacagaatacaatcaattgttttccccgtaatgcctccatatgtttttttaaaaaagacaatcctgaaatcccggaagcataaattgctccacccagcactatcacatcgtattgctgtatttgtttcatatctgccttatctacggcaatacagtcaaatcctgttttatcagataaccaatttgcatatttttgagtagcaccatatttcgattgatataatataattccttgcttcaatatcaataccttctttcttctttgagaacgatacaaaagtatgataccacagtaatgttaaaacaagatttattttttatgttgtttccaccttaataaaaaagccgaatttataatgactactaccgacccggcattgtgtaccaatgctcctaccaccggatttaatactcctgtaattgccaataaaatcgccagaaaattaagactcaaagaaaaaattaagttacacttaatggtcatcatcattctttttgacaatgaaattaagtgtggcaattctttaatgtcatcatctacaagaacaatatctgcggcatctactgcaatatcacttccaatatctcccattgcaattccaacgtttgcttttttgagtgcaggtgcatcgtttacgccatctccaatcatacagactgcctctttatgattttgatattcttcaatccagtttaatttatgttccggcaaacaatcggcatgtacttctttgatatgaagctgtcctgcaatgtgagttgcggcatcttgatgatctcccgttaacagtacaggctgtacctttaattttgtcagctcttctatcatttttttgctttctgttcgaatggtatctgaaagtattatgtatcctgctaatatgcgttgaattacaacataaataacggtacaacctttcataagatattgttttgtttcttgtgttacagaatcattccatttgattccatattcctctaacaattttatatttccggcaagtatttgttttccatctacaaagcaagaaactccttgtccgggaatcatattgaattgttctgcttccatgagtgaaagattcccattctcttgaaaacagcttacgattgcttttcccaatggatgttcagataattgttcagctgaggcacacaaagtatatatatcctcttttgaataatcaggatatatacttttcactgcaataacctttggtgtaccataggtaagtgttcctgttttatcaaatgcaatcttggacaccgttgataatcgttccaaagcatctccctgacgaaccaaaaaaccatgtttggtacaattaccaatcgcagccataattgcagtaggagtagccaataccaatgcacatgggcaaaatacaaccaaaatagtaactgctcgaataatttctcccgtaattgcccaggttaatcctgcggctgacaatgcaattacaacaatccacgtagcccatttatctgccattccgactatttttgctttccctgcatccgccgactgcaccaaacgtatcattctttgaatagaactgtcttcccctacttttgttgccttcatttcaaatgcaccaaattggtttacggttccgctggatatttcatctcccacttctttatctacaggaagagattctcctgtcataaccgcttgattaattgaagtctttcccaatgtgataattccatccacaggtattgtttctcccgggagtacccttaatgtcattccaacctgaactttttcagcgggaatcatctgttctgttccattagaaatgattcttgctgtttgcggtgtaagatgaaccaatttttcaatgcctgctcttgcttttgccactgttaaatcttctaaaagcgcaccaagttgcataataaatgcaatttcacctgcagcaaaatcttctctgatacaaactgatgctattaatgcaattgatactaaaacgtctgctttgatatcaaatgctgtaataagtccaataattgcttccaatacaataggaacaccacataaaataatagcaacccatgcaatatcaaatggcagtggtactacatgaaaaatgctgagaagtaatgagattcctgaaatgaccaacagcacaatatcttttttcatgccgcccaattctaaaaattgttctactttttctgttatttttctcataactgcctcccatacctatacccttataggtatataatacatataggggtataggttgtcaagcgataaaaaaagaaatcagttccttttgaaactgatttttgatttaaaattaatatctatgaataactccagacaacaaaccaaatctactacaaagtcaactgaatgataccgtttcttttattttctcagactttcaaaagattttagaaggtttttattttaataaagaacgatttttctcttatcttgagccatactctacttttttcatctctttccctctgtctactgagatactctctttatcctttttaagatgctcagaaatattcggaactgttaggacatatttgagaaacgttctaccgcttttgtaaaactttctattgttttttctgcatctccatgctcaattccatcacgaacacagtgatgaatatgaccctccaaaacaatttgtccaactttatgtaatgctgattttgcagcattaatttgagacaaaatatcttcacatggcacatcttcatctatcattctgtcaattgcctgaacttgtccgataattttttttaatctgcgatgtaaattatctgaatccatacattgtttcatatgttacctcccaataccgcaaggggtatatgtttattatacggaggtacttcctcctttgtcaatgtcaaatcaaaaaaaggtatcatcctgtatagatgataccttttgattaagattcttccgatgattcttgttgatttacagtttcttcattaccctcattttcgtcaggtacttcatcttgaccgtcatcttctatttctatatctttgctggtttcttcttcatcgtgcggcgctcttgcaatggtaacaaccttactttccacaccgtctacacgcatcacacgtacacccttgcttggacgagaacactcacgaatagaactggcctcaatacggatgataataccgtcagaagatatcataataatgtcttcatccagatttactgcttttacggaagcaacatctccatacttatctacatggtagttgattagacctttaccacctctggtctgtgtacgataatcgcttgcaggagacaatctgccataacctgtttcagatactgtcaataccaaaccgccttcatgcagaacacacatacctgcgaccaaatcatcttcttttaacgtcaatgccttcacaccacgggcagttcttcccattgcgcgtacatctgtttctttaaagcgaatagacataccttttttggtagcaaccaataattcttgatttccgtctgttacatttacccaagcaagttcatcaccttcatcaaggtcaatggcaattacaccgccttttcgtgcagtattatatgccaacaagccggtacgtttgataataccatggcgggttaccataacaagatagctttcctcatcaaattcaggaacacgaataatagaagtaacacgttcatctgatgcaattggaagtaaattagcaatattcatacctttgcttgtacgggaaccttccggaacctcataacattttaagcggtatactcttcccaaattagtgaagaacattacataatcatggctgttaattacaaacatttctgtcggcacatcttcatcacgggttgtcatacctgttacccctctgccaccacgattttgtgttttataggtatccatcttctgacgttttacataaccaaaattggtcattgtaaagatacattcttctcttggaatcaaatcttcaatatctacttcaccgctgacagcagcaatttctgtacggcgttcatcattgaattttgctcttacagccattgcttcttcttttaccagttcctgtaagcgtgattcattttccaaaatctctctgaaatctgcaatttttatgcccaaagcagccaattcatcctcgattttttgacgttccaaaccggttaactgtcccaaacgcatttgaacaattgcatttgcttgtacatcatctaacccaaagcgttccatcaaggttgctttaccttccggaatggattttgcactgcgcaaaattgcaattacttcatcaataaaatcaagcgcaacacgcaaaccttccaagatatgtgcacgttcttctgcttttcttaaatcaaagcgagtacgtcttgttacaacatctttttggaatttaatatattcactgagcatttctgccaatgtaagtgtttttggttctccatttacaatggcaagcataattacgccaaatgttgtctgcatttgtgtgaaagaatataactgattcaaaacaatttgcggagaagcgtcacgtttgatgtcaattaccatatgcataccatttctgtcagaatggtcttccacattggaaattccttcaattctcttctcttttaccaactctgcaatgttttcaatcagtcttgctttatttacctgatacggtaactctgttacgataattttaaagcgaccatttttttcttctacaatttccgcacgtgcacgaacaacgatttttcctcttcctgttgcataagcggaacgaataccgctgcgtcccataataataccgcctgttggaaagtcaggacctttaatatgctccattaaaccttccaaaggaatttccggattatcaatcatagcgcacattccgtctatgacttctcccatattatgaggaggaatattggttgccataccaacagcaataccggtagaaccatttaccagcaagtttggaaagcgggatggcaaaacgtctggttcctgcaaacggtcgtcatagttggaacggaaatctactgtttctttttcaatatccgctaccatttccatggaagttttgctcattctcgcttctgtataacgataagcagcaggcgggtctccgtcaacagaaccgaagtttccgtgtccgtccacaagcatatagcgcatagaaaagtcttgtgccaaacgtaccaatgcatcataaacagaagcatcaccatgcggatgatatctgcccaatacagaaccaactgtatcagcacatttacggtaagccctgtcaggatacaaattattttcaaacatggtatataaaattcttctgtgaaccggttttagtccatctcgaacatccggcaatgcgcgggaaacaataactgacatggaatagtccaaaaaggactttttcatttcacgttcaatgtcaacgtttataattttttcttgcgcttgtagttcttgattttcttccatttatcggacaccttctcgcttaaatttttcttttagctgtgtttctaaacaatggtttataaaaatacaatcttccggagtaattgcacgttttggtagatattttacttggtcaattcctatttttataatgtaaattttattcgtttctatcgcttcataaagcatatgatacggtatggaagctttatagttttctaagtcaaactgcatctctgtttcataaaaaaacagtagttctgaccgacacttttccttatttacataggcttttatctgctttctcatcaaatagggatgcagtgtatcataatataaaccaactgccaaacctgcaaaaacaattaacagataaatgattctttgaaaaacagaagttgtaagaaagatagcccctatcagaccgaatattaccgtggcaagtccaattaaacgacaacaccatcgttctactttattatcttgatctttcattgcagcaattgcaaactgatacaaatcatcttttgtcacaagataattcgctgtaacttgcttttgctccatataagtctatcctttcttttttccacaacttttaaaaaaattgtggaaaagttattttgcttttttatgtttaaatatcaataccttttctaaaaaagaagataacttattctgttgttcatctgaaagattctttttctcaattaaaacaagaggacgttgctgaccgcctaaaataataaacatactttttgtttccaaactacggtctacttctgtccaatactctctaatcatttctttttcattttgtatttcaaaacagcttttaaaaaaggcaactgaaaaaggtagagacatcatctggttggaatcaaaaatttttgcaccgcgtccttttataatacccggccaaacgaccataaaaaagagagccagaagaagaaaaaaactaatggcaattaccggcacaacaatgccggaaaaaaatgtatgataaagcggcagcacagatgctgataaaactgccaaagatacgcagattcctgcctttacaataggtaaataaattggagaaatggtactgtgggcaataaaataagcatctgcaaacgaatttcgctctatggataaattgtcaaactttaattcgggaatgttgtcttctgctctcaaaatgaactccccctcttatgcagcctgtatggtaccggataaaataatggcttccacgtctggtaaaacagagggttcaatgcagcgcattggcaaaatagtaatatgagtcgggtctgtttgcaatacaaacaaatgattggttttacgacattttaccgtaccatccaatggaattacccacttttgctctgcttttcccatctcaattaaggaaggataaatttccatttgtacttcttccccactggtcaatctttttgcatttttcttgatattataccaagctgccggccatataacagccgccaatataagacacaatattgcaaaaatcaaggttaaccaattcatctgaattgcaaacatagcaaaaaagacacctgacataatgcatgaaataatactttcggcaatcaatcttttttgagcacttctatagctttttgaagaacgcagcgcatcataaatttcatcttcttttaaaacataacttaatttgatacccgcaaaattatcttcaaattcttctgcatcttcatcaggaaccagttccgcttccgaaccgtcccattctatttctatttctccatcttccaattcttcttccacttctttgatatctgcttcttcctgcaaatattcttcctcatcctgtatacttcgaggaggagtgtcgcctttattcattacctactaccatacctttctatcaaaattatacgtctaagttttgtacatactttgcattacgttcaataaattctcttcttggttctactttgtcacccattaaaattgtgaaaatttcatctgccattgcggcatcttccatttctacacgcagcatgatacgagtttcgggattcatagtagtttcccataattgctctgagtccatttcaccaagacctttataacgctgaatatctaaattaccgccaagttcctgcataattttgtctctttcttggtcggaataagcataataatgtgtttttccttttgttaaacgatataaaggaggctgagcaatataaatatttccattctcgattaacggacgcataaaacggaagaaaaatgtaagcaacaaagtacgaatgtgagaaccgtcaacgtcagcatcggccataataattacttttccgtaacgaagtttttccaaatcaaattcttcaccaatgccgcagcccaatgcagttacaaccggcattaatttttcgtttccgtatactttatcaagccttgctttttcaacgttcagcattttaccccaaagcggtaaaattgcttgaatttttcggtctcttccaccttttgcggaacctcccgcagaatcaccctctacaatataaagttcagattcttccggattttttgattggcaatctgccaattttcccggaagcgctgcggattccaaagcagatttacgtcgaaccatatcttttgcttttcttgcagcttctctggcacgggaagctgccaaagctttatcaaaaatagcacgggcagttgcgggattttcttccaaataagttgacagtttgtcgttcatcatattgctgacaagcccgctgatttccgtattgcccaattttgcttttgtttgtccctcaaactgtgcgtcttttactttaatactaataacaacagtcaaaccttccctaacatcgtctccggtcagatttttgtcgctgtctttcaataaattatattttctggcgtaatcattcataacacgggtcaaactgcgtttaaaaccttcttcatgcgtaccgccgtctgtggtatgaatattatttgcaaaggacaaaatcagttcattataactgtcgttgtactgcattgcaacttcagctgttgcctggtcatcatctgccactgtagaaaaatgaataatatccggatgtaccaattccactgctttctttttatttaagtactctacaaagctgctgattccgccttcataacaaaaattttcacatatgatattatccggatctctttcatcgctgatttgaatatgaataccggcatttaaaaatgcttgttcgcgcaaacgggtttttaatatttcaaaatcaaattccgttgtttctttaaaaatttcagcatcaggtttaaaacgtaccaatgtacctgttttatctgtttttcctacgatttctaaatttgtcttaatattgccgcgttcgaatctttgggtataaatatcgccgtctttataaatttcaatttccagccattctgaaagcgcatttactacagaagcgcctacaccatgcaaaccaccggaaactttatagccgccgccgccaaatttaccaccggcatgcaatactgtatatacaacagttgctgccggaattcccattttcggatgctttccaacaggaataccacggccgttatcaatgacgcaaatgatgttgtcaggcaatatttttacttcaattttatcgcaaaatcctgctaaggcttcatcaatgccattatctacaatctcataaacaagatgatgcagaccgcggggacctgtggaacctatgtacataccaggtcttttacgtaccgcttctaatccttctaaaacttgtatttgatccgcttcataattttcagcaggctgattcatttcggtaaactccaagtttaaccctccatttttatacaaaatgtatttttattttttaaatcttgttgttttggtggaatatttcacattttccggttttacatatcgtatgacaagcggaagcataacaataatagcaataataccaactaacataacccctgccatatataaaaagttgatatcaggtttaaagatatacaaacagacattcaccaaaagtacaataattacaactgcggcaattaaaatactaaacggtgtttccaatgtcactttaaaattctgcttacattttggacattgaacatcttcttgtcctttacttttcataacttctttatagctaaaatgctgaccgcaatatggacaaaccggcagtgctaatggagcttgtttcataaataaatttctcctttcggtaaaacaaaatcataaaattaaatgacacgtgtattctgcatatcatcttgaacaggtttctttttgcgttttgcaccgggaggagcaattcgtttgaaacgaaccaaaaagacagatgcgcaaaaaaagactaaaaatggaataaagattaatatgattgaccaaatatgcatatcaactaaaaaagtaaaaatcaaaactaatatcagactgattgcaacagctgtaattgccatcggtacaattactttatctataactactgcggacctgtttccacactccggacaaaaataatctcctttatttttcagcatccaagtacggaataatcctactttttttccgcaataaggacaggaagattgataaaatctgccttttttctgcggaacgtgcgttctatgattattttgagcataactatgatgtaaattttcattggaaacatgttgtttattcaattccggttgagactgtgaagcagaaggctgatgtttttcttgacttttttgttttcgtttcatttttgactttgctttttctgccattggttctttctgctcattttcttttaccagagaattaaataaatcttgataatctactttttcgttttgattttcgcgattttgattttcagtactcattccatccgtcctttctctgtcttaatcatacagtttatacatttgaaatatcatttatatactttgttcttttcagcaaagtggaagaagatatttgagaaatataaacgatggtattttctttatgatctttgcacaatataaaagtttttggcatttccattgaaacattgattacttttcctgatttttcagcttttgccaaaaattctcttgtaatttttgaaatggtagatgtctcaaggtcaaaaattccaacaacttcactcatttttacaacggtatcttgtcccaaatgtaaatacataaagctgcctccttttgacctttttaggattttaatatcatttgttctatcagttcgccttgatgaaatttaaataaagcgccttgttttaattgatgaatggtatttggatcacagcaggtgataaaaacctgctggtcttttaaatgattgagaatataatcctgtctgttttcatccagttcactcataacatcatctaaaaacataacaggtttatctcctgtaatagactccattactttagattcggccagttttaatgcaagcgctacagagcgctgctgaccttgcgaaccgaaagaccttgcggaaatttcattaatataaaaagaaatatcatctctgtgtggtcccactgttgtatatccaaccataaaatctgactttcgagatgattttaatttctcaaaaaaacaggtttctatttctgtttgaccctcttttaaaaaagaagaatcatactttaatgaaaaatgttctttttgagaagaaattccatgataaatttcttctacaatcggctgtaaacgttctaaataagaaaaacgttcttttataatagaaacaccaaactttacaagcttttcatcccaaatttcaagtgtatcttttaattcaggatgttttgtaatttcttttaataacatatttctttgagataaagttctattataatgcatcaacaattttgcataggccggcttactttgacataaacttccgtcaataaaatttctgcgattggaaggaccttcttttacaagtgataaatgctgaggagaaaatacaacagcgcaaaattttcccaccaaagaagaagccgattttttcggtatatcatttattgtaacacttcttctcccgttcgtcatgttgatttttgcgtcttgttctctttcttcgctaaaaaatttcatattcatttcaaaagtggtcttgccaaacgcaattaattcactgtcttttgctcctctaaaggaatgtcctccggtgaaaatccacattgcttccaataaatttgtttttccctgtgcattttgtccgtagataacattaatttgaggaatgggctttaatataacatgagaaagatttcgataatcagaaatttctatttcttttataatcaagacgaacaaacctcataaagtacatgttcatattctgcaacatcgcccggtctcatttttttgcctcgcatagtacaaacttccccgtttacttttacaagcccgtcttgaattactaattttgcttgtcctccggtactgagagcgcctccgaattttaagagagcatccaatcgaataaattcggtatcaatttttatttttacgttttccatttcgtaagtcgcctttcttttcagccaattccatttctctttttcatatcgtgatttattctgactttaaacgaacaggtaatacaaggaataagaaagaatttccttcttttggacgtacaatcataggacttgtttgaccgctgaataaaattctaatttcatcaccttccgcatttctcagtgcgtccaataaaaagcggctgttaaaaccaatttccaatggatcaccttccatttttacttcaaattggtcatttgcacgtccgattggtgtggaacaagaaagtttaatttcatcttcttcaatcacacagcgaatcggactttttaatctgtccataatcaaaagagaaacacgttcgatactgtcgatgatagtacgcgtttgaacgactacttctgtatcatgattttttggaattgcggaatgataatctaaaaactggccttccaataagcgggaggtaataaaataaccgttaatttggaacataatatgacgtctgccaatatgaatattgacttttgtatcgtcatcattcaataattttaaaatttcagaaagcgtttttcccggtacaacaaaactgatttccaaatcattttgaatggattcttctcgataagccaaacgataaccgtcaacagataccaagttgatttgatttttctttaattcaaataaagtacctgtatgaatcggtctggaatcgttatctgctaccgcataaatggtttgtttaatcatgcttttcagcagactatgtgtaatttcaatagagtcgtcttccggaattgcaggtaattcaggatattcttcagcaggaatccctaccaaagaaaattcacttggtccgctttgaatcactgtaatattggattcatctgttgttaaatgaacatcgtctgcaggtaaacggcggacaatttcaccaaatagttttgcgcttaatactgcttttccgggttctgcaatatttgctttgatggttgttttcatccccagttccaaattatagccgcatagttcaattccttgttctgttgttttaattaaaataccttcgagagcaggaatagaagattttgtggaaactgctcgttgaataatagagactgcttccaccaaaacttgtttgttgcaagaaagtttcatagtaccacctttttttcctaatatagatagaaatatatattaatatttagaatcagtagtagagggggcttataagttgaaagacgggaaaagcccagtatctaccttgttttgtatgcatatttatgcagtgaaaggattgtttaatgtttgtgaataaaaataagcgaattttagttttaaacaatatgttgaaaactttgtggggaatgttgaaaacaagttaaaaattttgtggacagtattttttgctttccataaaattttgtggaatgttgaaaaaagtttcaacttgctaaaaaagaataataaataagaaagagaaatgatagatttatcatctatcacggatgtttttaataatatcatcaacagtcgctttcatttttggatctttttgaatctttttatcaatttgctgcattgcatataccactgttgaatggtctctgccgccaaattcttttccaatagaatcataaggaagctgtgtaatttctcttacaatataaattgcaatttggcgcgcatttgaaatgttggaggaacgtttggacgaacgaatatcatctgcggttgtaccaaaggtacgcgctacctcttcaataatcttttcaatggtcattggtgcaggttggtcattattgataatatcgctgatcgctgcctgtgcggttttaatacttggaggtgctccgtccagtaaacagtaagcttgtacttttttgacagcaccttccagctgacgtatattattttttaatttgtttgcaatatattctgcaacttggtcaggtaaatgaaattccagcaattctgcttttcttttaatgattgcaatacgggtttcaaaatcaggaggctgaatatctgcggttaaaccccattcaaaacgagttaaaagacgctcttccaaagttgcaatatcttttggaggacggtcggatgtcaatacaatttgtttttttgcttcatataatgtattaaatgtatggaaaaattcttcctgtgtagattctttacctgcgataaactgaatatcgtccaccagcaaaacgtctgattttctatatttttgacgaaattctgctgtagtaccccggcgaattgcttcaatcaattcattggtaaattcatcgcctttgatataaacaatattaatgtttggattatttttctcaatttcattacaaattgcgtataacaggtgagtttttcccagtcccgaattaccataaataaaaagaggattatagagtactgcaggttttgtcgctactgccatagcagctgcatgagcaaatttatttgatggacctacaatgaatgtctcaaatgtaaattcataatcatcacttttttttgtttcttcttttgattcttcctgcagctccatttggtcttctgttaaaatatcaatttgaaattctgaccccaatacattattaaatgcttcttttaaattattttgataagatttcataataatgtctctatgaaaaggagttggtactttcaatactacagagccgctggaaaaatctaaattaacaggttcaattttaccaatccaaagattatatgaaacctcgggaatttgattttttaaataatcacaaattaaattccatgcctcaataaaggtttccatgattacctccaagccagtatatatgtaaaaactaaaaaatttgctacaaaaatatacatttttattttgggtatatctcaatttatattatcataaaatacattttatttcaaattattttgtttttttctcttttcctttatatataaaatcaattatggtttttatggaaatctcattttattttttattttcatttaaaataaaaaattgtaacgcttttactttattttttttgctttttatggtatattgaataagttaaatcttacataaataaagttaaaacaattattgtatgttttttttatttttttcaataaaatagcggctttccggttgacagactaccagaaggtacgatataatgctaaattgcaaggtttatacccgaaaggagggttttggatgctgagaacatatcagcctaaaaagctccacagaaaaaaggagcacggttttagaaaaagaatgtctgatcgcaacggccgtaaggtgttggcacgtcgtagagccaagggcagaaagcgcttgtcctactaagaggtaagaaggccactgcactgtggcctttctttttattttttacaattggaatgatttgttatggacaagtttgtgccgttaaatgagaataaggattttagacggatttatgcaaagggaaaatcttatgtatcttcgtctgtaattacttatgtttccaaaaatcgttgtaagcagattagagttggtattactaccagcaaaaaaataggaaatgccgttcagcgtaacagagctcgcagattaataagggagtctgttcgccatttgacagaagatatcaaagacggttatgattttgtttttgttgcaagagcaaaaaccccttttgtaaaatgtcctgaagtacagcggtctatgaggaagcagctaaaggaggcgggggttttgaaatgaaacgtctgctggttaagcttgtgaaattttatcaattaagtatttcaccgttaaaggcaccttgttgtaaatattatcctacttgttctaattatgcaattgaagcaatagaaaggtttggagctttcaaaggtttttttatggcaatttaccgtatattacggtgtaatccttttagcaagggcggttatgatcctgttcctgaaaaaaaggaaaagcataaacacatagaggagtaatgcaatggacgctatatttaatttctttggcagcattctcggttatattctatggttcttttactatattgtaggaaattacggtgtagcaattatcttatttacaattttatttaaggtgattctatttccgctttctgtcaaacagcaaaagtccatggcagttacctcaagaattgctgaaaaacaaaaggaattgtcaaaaaagtatgcaaatgataaaagaaaatatcaggaagaagtacaaaagctatatgccaaagaaggcgcaaagcccggcggcggttgtttgactactcttttgccatttccacttatgattggtctttattacacaattttaaatcctttacaaaatgcgctgcatttatccagtgaagtaattgcaaatgctacaaatctattgaatcaaattcccggtgcaagtatgaatataggcggacgattcagtgaaatgagcattatcaggcattttgatgagttgtctccatatttaaaagatattcttggcgcagattatgataaagtacaacatttcagccatagctttaatttcttaggtttggatttgttgggaacaccttcttcatctccatggtcttccatgttgttcctaattcctctcatttgtttattggcatctatcggttctcaagtttatatgatgttgacaaacgaagcaatgaaaggccagcaaggttgtatgaaatttgttatgctggcattaccattatttactgcttggcttgcatggaccatgccgggtgcaatcggtttctattggatttgcaacactgtaactatgtttgcacaaactttagtgattaattatttcttcagttcaggccatatggcagctaaggcagaagcacggcatatagcaaaaatggaactggtagaagcaagtattttagaaattccggttgagcaacgaaaaaaattatttgataaaagtgaatcagagcaaaaacagaaatcaaataaaaagaaaaaatagtacataattgcgcgtttttggaggtgatactgtgttcagagaatcaattgcaacaggtgaaacagttgaacaagcaattcaaaatgcatgttcagaattaggaattgaatcctgtggtgataattttgaaattattgaaatgcctacgaaaaaaacattgggtatttttgggggcaatcctgctaaggttagggtttttgtaaaagagagtcctgctcaagccgcagctgactacttactgaatgtattggaacaaatgggaaatgaaaatgtaaccgttacgattcaggaagaagaaggcggtgccatgctatgtgtttccggtggtgatatgggttatatgattggtcatagaggcgaaacactggatgcactccaatatttatcaggattaattgcgaatcaattggaagacagttattacagaattaccattgatattggtaattacagagaaaaaagacgcgaaacacttactgttttgggtaccaaaatggcaaataaagctgtgaaaacaggcagaaattatgcactggaacccatgaatccttacgaaagaagaattattcatgcggcagtacagggagtagaaggtgcaaagtcttggtctgaaggagaagatttgaatcgtcatattatcatcggacctgaaggcggagagcgtatttttcctaaaaaacgttatcacaataaaggaaaaaatccatacgcaaaaaaacaaaaatatgataacactacacctagacgtaattagataaagtataatcattttatatcatgacggcctaaaaggtacgttctaaaaagttgggtaccgcaatgggtttcccaacttttttatttatgaaaaaaggatgcttattatggaacaaatgccattcaaacaaaagaaaattggaactaccattgcggcaatctctacggcacagggtgcaggcggtgtaggtatgattcgtatttcaggcgaacatgccagagaaattgcagaccgaatatttacatctcctcacggaaaaaaaattgtgcaagcaaagggatatacagctttatatggtaatgtgcataaaccgtatgatgaaggagaacagcctgaaattttagatgaagcaattgctttgattttttccggtcctgccagttttacaggtgaggatgtggtagaattatcttgtcatggtggtcttaccattatgaaaaatgtattgcgcgctgtttttgaagcaggtgccgtacctgcacagccgggagaatttacaaaacgtgcttttttaaatggaaaacttggcttaacagaggcagaatctgtaatgcaattgatatctgcacaaggagaacaggcagtaaaagtagcgttggctggtcatcagggtgtcttggaacagaaaattattcatattcgtgaaatgttaattactactgctgctcatttgtctgcttgggctgattatccggaagatgatattccacaacttcagcctaaagtgttgaaagataatttatatcgggcaaatgagcaaattgagcagcttctttctcaatttgatgcaggaaaagcaattagggaaggagtcaatactgtaattgccggcagacccaatgtgggaaaatctacattgatgaatttgctgtccggctgtgagcgttctatcgttactcagtttgcaggaaccaccagagatattgtagaagaaacagttttgcttggagacgtgccgttatgtttggcagatacagcgggaattcaccagacgaatgaccctgtagagagcattggtgtggataaggcaaaagatagggtgaaaacagcggaactggtatttgctgtttttgattcttcccgtgaattaagtcaggaagataagatgttaatggaagaattacaaggagtacctgcagttgcaattgtaaataaaagtgatttacaaacagtggcagatttgaattatatcaaagaaaaatttagtcatgtcgtttttatctcagcgatttcaggtgacggattaaaacaattggaagagtctgttgctgatgtgcttcaaactgcaaaattaaatccgtccgacggtattttatccacagagcgtcaacgtgatgctgcacagcaagccaaagattctttagaagaagcaatctatgcgttagaaagtggtatgactttggatgctgttacagtttccattgaaggggcaatctctgcattactggaattaacaggggagcgtgcgacggaagctgtagtggattctgtatttgctcagttctgtgtgggtaaataatgatttgttttctacacagaatagagatttatagagagaaaacaagaatttaaaatatacaattttactttaatttaattgttttaaaataaaaaagggcagaaaacttgaaagtaagatgtaataaaatattggtaaacatatgaaataagttgattctgttggaacttttataatacaaggatgaaaaaatgaacagagatgaaatattaaaaaccaataaatgttactgggatacttatgcagatttgtggtttggaactacagcgcttcctacatatggagtacactttgtaacggaggatgaattacaactgtttggtgatgtttcagggaagaaaatgcttgaactttgttgtggaagtggacattctctaaagtatcatgcagatagaaatgccagtgaattatggggagttgatctttctcataaacaaatagaaaatgccagacgatatttgagtgaaaatggttatactgctaattttatctgttcgccgatggaagctgacatggatatcccaaaaaattattttgattacatttattcgatttatggtataggatggacgactgatttggacggtacattccaaaaaatctcatcatatctgaaaaaagatggtatttttatttttagttggcatcatccgctcaattattgcatcgcatggtcctgtgatgaacggaaagatgtgattgaaaataataccttggtgatgaataaaagttattttgatgagtcctacttcagaatgccggtgaacggtagtgagattcttctatgtaaccgaaaaatatctacctacgtcaacgctttagcaaaagcgggatttgtaattgagaaaatggttgaacagaccgacaaggtaacaatgcagatggagggagatatcagcaacaaagctaaaaaagcaaaaatgtttcctatttccgtgttgtttaaagcaagaaagttatagaataaaaaaaatggattacatttaataaatattcaattatttgataacttttcgtagcatatttctatagatgataatacagtaaatttgtaatatagatgaaatatcctgagtacaaatagatttttgcaggtgtatttctttttcaaatgccacaagctcgcattagttttgatattggatgaattcattctcttgttttgtttgtaagaataaaaataagggaaaatatacaaaatttgagcatttagcaggtgaagttttttgaagatatagggacttcag

SEQ ID NO: 234 - DNA, 6524 bp, Unknown
  16S sequences of unknown bacteria
ggatatgatgtttggcaatgtgcagctgcgcaccctgccggaggatttgattcccggccaggaagtgtgtttaaaggtggaaaatctgagcagggaagaaaaattcagcaacatcagctttgaactgcacaacggtgaggtgctgggcattgccggtatgctgggttccgggcgcaccgagctgcttaactgcatttttggcgcggatccatacgacagcggctccattacgctgcatggggaaaaagtggacaagcctacgccggaaaaaatgaaaaagctgggcatgggcatgatccaggaagaccggcagaagctgggcatcattgcgcagcacaccattaagcaaaacatgatgcgcgcatgcaattacctgctgggcaagggggccgtggtggataccaagctggaaaagcgcctggcggacaagcgggtaaaggacttgcagattaagctggccagcgtgaacgattccatcacctcgctgtccggcggcaatgtgcaaaaggtggttgttgccagctggctgaacaccaatccgcaggtgatgctgctggacgagccgtcacgcggtattgacgttaacgccaagcagcaaatttttgaaatcatgtgggaaatggcccgcgaagggattcccagcatcgttgtatccaccgagctggaagaactgattgaaatttgccaccgaatcatcattatgcggaacggcaagtttgtgggtgaagtatctcccgtcggtttgacacctgaaaaactatacgcgctttgcatgggggatgtaagcaatgagtaatatgaaatcgctatctcacaaaattcgcaattttttgctcaataacctgctgctggtatttgttatcgttctttggatctttgcaagctttttgtccaaaaagtttttaacgaccaacaacctgctgaatctgctgaaaacggcgtccatgaaaggcaccctggccgttggtatgaccgtggcgattatctgtgggcagatcgatatgtcggtcagctccaccgttgccatgacgggcgtggttttgggcatgtgctttgcagcaattcccaatccctatgtggccttggttgtgggcatcctagtcatgctgtttgttggcgtggccatggcgtccgcccattccttcttcgtgatcaagtacaatatgccgcccatgattgttaccatggctaccatgaagctgctgtatggcttttgcggtctgctgtgcaacggctatcccattaccaccttcccaaccttctacagcaagctgggcggcgccaagctgtttggctggcttccctcggcgtcgatttggtttatcgtgtccattatagcggtttccttcattttgtcccgcaccaagtttggccgcgacgtatatgccaccggcggtaaccttcaggcagccaagctttccggcatcaacgtaaaccgcactcgttggttcgcgtatttcttggtgcagattgtggcaatcgcggccggcatcatcctttcctctcaggtacgcgccggcaaccacagctatgcgcaggattggggcctggatatcatctcctccgttatcatcggcggcacctcctttgccggcggcgtgggcaccgttcccggcacggttgtgggtatgattctggtttcaaccatcaacaacgtgctaaccctgctgaatgtgagcaccttctaccagtacctgtgccagggcgcgctgatgctgttcgccgtggtcatcaataccattaaagattctgcgctttccaagcgcgtaaacgcctgaaaataatagggggaaaacagatgaattacgattatatgcacaaactgctttctttggaaggaaaaaatgcaattatcaccggcggcagccagggcatcggcaaaggcatcgccatttctttggctcagtttggctgtgcggttaccatctgcggccgcaatgataagctgcttgcggaaaccaagacggaaatcgaagcctttggcggacagtgtgaaacctcgaagttcgatatttccaaagaagaagaagtggagcgcttctttgcggactatcgcaaaagccatgacaagctggatatttatatcggcaatgccggctacaccattcacaagcctgcgctggaaaccaccagcgatgaaatcgacggcctgtatgccaccaattttaagggtacaatctttggcgtaagccgcgccgcagaaatgatgaagccccgcaaatgcggcaacattgtggtgattacctctgttaacgcgctgtatcctttgccctctcagggggtatataccaccaccaagtgtgctctggaaggcttgattcgctgcatagccgctgatttgagcaaatatggaattcgggtaaatacaatggctcccggcggcattaacaccaacatgaaccacgacatgtttgtggaccctgagctgcgcgccaagtttgatcccctggttcccctaggacacattggcaccatcgaggaaatgggcgatgtggtggcctgcatggtttccgacgccttccgctacatgaccggttccaccgttttggtagacggcggattgatgttgaggatgcagtgatatgctgattgaaaagagcaggaaactggcggagcaaatcaatgcctaccgtcccccgaaggaccggctggctatttggtggctgggtcagagcggctttgtggtgcgcagtcagcggtattcctttgtgtttgatccctatctgtccaccaccctggaagacgcgacaaaggaaatggggccggaaatccgccatattcgaatgacgccgattccagttttgccggaagaactgaccggcgtagactatatcatctgctctcacgaccatggggatcactacgacgccgcctcggtcaagggccttcttcagggaagcccggcggcaaaaatcatcgttccgccggcggctgtccccagcctgattcgcgacggcattgagcgggaacgaatcattccggtaggggagggcgaccgttattgccaagaagacatggaagtaaccgctatacgggccaagcacaatcagtttgatgaaagcccagagtatggctttccctatgtagggtattttgtaaagacagaaggccgcaccctgtaccatggcggtgataccatcctgtttgacgagcttccgcagctgctgaaggagaggaaaattgacgtcggctttatggccatcaacggctatgacgatgtgcgcatcaaagcgggcttccaatccaactgcacctatcaggaagcggcggaactggctaaacaggctggcgtgaagctgatgattccctgccattacgacatgtttacagccaatacggagcaggtgggaaaattcgtaaactacatgaacagccacccggatatgccggcctacctggtgcccgtaattggtcagccctttaccgtataattcatacccaaaaagcaaggaggaacaaccatgaagatcgcttatgttatcaatggtccggctcacacccctatgaagcactttgcgcgccagttgggcattacccatgcagttacctcgccgtttagctacaattttgcctttaatccattcgcccaccagtgggattacatgatcctgcgtgagataaagcaggaaatgaacgattacggcatggaatgggacgtgctggaaggcgtgaattttattgacggcgtgaagctgggtctggaatcccgcgatgaagaaattgcccatttctgcactctgttggaaaacatgggcaagctgggaatcaagactgtttgctataactggatgcccgtatggggctggtaccgctcccggttgaatatcgatgtgggcggcggcgcaaccgtaaccggctttaatctggacgatgtgaaggatgcgcccggctgcggcataaccatcagcaaggacgaactgtgggccaacttgaagtatttcctggaaaaggttgtgcctgtggctgaaaagaacaaggtaaagctggctgtacaccctgatgatccgcctgtggactgcattgccggtgttgaacgaatcctcaccagctctgatgccatgtgggaggttacccagctggtgcagagcgaatataacggcattacgctgtgccagggtacctttgctaccatgggtgaaaatattcccgccgccattcgccgcttcggaaacgcgggattgctgcactttgcccatttccgcgatattcagggaaccgccaccaacttccatgaaaccttccatcatgccggaaagaccgatatgtatgaagccatgaagtgctattacgaggtaggcttcgacggtgtgtgccgccccgatcacgtgcccaccatgtatggcgacgctacccccgacatgccggcttatgctgtaaacgccaatttggtggccaccggctatatgctgggcctgattgaggcagtggaaaaggaaatggggattcgcaaataagggatcctgacgaacttcagtaataaagaagaaaggaagcgtacatatgcaggctaaggaaaaaatgctggatttgaaatctagaatggagaagaacgttcgcgaaaacattttgcccttctggtgtaactatatggtagatgaggaaaaaggtggcttctatggcaaggtaaacgaggatctgactcctgacaagacctatcccaaagccatcgtgctcaactgccggatgttgtgggcctttaccatgggctgggaatacttccatgatgaaaagtgccgggaactggctcaccgtgcctatgagtatattcgcgatcacttctgggacaaggaatacggcggaacgttctggatgctgaccagcgacgggattcccagtgaggtggaaaagcgcacctacggcgaggcgttcatcatctattccatggcggaatactacaacgcattccacgagcccgaagcgctggaaatggctatgaaaacgttccgcctggtgcaggaccatgtgcattatgcaaacggcggctatgcagattcggcttcccgcgactggcagatggacaactggctgtttaagtggatgatgaacggcgacggcgcggccaagctgctcaattcgcacctgcatctgtttgaagccaccatgactctgtatgacgtgacccgggacgaatatgtaaagggcgtcttgcgcgagtttttgctgttcctgctggatgtatgcgtagagccggatcggcaccatctcaaggctggtatggataaggatggcaaccgcattgacggcgaggtgaactttggtcacgattccgagtgctgttacctgatgacctgggcagccaggttgcttggcgatgaagaactgattcgccgtgccgacgctatcgtaattgatattatggatcatgtgctggaagaaagtatcgatcccattaacggcggcatttactctgacatggatatcaacaccggtcacctgaacaagtccaaggtgtggtggaaccaggcggaggggattaccagctgctttaactgctaccagattaccggcgatgaaaaatacctagacgctgccatcggcatttggaactacgtggaggaaaatgtggtagatcctacgttggagtggtttgccattggcaaaaacaaggtgatggacgaggaatggaagaagcaggaagcacagtttggcgcctttatgggcgatgaaaaggccagcaaagccaagtgcccctatcataattcccgtacctgctttgaaatcatcaagcgcgtcaaccaggaactggaaaaggcatgacggcgatgaaggaagcctatcgcttgtatgcgcttaccgccgccccggaggcggcaggcaagtggcttcaggagcattttgacttcgtttgccattgggaggagcaagccctgattgcgcaaaacgaagggctgacgatttcctttacgaagggtgatggatgtccgtctgtgtacggcatccatcacctggcgctcaatgctacggatattcatcaggctctcgctatttgccagaaacagggcttgaacctggatacggataatggacgtccttatttcaatcccgccgtgtggggaacgggtacgcacttttttaatatccgcacgccctttggcctgcggctggaaatctgccaacggctggacgttcaacagggcaatccttctcgcgttattagcgggttggagcaccttggcgtttttgtgcgggatattgaaaaagcggaggcgtttttcatttcgcttggattccggcacacttatccgcgcactaggattgaaaaggacggctgccagattttttgctcaatgatgacggacgatgtgctgatgctggaagtgttcagcctacagggggaaaacctgcctatggaaaatgtctattccggcattagcagggttggcatcttgtgggagcggaacgcttcgtttgtggggccggacggtgaaaacattaaactaatgacaaaactataatcaaaaaactataatcaactggagggcagaacgccatgaagttcaataacccggaagatatcattcctg

SEQ ID NO: 235 - DNA, 32759 bp, Unknown
  16S sequences of unknown bacteria
aaaaccgttgatattactggctttttcaaaaagttctgtatcaccactcgcaccaaaaaaagagacgccatatggcgtctctttttttggagcaacggggaacacttgccttcttcaaatcaccaatcacagccctaatttaacgcgaaggaaaaaaccgctatgcttttccctttatttatcctcttgggtcacgggggaagtactatcctccttttccgcagagcattcctcttcttccatcatcttttgcagcgttttattgtgctttcccagcactttaccgcctttgctaaaacccaccgcaaataaaagcgccactgaaaaaatggcaagagcggccgccggtaccaacatcaacatggtttcttctgtcatagcattctccccctttttgtcccccatagtatatcacattccggttgctttgcaaaattctcgctgccaaagcaacctgcttattctgcatttcttgtcatatttgccagttttctcttcctcatttgcatcgattgttgcaaaaaaactattgacacttcccccagcctggtgataatattagttcattaaagcgatagcaacgctgtgactacggaggaaaggagaaagctgcaatgaaaaagaactgctttatgatgatggctatgatgatgcgcatgtgcggtatgcgcactttttccaatgcaactttttccgatagctccatcatcacagattaaaaacatcgcgccatccatgggcgcggccatcatttgtttttaaccgggagacttcatcggaaagtcacccggtttttgttttacccatatctttagcgaaaggaacctcacccatgaacctgtattacgaagatctggtaagggcgaaccacctgctggggcgaatgtgaccttattcccgcccctgctccgttcacccacaaccaaacatcttgtaagataaaagaaaggacatttaccatgaaaaagactttgaaagctgttctggccgctctgctcgtcgtttgcctgctgctgcccctggctgcctgtggcaacaatgccactaccgaaaccaagctcaagatcgccattccgaatgataccaccaatgaagcacgcgcgctgctgctgctgcaggatcagggctacatcaagctgaaggacggtgccggcatcaccgctaccgttctggatatcgtagaaaactccaagaacattgagttcagcgaagtagaggctgcccagctgcccaacctgctgcccgatgttgactatgctgtcatcaattccaactacgccatctccgccggccttaatcccaccaaggatgccctggcactggaaggctcctcctctgcctatgccaatatcctggcggtaaaggaaggcaatgagaatgaacccctcgtcaaggcactcatcgctgccctctccagcaagcaggttgctgattacatcaccgaaaagtatgatggctccgttgtttctgttgtagaaaaccccggcgatggctatgatgccgacctcgattacactgctttggccggtcagaccatctccgttgccgcttcccccgctccccacgctgagatcctggctgttgccaaggaaatcctggccgccaaggacatcaccttggacatccaggagtacagcgactatgttatccccaataatgttgtagaggacggcaccgtcctggccaactacttccagcacaccccttacctcgatgacttcaacgccgaaaacggcactcacatcgtttctgttctctctgtccatgtggagcctctcggcctctacggcggcaagcaatccactctggatgcccttaaataattgaaacaaactggggattgaaaaagtatgatcgagatcaaaaatctgtgtaagacctattccctaacggatggcagtgtggaggccctcaaagatgtttctctttccatcccggatggcgatgtctttggaatcatcggcatgagcggtgccggcaaaagcaccctagtgcgctgcatcaatatgctggaacgccctaccgccggcagcgtggtcattggtggcaaggacctgaccaaaatgaccgaaaaagagctgcgagccgagcgccaaagcatcaccatgatctttcagggcttcaacctgctgatgcagaaaaactgcctgcgcaatgtttgcttcccgctggaactggctggtgtaaaaaaggccgaagccaccaaaaaggcgcagtcactgctggagctggtgggcctgggcgataaagcctcggcctaccctgcccagctttccggcggccagcagcagcgtgtcgccatcgcgcgggcgttggccaccaaccccaaggtgctgctgtgcgatgaagccaccagtgctctcgatcccaagaccaccaatgccatcctggagctcatccgggagatcaatcagaaactcggcatcactgtcattatcatcacccatcagatgagcgtggtggaatccacctgccgtcatgtggccatcttggaggaaggccaggtggtggagcagggcgaagttagtgcagtgttctcccaccccaaatcggaagccgcccgccggctggtcttcccggagggaaatccggaaagtctgctgtgttccctgcccggttcccggctcattcgtgtggtgttcaatggggccgatgccaccggcaagcccatcattgcccgcatggccaccgagatcggcgtggaagccaatattgcctatgcttccacccgcagcatcgagggccgcgcctacggctccatgctgctttccattgaagataagaacgacgatctggcccgtgccatcggctatcttacagaggatggcgatattaccgcccaggaggtgacccagtatgctgaataatctcttttccgctgaggtactgcaggaaacactctccattgttcaggggcagttcctgctggccttctgggagacgctgtatgtcaccattgcggccatgttctttgccgtggtcatcggtctgccgctgggtgtcatcctggttgtgggcgaaaagggcggcctggcccccctgcccggctggctgatgaaaaccatcaatgtcatcatcaatctgctgcgttccgtccccttccttatccttatgatcctgctgttccccttcacccgggccgttgtgggcaccgcggtgggtaccgttgcctccattgtgccgctggtcgtggctgcctttccctttgtggcccgcctggtggaaagcagcctgcgagagctcaatcccaatatcatcgaaatgtcccgcagtatgggcgcttcccccatgcagaccatcattaaggtcatgatcccggaggcgatgccctccctcatctccaatgccaccatcgccatcaccaccatcctgggctacaccgccatgagtggtatcgtgggcggcggcggtctgggcaagattgccattaactacggctattaccgctacaagtatctggtcatgctgctggctgttatcctgcttatcgttatcgtgcaggtgttccaaagtatcgggacccacctttcggtcaagctggataagcgcctgaagcaaaatcactaagtaatctcctctcttctttttcttccctatataaaacctccgggatctcaccgatcccggaggttttcttttgggtaattatccgtttcaaaaagaacgaatgtttcatgtgaaacattttcagccgcagcctttagtagtggtagcgctgccgcttggccagcagaaagaccgccgaaacgatagccgccagtacctcggaaactgtgatcgcccaccaaataccatcgatatctaaaaacagcggaagaatgataaccgaggatgcctggaacaccaacacacgcaaaaaggaaataagcgccgaaacagcgccgttgcccaacgccgtaaaaaaaccggagcaaaagatattaaagcccgccagcagaaaggaaaaagagaacaaccggaacgcgtgctttgtcagcgcaaacagactatcatcaaagcccacaaagatgtaagcaaaggggcccgccgctgcgattgccagcgccgtcagcgccacacctaccgttagggtcagtgtgatgctcttacgaagcaggcttttcatctcggccgtattctctgcaccgtagtggtagcttacaatgggcgatacgccgatggaatatccgatggaaatggcaatgaagatgaactgcacatacatcagcacgccgtaggcagatactccgtcctccccgatgtacttgagcagctggaaattatacagcatacccaccagcgagcttgcaatattggacatcatctcggacgagccgttgccgcatgccttcagaataggctttgcctccaaagtcggcttccctgtcagccgcagtaggctgttattcgggcgtaggaagtagatcagtggcagcacaccgcccaccacttgtccaaggccggtggccagcgccgcgcctgccagcccccaccggaagcccacgataaacagagcgtccaacgcggcattggtcaggccggctgcgactgtcacaaaaagtcccagctttggcttttccgccgccgctaaaaagctttggaaaacattttgcagcataaaggcaggggtaaacgcaataacaatgcgtccatatagcacacagccctccatcatctcgggggtcgcacccagcagcacacacaccggccgtatcaccgcaatcccgatggccgccagaaggatccccagcagcacggtaaagcacaccatcatgctgaagtagcggttcgccttttccttattgccccgccccagctgctgcgccacctgtgccgtgccgccggtgccgatcatgaagcccgcaccgcccaataccataataaaggggaaaataaagttgagcgccgcaaattcggttttgcctaccgcattggaaacaaacagtccatctaccacgctgtagatggaggtaaagatcatcatgataatggtcggcatggtaaagcggatcagccggccgtagctgaaatggtcggaaagccggatcggctcccgtgcgccatttcttctctctgcgttcatttattattctccagttttcattttctaaaatttccggcaatctctttctttgccgaatcatatggtctgtacctgtgcagacagcagcgtattttagcatagatatctgtaatctgcaagtttttattgcctcacaggatacgggcgtccctccgcttttatcgtgccgccacccgtcacgggcgggcagccatcctccgcttcgggacgccctcatttttctcttattcggggaactccagctcgcacgcacctaccgcacgagcagtcaaatgggtacagctttcttcgccaaaggtctcccgcattacccgcagaaagcccgcttctcgctctcttggcaccagggcctgtatcgtcccggcaaagccgccgccgtgtacccgccagccgccacagccggtcagttcccgccggcacagcgaaagtgccagtgccaaccctcgttcattcgggtcagctgggtagatgttctgcagcttctccatcgaggattccccactggccagcatctcctccaggtaatgctccgcagtgggttcccgcagagctgccgccagccggggcacccgctcgttttcctcaaagaaatgcatcgcccgcaaaattgctcggtcgctcaccttgccgcgcaggccgggcagccccgcgtaaaattccgccgggtctacctcccgcagcacccggcagccaaactgcgctgccaccgctctcatctcccgcgggatggccgtgtaatcctcagtcaggtcggcatggctcccaccggtattcaccacatacatcgtcataccccagcgggcaaagtcgcagggcaggcgctccacaataggggccttcgggcaaagaaaatcaatggcaaccgcgctgcccaccgccgaagcggtctggtccatcaggccgcagggcttaccaaagtactcattttcggcatactggcctatacgcgccagtgccaccggcggaatggccccatcattatacagggcattctgaatttgccccagcagcagttcaaaagccgccgaggaggacagcccggaaccggtgggaacaacggaatcggtcacaccggcaaagccgccggccgcatacccctgctgccgcagcccggcaaagacacctcttatcatggagggggaatggccccgctccttttcgtaatgggttaggtcgcgccagtccagcgggggcagcggatggctcttgctgcctatctccaccggcccctccttttgcggagatacgatggccagcttgtccagcgtaacagcagcagccagcacccggccgtgctggtggtcggtgtggttgccgcccagctcggtgcggcccggtgccgaaaagatgcgcacctcttccctttccccatacagcctggtaaactgctccagcaggcgcaaacagcgctcccgttgcggcagcgggtcatcggtcacatacagccggcacagtgcctcatcacagacaccgctctgcagggcttttttccattgggccgcagttggcatcgttcgttcctccgtcagttcagggtaaagcgcatcagcaccgggttgtggtcggaataggtaaacccggtctgcacattctccaggtaggtcaccgtcacattgtcgcttaccaggaagccatccacaataatggtgaagttcccctcctcataggggatatcgcagttgcggcaggtgggctccaccttgccgtcggtatagttatcacagcgggtcagtccctctggcagcatctccgcggggaagggctgcgcccagccaaagtcggtcatctcaccgccattcagcacctgggtggagttcccggtaaaatcatggttgaaatcgccgccgcacaccacatagttgcccttctggtattcggccagcatatcgccaaacagcatattcatctgcgcggcccttatttcatcgctgccgccataggccgaaaggtgcacattaaagagcacaagctccttcccgttttccgtgggcacccggctgatggtatagcaccggtccaggtcaagaaacttggaaaagccggtggaaatgggcaggctgcgccgcagcgcaccggtgatgccgacactgctgaaggtcaccatgctgctgttggagctgccatgcggctgtgtcagcggatacatgaggaacgctgaatggtaattgacggcatccacctccgccatctgcgggaaagccgcccgcaggatctcctgctcatcgatatggtagctgcgggtggagtcaaaatctacctcctggaacaggataaaatccggctccaaggaggaaacctcctccgccgcggcgttgacgcactcggtcacgctctcggggctttccgcccaggattccaccccgccatccataaagaaggtaaaatcatcggtataggcgccaaagccgatattctgcgtcacaatggcatactcctcgcccagccgcaccgccaggtcagtctcctggggattgcggatctctagctcctggttatcggggatgcggtcatagctcagcatcacatatcccacatagataatgaccaccgccagcagcaccgccagcagaatcaaaagcgctttcagcagttttctcatgtttcttctcctccccactttcgtggtttgttttacagcagctccaacagatcctcttcctccagcggctccgctttggccgtgtcattttcccggtagccagtcataatgaccctaaacagctccttggtggaaggcggcgtatagctgatggcgttggcgccggcctctatcgtccgcaggatggattcttcggtggggccgccggtagcgatgatgggcacatcggggaacttctcccggatcttccgcaccaccccggcggtacgctcggcagcggaaacattcaggaccgaagcaccggccgccagtcttgccgcgatatcataattttcactggtcacggtggcgatgatggggatatccaccacctttttcatcgtttccaccgtctggttgcgcatgggtgcgttcaccaccacaccaaaggcgccctgcgcctcggcatccttggccagcatcacgctgcgtatgccgtcggtaacgccgccgcccaccccgcacaccacggggatggaggaagcggaaatgatggcgtccataatgacctgctgcggtgtaaaggggtaaaccgccagcaccgcatcggcattacagttgcggatgatggcaatatcggtggtgaagatcagcgacttcatccgtctgcccataatgatgatcccactggctcggcggatgaccgagggcagggcaaggctgttatgatcccgcagcgcactgtggataaaggctgggggctgtctatgttctttctggctcatggggttcctcctttggggttggggtcgctgggtttatatattatttattataccatattatccaataaaaagaaagcccggagggtggcatctctccgggcatcttccgctatttgtgataattttccgttaagactcagcttaatagaaagtggcaacctcctgctccggttcctcagccgggatgcaggcgctgaccgccagcaccgggccgcgcttgccgtacacagtgctgtactggatattcacattggctgtcacggtataccagccgccattttccagcttttcagggctatatcccgtgcaggccagccccataaaggtgatatcctccacgcagcaggtcatcacatgccgcccgcacacaaagcagtttttcaggctgcggtgcttggtcaccacacgccccttaaagcgcaccgtcttgccctggtacttttccatctcttcggtcaggtcacggtaccacacggcaaagtccgcatcagcgatctcaatgatcggggcctcaatatcaaagggcagcgggtcctctatctcatcataatcaaagttgccgtccacatagtcatagcctatttcggtccggcggctcacgccccgcaccaccttgtggatctccattttatcggcgcccaccggggcccgattcaacagcaccatctcgcagctggtcagcttatccaccatcaggctgcgcatattggtgttgtaactcaggaaggtattgtaatccgctatcatcacttcctggtagatcatccagccctgcggcatctgctcgtacaggcgctgcagctgccacataccgttatattctatcactacccggtccacccggtggatcttctgccactcgcccagcttggcggtggtcagctcctcctcgctttcgatgggcaggatatgcacattcttcatcagcgggtgagaaagatcgtattcctcctcgccctcctcgcacagcaccagcagggtgtgctccccggcattgaatttcttatcctccagcgtttcccggataaagcgggtctttcccccctccaaaaagccggtaaacaggtaaaccgggatctcaacagcttttgccattcgtcagtcctccgtttttcagttcaggtggaacagcgaagtcaaggcgtcctccttcagctcggcgccgatgacgcacagccgaccggtgacaccagcagcgccattacggatctccacctcaccgggaacatagtcaaagtgcagccacttgccgtccgtaccggctacaatgcccttggcccgcagcacctggccataatcgccggtatccagggcttccagcgcggcagccagctcctgcttcccgtaggggtgggcggtctctttaccccagctggtaaatacctcatcggcatggtgatgatggtgatggtggtcatgttcatggcagccgcagccgcactcatcgtcatcctcatcgtgatggtggtgatgctcatgctcgtggtcatggccatgatcgtggcagccgcagccacactcatcgtcatcctcgtcgtgatggtggtgatgctcatgctcgtggtcatggtcatggtcgtggcagccgcagccacactcatcgtcgtcatgatgatggtgctcgtgctcctgctcctcggccagctcctctagagcagccgccagggtatcccggcgttccatggccgccagcagctgcttgccgtccagttcgtcccaaggggtcgtcacaatggtggcggtggggttcttctcccgcagcagggccacacaggcatccagcttttcctggctcatcccggccgtacggctcaaaataatggcgctggcgtgctccacctgattattgaaaaactcgccgaagtttctcatatacatcttggccttggtggcatccaccacggtggtaaaaccgttcagcaccacatcgtgcatttccaggttctgcaccgcccggatgacatcgctgagtttgcccacaccagagggttcaatgaggatacggtcggggtgataggtatccatcacctgccgcagcgccttgccgaaatcgcccaccaaactgcagcagatgcagccgctgttcatttcggtaatgttaatacccgcttcctgcaaaaaaccaccgtcaatgccgatctcgccaaactcattttcaatgaggacgagctgttcgccggtataggcctcagcgatcagcttcttgatgagggtcgttttgccagcgcccaaaaagccggagaaaatatcaattttagtcataaaagcatcttctttccatgagaattatttgccgatatagtattatactacttttgtcaactttctgcaatatctcagcactccccatttcgcatgtcactttccgataataagcacaaattttatatggttaaaagggccacaggatatccctatcccatgaccctccccacgctcttacttctattggggttatatttcatcatcttcgatcttttcctcgggcaaaacgatcccctgtgcggcgaagtactccaaaagaaaatcaacaaattcctgtagagctgaagaatgtggaagattttcattccaaacggcttttactgcacagttctgtggcggattaaatggcagtactgcaacatcatcccagtccctcacaaaatcctgtggaagtaatgcacatagtatacctttggacaccgcttccctaataagggagctggtgttggtgcacaagcggatctgcagcggccaatctaccggcagcttactgttcagcactgcaatagggcgctgacggatatccaggaaagtcactgaatcctgctgtgccagcggatcatttaatgaagtgcaaaaaatgtttgctgttggatagatatcaatggattccattgtattaaaacgctctttaatatctaaaggagtcaatacaatatctatactgccatcatttaaccttttaattgcatcgtaactggaaatctccagcacagagagtttaatgtgtgggtgccttttcttaagcgcttcatatatctccagcgggaaaacattccagcaggaaattgcaagacccaccgttaaggaatggttttctcctgtttccttgaggctgctgatttgtgccaatagcgccgaataaaaccccttaaattgcaaaagcaagttacggagagtctttccatattcggtcagctccataccatttcgcccacgcacaaacaactgaatgtccaattcatcttccagttcttgtatcgctcgcgaaatcaccgagcgggaaacatataattgctgggcagcagcagtcacattccctgcttgacataccgcttcgtaaaattcaatctgtttgagggtcactgtcatcaactcctaaactcttgataatcttctgcaggtgattaacgatgaaatgcaaatacaatatcgcattcaaattatagcactaatatggaagcaggcgcaagtatcaactgtttttccggagaggatcatacaccataaaggctgtagccaacagtgtatatactcccatcaggacatagatcggtgtaaacagcttttcccccgttataattcccagcatatttaaataataagccgatgcaaacccgcctaaattgcttacgcctgttgcaattgcgatcgcaagagaagattggttgggcgaaatatacattcccaatatggcataagctgatgtgatcaacaaaacggaggtcattcccattatagcagatccaatcattagaatttccgtctgttttgcaaagcctaatataccagcacctgcagcggcaataaagtatccaaatacaagagtaagccgttttagcttataaaaaatctttccaaagaaaaacccaatgagacaaccactggcactataaagagaaagtgctgtcgctgccacggtggcgcctccggcatggcgatgttcaaacaacaatgagatattcatcaggataggataactaaccagctgctgcagaaatagcagaaaagcagtaagggcggttgcgatcctgcctcgatgatcaaatcctgccgatttaagtagtgaatgccgataaccgtttggtacctctgctgttactgtcggagcacagcagctttcttccggctctggttggaacaccaaaagaagcaggctgaataaaccgagtagatgcgctaaaaaagtatagttccagccatactctgccaacgagccagccaccatctgtaaaagaactcccccgaaattactgataagattaccataacccagcatatcggcttgttcttttccggtatagtactgcataacaagcgcatttcccaatgaggcacgcagacctactccaatgccaaaaacggcacggcagatcaacaatacagtaaagctttcagttaaaaagaaaggtgcgataccgcctatcaaaaacagaaggatccctacaagagagatcgtcctataacgaatctttttgccggcaacggcgcctgcccacagggtagtcggaacgataaacaatgtaggtagcgtagaaatcagcgcataattatttgacggaaattgtgcagccagtttagccatcgcaggagaaaccgttgcaacccccattgatgtaaaaaaaatcgcaagcagtgagatcgactgtaatggtgaaagaacccctttttttgtaaaaacaaacatatatactttaccttcagtagatttgattaaatagtggtaccgaatatactaatagggaaaagcccatgcatcagccgtaggcttttccctattgtattctattgggtcatcgttcacatcggccacaattatcacagtagccctttgtcttgcaagctggcaggtgtagtatttcatagaagtcttcagcagaaagacccggcgttccgccgtcagaaacaccttttgaagtcggctccttgggctttttttcgtcatggtcagtcatgatgacacctcatttcatgtgaaatcttctataaaaatgatacaatcgaccatccactgctacaaatcgcaaacgaagatgcgtgcaatcagtgctgcggtgtagccttgatcaaattaggattgagctgcgcatcgccgccacccttaatgctcttgctgtcggaatcaacgatttctccctgattcgcaccaaattggcgcactccggagagataccctgctttttcacgggcatttttggcaagctgggtataaagaccgtattcatgatcaacaacattctgcatgtaggaaggatccgtatatgggttgcggggcagcgggacatcttgatcgcgtgccaaaatatcctgaaccttcttgatgttgaccttatgcgcagtggttccatctgcaatggcaacggcagcagctacacctgcggcttgtccggtgccgacacactgcggaatcaaattgacatagtcgatcccaatttcatcagcagagatatggcgtccggggcaaagcagattttcggtctttttgggcagaatagcacggtaaggaatctcgatggggcagttatcattgataaagctgatggtggagtgccatgcaataacatcctcgtgctcctgcgggaatgcaaaatcattcggggtaatgacatattcgccgtccaaacggtaggagcaacgggtacccaactgaggtgcaatatcataaaggaacgcattgcggaatgcaacgggacacgccttacgcagatactccaacgcattgcgcatggtatcacgggtctccatttcagtctcggtcgcatccttcaggtttgaacagtcacgttcagggtgccagttgttgatccagcacacatcattggtaggaccgggcagcggcgccgcacggaacccgcagactttggagaagccctcatgcaaagcagccgcggcagcatgattggtttttttccattcgcagaaaagatcccaattgcaaccgccgatacgccaaaccagcgcagtagtggcacagcgagtcagcttatctgccagtccaaagtaaggacaaccggtctggcggaaaatatcgccatctccggtggcgtcgatcacgatcttcgccaacacagccttgcggccctccttactttcaaaatacacacccttgatggtgtcgccatccataataggacgagtcccccaagaatggcacatcacatggatagaatccttgtgctccagcagcatcttgtccatttcgattttcaactggtttggctcaaaatacacagatcgaaccagtcgttcgggcagcttcgcattggtactaaagcaatcgtgaatgttcttccatgcattgacaaggaccggatcctcacaaccgatctcatcgccggagggtccaagaacagcacccggaatgctttccatacgggtgaaccattcctcctgcagtccacggacatactgtttgttatagaaagaaaggcgaggaaccataataacatagccgccggtaacatcaccgcccatgtagccgtagcgttccataaggacaatgtttttacagcctgcacgggctgccgctactgcggcagaatgaccagctgcaccgccgccaacaacaagaagatcacattcggtataaaccggaatttctctctcaccttcaaatacagttttttctttttcgctcatataaggtttcctttcaataaagaggggctttttttagctggagtgggtcaatgccttatcgacccactccatcgagctatgttgagctataataattacagaatgtaggtaaatgccatgccgcaaatgtagcagatgaccatgaacaggactgtcgtttgaacaccctttgtccaaacaaacttcggggtaatctcggggcggccaagaataaaggctgcgttggtggaagctgcaacggtccagaaagcatagccggagcagatattcgatataatcaggataatgtcggggttgattccggtggttgcagccagactgcagacaaatggtgtaacaaccggacaaactgccatggtaagtacaagaccgttagcaacctgagtaacaagggtagagaacaggattacaattgccatcaagacccaaatgttagcaccgccgaacagagggctgagaacctcaaccaaccactgacggataccaagatttgcgtcggaggtgaccttgcccagcatgaccagcgcaccgaccagagagatcattgtccacatggatgcttccgagaggcatttattaataggaacaatggactgcttgctgtccttgcggcggatcaaggcgccgattgcacacataagtacccaaatccaggagttgcccatgaaagtaaagaaataacgtccgggcgcttccttcggataaacggttccgataagaatataaattaccggaatgataatcatggcaaggcttataatctgatcacggttgaaatgatcaggggtattgcgcatggcctctatttcattaaaatccaaagacttcaatggctccatgttgaccctatacactgtcttcatcagaatcgtgtaaacaatcaaatagatcatggtgatggagaacatgcaaagcatccaggtgccttcattaaacatgcggccgaagggctccattgcagagttgatcaaagcgatggtcataacctgcggggtcttgaatgcaaagaagaagataccggtggcagcaatgtaaacaccaagcagagtccactttacaaagggatcgtctttatcgtagccgcaaacatcacgaatggattctaccagtccgaagaacaaaatgtagacgggagggccaccaataaaggctgcagcgacataggtggcaaggaacagcattaccatcgtcataacaggacgaccacggcaaagcttgctgctcagcaactttttagccaaaacattcattgcacccgaatctcgcaaagccagacacagggcaccgcagaataccagctgaacagtaaagacggagcccagccattcgctcaacaagccggaaatgtcataatacccatggaacagagtggcaagtagcgccatcagcgaaccgctgagcaagtcaccgttaaagcaggtgataatgattagaccaatcagaacacccagcatctttacaccagttacggtaactgtactgaatggcttgaccagatagccaaataagagcataaatgccaagccaatgaccatgacaattgcgtaggtcgaattgatctttctttgttttgtcatttttaacctcctacaaattgattccatttcctatgccggacgtccacagcatagcttgcaaatagcttgcaattagaatatagcatagaaagacacaaaataagcgatttaattcgacacaatactgttcatttttactacaggtgaaaaatgatgcgattgttgctttgtctctattacacatatcgagcacacaactgaagggcttgctgcctgcgattcacagacagcaagccctttcggttgcttgaacaatttttactaaaatattttatccaactttttggggtcacttcaaaatcttacatcaatttcaacaactttggcaggaaagtaaccaaatctgggaaaaccatgataagtaccaccgccgcaacataaataataacgaatggccaaatccttttaaaagctgatgcagcgcttattttggcaacaccgcaggctatgaatagatctgagccaaaaggcggcgtaatggtaccaatgcacatccaaacaacaaatactacgccaaagtggaccggatcaatgccgatagccgttgcagccggtgcaaaaatgggagtaagaataaccagcgctggagaaaccgacatgaacatccccaggaaaaacataaagatgctgaacaggccatagaacataagcggtgtcttggcaataccgatgatccagttgccaataagagtcggaatattattgcgggtaagtacgatggcaaaggttgcagctgtcacaattatcatcataaccgcagcagatgtgcgagcagcattaacaaatgttttgggtatgtctttccactttagctctctgtaaacaaatagtccgatgattaaaccgtaaaccactgctaccgccgcagcctcggttggagtgaaataaccgccataaatgccgcctagaattatgacaggcatcaacaacgcccaaatcgcatctacaaaagccttccacagttccttaccagtaggcttaggggaagtaatcattttaaacttcttgctaaatccacgtgcatacaggcagtatagcaatattaccgatacggttcccaggctttagttcttccaatgcacctttgataatgcgacaggaaacctcatgcatcttaataaaatcctcattcggctctccaaccgatatggtacgcaccagctgtgtccaatagccattataccgcggagtaatctccatcgatatacaatcaccatgagctacaacacaatcaaacatagtcgcagcgcgaatacatggaagctgattatcctccagtgaaaacctccctgtagaaataagggtaaagttgtagtctgcccccattccctgcgttgcatgttccagctctgccgccacctgctgctccgtcatacctggcttaacatttttcagcacttctgcatagcccgagccaatttgccgcattgacgaattaaagcaacctcctctgggctgtggtgatttcggatacgaaatagcggttccgatacatcacacagtactaatccgggcatttctctttccagcgccatacgccatgattgcggcagaatgtccaagctggtgcccaagcgaccgcttgttatttcactttctttcagcacatctataatcgcttgaatgggagttgtacttatcctgcattcagtcacgattccagcttttttcaattccccgcaagatatctctgagtctacaataccaacggggttggaacatgaaaaaaacgatgcagactgcagcccgtaatacacattggcagccgttaaaaagcggaaacaaccatacgcattggttccgacgcatccatttcctatcgtcaacaacacatctagcttttcgtcctgcatcagacctcttactgcttcaacccttcttttccccatcgctgaacatctgatctacccctccacacttttaattatttttaggctcttgccgtcctctgtcaagcatcgtcctccttctagagtcaccaaataggtatccccccagcaaaaaccgcagtcatttcaatctttcaatataatttggctaagtattaccgtcatatcttgggtcagttttgtctcattttctgcagaaatcggttgttcccgtagatccaccccgcaaatgtacccttgaatgcccccaatagtgtatcctgctgccctagcttcttcttcgattttttgggcaacagtgcttaccttgttcccaggtattaggagcttagccgctgcgcttatccacccggccactgcctcatgcatcgctaccgctgtttggttttctttccctacacataaagtgcgcagcatttgaacccaatatccattatatcgaggtgtgatagctgctgctatgcagtcaccatactttactgccttttgagaattcgcagcactatgcaacaggcccatgccgtttgcatcgttcaaaaaaccgcagtttagagttgtaagggtttcctctgcaccttgctttttcatggcatagtccaactcagacaccagtttgctttcggttacattattctgcaccgctgcacatagagcttcatatccgcttagtgccaactcagcacatttctcaaccaatcggcattcttcactactgcgtttcttgcggatttcataaagatccatcgtacaatccacccattcaagctctggatatgcactatgaatacaatcaaaccatgaagcgggaagtgtttccgggcaatagccaattcggccattggtaatacctctactacctaaaatatctaccaacccctcggccaatctatctcctaccatcctcacatcccaaaaacctctctcgttcaacgccttcaaatgtgttaggctaccgcaacataccgtcggggtttcatcggcaactatcactaacgcttgtctatggtaatagaccctgttatctacaaagtatctataaaatccgtactcgttagtcgccacagatccgttacctacaaccaaaattgaatttaggttcaaccttttcattagattgttcgcttttagtaatggcagatatgttgctaatcacctgccgcgggtatattctatattgttttgcaacaaataactttactgacctggaaaacagaatggccagtcatctttccattttggcttcaggattttgctgcaataacgagtaatataggtatgggacggttgcaattatttgcagccgtcccttcattatataaaaaagcagatttctgcatgaggttcaaaagcctcgatgcagaaatctgcgggtgttacagcacctaggcgctgcgagcttttcatcggacatattgttgcccttttgggaggttgctgttcaaattcctttgttgaaggtttttatttgctcttacaccacctgcaaaaggtaaaatttcagatagtcggtctccggaacctccggcaaaatgggatgatccggagcctgctgccgcgcctcgatctgccgcagcgtcacaccggcatccagcgctgcctcccgcagcatcttacggaacatctcatcggtcataaaatgggagcaggagcaggtcgccaaatacccgccgcggggcagcagccgcatcgccttcctattgatctccttatagccgtgataggcgtttttggcggtcgcgcggctcttggtaaaggcaggcgggtccagaataatatagtcatagtcgcactttttctctttggccatctcggtcagcaggtcaaaaacatcggcgcacttatagtccagattggtcagtccattgcgctttccgttttcggcggccaactccagtgcaaaggccgaaacatctaccgccgtcacatgctccgcccccgccgctgccgcattcagcgcaaaagccccggtatgcgtaaagcaatccagcacccggcgtccgcgggccagcttggccgccgcctgccggttgtacttttggtccagaaaaaaaccggtcttttgcccctcgatgtagtccacatcatattttatcccgttttcggtaatggtcacatgcccgctcaggtcggttctcagcccctccatctggtagaagccctttccttgctccagcccctccagcgttcttatggtcacatcgttccgctcgtagatcgcatcaatctgctcgccgtcctcccgcagcagctccaccagcgcccggtacacccagtctttgcggcgctccatacccagggaaagcacctgcgtcactaatatgttttcaaagcgatccaccgtcagccccgggaactgatccgcctcgccaaaaataaggcggcagcagcggtaatccaccgggcccatcaccgttttacggtaattcagcgcatagcacaccctccgccggaaaaacgcctcatcaaaggtatcattggcattgcggctgatgatccgcaccctgattttggagtgatcattcacccagccggtgcccaggtaccgccctttattactcaccacatccaccatatcaccattttggtaagcgccctccacggcggtcacttcctccccatacacccaggggtggccggcccgcacgctgcgctccgccttaggggtaacggtaaataccggatattctcttgctgtcatagtatctctcccactcgctaaaaatctccctttatcatagcggtttttccgccaaaaagcaacacttgctccccattcgcaaaaggtctataatcatgctgtacggcggccgccaaaagcacccgcatggcggcgtcactgcccttgacaggcgccagcccgccttgcgtcgggcgccagcctgcctgcgggcgttcctggccctgtgggcgttttgctcgccgcctgtcccctgctcctgcaccactttatcactttccccaaggaggctcccacatgaaaaccgccatctgttattattcccgccaccatggtaataccctcaaggtcctggaagacatggctgaagccgccgagatcgatctcatcgatgtcaccagccgcatggccgcccgcctgccgcagtatgaccgcatcggcttcgcctccggcatctattactccaaattccacgataccgtggtccattacgccgcccagtacctgcccgagggcaaagaaacctttttcgtctgtacccatggctccactgcctgcccagaaaagtattatgccgccatcaccgaagcagtaaaggccaaaaattgctccattcttggcaccttctcctgccgcggttatgatacctttggcccgtttaagctcatcggcggcatggccaagggccacccggatgcggatgacctgcaaagggcccgtgcctttatccaggccctgtaaaagccgaaaaacaccggcagttcgctccctgtcccgcggagctcgctgccggccttttctttttttatacggcttataccgcgtactgactggtatacagccgataatagaagccctgcttctccagcaggccctcatgggtaccggcctccacaatctgtccgtcattgatgaccaggatcagatcggcatccactatggtggagagccgatgcgcgatgacaaagcaggtgcgtcccctcatcagcttatccatcgccttttgcagcaatatctcggtacgggtatccacattggaggtcgcctcgtccaggatgagcagccgccggttggccagcagcgcccgcgcgatggtcaggagctgcttctgcccgccggaaatattgatggaatcctcgctcaccacagtgtcgtagccctgcggcagcgtgcggataaaatgatcacagtaggcctcatcgcaggcggtgacaatctcctcgcgggtcgcctccggcttgccgtaggccacattatcggccacagtcccgccaaacagccaggtatcctgcagcaccataccgaacagcccccgcacatcctcacggctcacagcggctatatcatggccgtctatcgtgatcttcccgctttggatatcatagaaccgcatcagcaggttcaccagcgtggtcttgcccgcgccggtgggccctacaatggccaccttctgcccatgctttaccttcacagtgaagtcccgaatcagcggcgtttctggatcgtagctgaaattcacattttcaaaatccacatcgccctttatttcctccggcaggtgcccctcgatgggctcctcctccggggcgtcctgcatctcatacacccgtcgggcggcggcgcagatgcgctggatagaccccagcacctcggcgatctgctccagcggcgcggaaaactgccgggagtacagcagcaccgttaccacggcacccacacccagggctccctgtactgttaggtagccgccgatgagagcgaccagaatatacgccaatgcattggcagcggtaatgcacggtgtgatcagtccctgcagaaagattgcctttgcctcggcgtccttctgccgcttgttcgccgcggcgtgcgccgcaatggtggtctcctcgtagttatatgccttcgtggtctggtagctggcgtagctttcctccacaatggagtacatcttgccgctctcctcaaacatgcggcggaaataggtgccgcaggcggcggaaatccgggaagaaatcacgatggatagcggcatcagcagcaggaccgccagtcccatccgccagttttcccgcagcatcatcacagcgatgaccacgatctgcataaagcccattactgtcacatccacaatgttgtggatactgccgcccatattggaaacatcctcttgaatacggtcaatgatctgtcctgccggggtcttatcaataaagctgatgggcagccgggatagtttatccgaaagcttgatgcgcagtgtgcaggtatagtacttactcaccacattgttcatcaggaccatctttccggtgtccacgatactcttcagcaggtacacccccgccagtgctccgcagatcggcagcagcgcttcggtcagaccggctttgggccgttctccggcccatgcatcgtacagcagctggacgccctgacccaggagcttcggggcgatgacggtacacgccaccactataccacccagcagggcgcccagcagcagccagccgtaaatgggccgggcgtcccgcaccagtcggcggaatacctcccaggtgctcatttttacttcctcagtcggtttctttttgcggttcatcggcgctcacctcccgtctgggaaagataaatctcccggtataccttgcagcgctccagcagctcccggtgggtgccgctatccaccagccgcccgccgtccattacaaagatctggtcgctgctcatggcgctggtcactcgctgcgtcaccacgatctgagtcctcccggccgccttttcggccagcgcccgccgcaggttcgcctcggtcataaagtccagcgccgaaaagctgtcgtcaaagagatagatcggcgcgtttttcagcacagcccgggcaatactcacccgctgcttctgcccgccggaaaggttcttgccggcctgctccagccggtggtccagcccctccggctgcgctttgatgtaatccgccatctgggccacagccgcggcttccatcagttcctcctcggaagcgccggggcgccccatggcgatattttcccggatggtgccgctgtaaatgcctgcgcgctgcaatacacagctgatattgtgccggatggtacggcggcttagggtggcggcatcacgcccgtcaaagtagatcttcccctcggtgggcagccggaaggccatcagcagctgcaccagcgtggatttaccgctgccggtcccgccgatgatagctaccttctgtcccgcggcgatatgcagcgaaacatcgcttaccgccgcggcgtcagcaccctcataccgaaaggtcacattctccatgcggatgtccccggcaaaggtgatattgtcatcctcctcggcggtctcggtcatcatgttggcgtccatcacttcaccgatgcggcccgcggccaccttggcatgggggtacatcaccagggcaaaggccgccataacgataccgttcattaccagagccacatactgcaccatggcaaagatatcgccgccggaagcggcggaaatcccgctttgcatccggctgccgccaaagtacaggatcgcgaccgccaccaggttcatcaaggcgatggcaatgggcgccaccaggcccatctttgtattcgcttcaatgatatgctcggccatcacacgggtggcctcagctatgcggccctgttcctgctcctccctgttaaaggcccggataacgcggatgccgtgcagccgctcccgcaccaggtcgttctgcttatcgcagaactggtcgctgattttccacagtggctccaccctgcggccaatagccagcaccagcagcgtaatgatgggcatagccaccaggataatgagcgccagcgtgctgtccttggaaaaggccagcaccaccccgccgaaaaacagcaccggaatggtgatgatgttgctggaaagcatatcggccacccaggccagcgtccccacatcgtgggtggaacgggtaagcagcgccgaggtgccgatgcggctgacctcttcaaaggtcagggcattcacgcggccaaaaaccgccgtgcgcaggtcggcgcagaagccggaaacaacttgggtgcggcaccaggtaccggccgccaccgcccccagcgagagcagcgtgaccagcagcattctgccgcagcagcgcaggatatagtcccaatcggaggtgtagatgccgccgtccaggatatcactcatgatggtgggcagcagcagcgaacagacgctggaaacggcaatcagcagcatgcccagcagcattttccctcggtagggcttaagatatggcaaaattcgtttcataatttctccgtcagtttatgggttccgctctctcccccgatcttgaaaaaaggcgcaaaaaggccgggagcaacagaaactcccggcgagcgaaatagcaccttggttcaggcggacttacagagagagctgctgtgcaggtattcggttgattccagtgcggaacttgttcatcttgttgttgtgcaaaaagtacatttcagcagctcctttctttcatatttggcatcgaaaagagtatagcataccgaaggttcgattgcaagcactttttcccgtccctgcattccggcggcacgcctccgctttgtctcggggcgccgtttgtgccaaaccggtcacccctcgcccgctccgtcgcgccgcctgccttatctttcattccaccaggtaccccacgccaaagcgggtgcggataaactcggaaagcccagcagcctccagctttttacgcaggcggttcacattcacggtcagcgtgttttcatccacaaagctgtcggtctcccacagccgctgcatcagcagctcgcggctcactacctggcccttgcgttccatcaggcacagcaggatgcggtattcatttttggtcaggtcgatggcttttccctcatactgcagggtctggtcggcagtactcagcaccgctccccggcactccggcgccggcagggcagtctccagccgatagctgcgccgcagcatggcctgcaccttggccaccagcacactaccgtcaaagggcttggcgatgaaatcatcgccgcccatgttcatcgccatcacgatgttcatgttgtcagccgccgaggagatgaaaatgatgggcgccgcagtcctctgccgcagctggcagcaccaatagtagccgtcgtagctgggcagcttgatatccagtaggatgagatgaggctgataggtctcgaactccccggtgatgttgcggaaatcctgcacctgccgcgcctccatcctccattgctccagcaggctctggatgccctcggcaatgccgcggtcgtcctccacaatgagtattttgaacatttggcccctcctcgctatgcggtaaatctctcctcccagtatcgcacattccggctaaaaaatccacccgaagatgtttaagatttcttgatttttatggtcacaagcggcattccgggacgctgcccgcagtcgactgcccgacgaaatcagcataacgctgtcccgccgcaaatgccagcaacagctggttgagtggggcagattcaaccatcaattgagcccatgatcgcagagtcacccaaaaagccctctctggccggacagggctctactttgcggcaattggcctaatttacaagagcatttcatatccaacaaattcagacttccagctcgtcctccatcggaggcagctgctcctccgggaacagggcggcagactgctcctccggcaaactggccaccccccgcagcttccgctggatctgccgggtgcggacaccgaccagcttatccagctcgctgctggcctgctccagccgggtttgggtcatggtcagggcatccgcaaatttatcaaactcggtcttaacggcgcccaggatattccaaacttccccgctgcgccgctggatggcaatggtccggaagctcatttgcagagaattgagcagagctgccatagtgctggggccggcaatgttcacccggtattcccgctgcaaagtttccaccataccccggctgaccacctcggcatacagcccctcaaatggcaaaaaaaggatgccgaattcggtggtctcgggcgggcaaaggtacttttcgcggatatccttggcttccatccggacggtaagcagcagctgccgcaccgccgcttgaatcgccgcctggtcaccggaatcataggcgtcccggagggcagcgtagctatccccagggaatttggcatcgatgggaagccaaataaagctgccatcctccgcaggaagtttgacagcgtattccaccacattgcggctgccgggaaccgttgccacatttttgcagtactgctccggagtgagaatgtcctccaggatagcgccaagctgcacttcccccagaattccacgagttttcacattgctgaggacctttttgaggtcgccgacgccctgggccagcgactgcatttcacccagaccgcggtaaacctgctccagccggtcattcaccaggcggaaggattcggtcatgcggtcattgagggttttttgcagcttttcatcgacggtttggcgcatttcgtccaatttggcattgttatcctggcgaatggtggcaagctggcgttccatggacgcacgcacatcctccagcgcgcgcgtggactgctgggagaatgtggatagtctattttcaaactgggtgagatgctccagcagggcccggctttcgctttgcgactgggactgctgggactgcatgaggtacttgccgagggtgagaatatcggcctgcaccgaacgctccagatcgctttgcaggcgctggagctgggtggaaatatcattttggcaggactttttgacctgcgtaagcaggtagatgagcagagcaaggatgaggacggccgcccccaacagcacccagcccatggtttgctgatccataggttttctctcctgaatttggccaaatgcgaactgttgttcttctacgattcccattgtagcacaaatgttcgatgatgtaaagggacgaacaaaagtttgtatgaatgaacgaaaattctaccattttgggggcttgacaatgggcatggtgcatagaaaaagccccccggtgggggggactttttccttgagaaagatcttaatccttgcggagaatgatggcggagccggcgagcgcgagggccgcggcggcgacggcgacagcaacgaggtcattggcgccggtggcggggttcttctggtcatcggtcttgggggtgtccccggtgggggtgtagatgatgatgggggcattgtccctaattacttcaggctgtttacccacagcatttgcctttacggaagtattcgctttaacttcaaatgtgctttgtttttcgctgttgccggacttaacggttacatcctgcttcgtaacaatctcggcattgacattaaaagaggattgcccatcacgctgatcgcccagcaggatatcgccattggtgccgacagtgccagtaaaggtattgttttcaatggttgcatccagagagccattgccgctgttaacgaagcggaccggggctgcaaatgcactccactcacccgtatcaccgcagctggtgaaggtgctgttcttcacggtgacagtctgtttgccatttgctttgtgattgaagtttacgggaacttggccaccgttgaatgtgcagttatcaatgacaaccgtaccgtccgcattagagtagagggcagttgccttggtgagaaagtcgcagtctgttacagtgatgttattgacaccggcagtaccgctgatgtatacacgctgcaaattaacgggggcttttccatcacaattggtgagtttgatattcactgtatggtttgtatgccgctggccccaaacgccgaggttataaaggttggaggctgtgatggtgatatccttgtcgagataaacaccatcattttcgtcctgtacaccagtagcgcggttaaacttaaaggtgtcaacttcgaggtcacattcgccatcggaaatataagcgccgttgccaataatggtaatattatccgcaacatgtccgtgtgtcattttgccgacatcggaaccagggcggcaggtgatggtgatatcaccattattagccatataagcggcctttaaagcatcggccagagtggcggtttgaccagaatcattgcccgcctgccaataaacatttttactttcttcccatttgatttcatcagccatggaaacgaccggcagcatgacggccagcatgaggatggccagcgccaggctaaggagctttttcataagacattacctctttctttttggggtttcccctctttatttccggcaggtgaatcacgcccgcgagtaaatgattcatgtttgcccgcaaacatgaaatcccccatatgggggatgccggtaatgttattttagcaattcaagcgaataaagtcaagaaaacagtggaagttttttcatctttgtaggagttgccaaaagcgaagagggaaatttatgcaaaaaagcagaggcccggtgagggacccctgctgggaaaatcattcctcccgctttttgcgggtggcacggacgatattgagggcgatgatgcccgccacgcacgctccaaggaacatgggcatgatcatggcgctgtacttttcatcggcggtcagcacctcggcccacttgctgtcgatgtaaagggaaagctccgggccgatataggtgtagtagccgcagtgggccagggactcctcatcggggtaggcggtggggtcggtttttgtctcctcatccagcagctcgtacaccttcgtattgggggtggaatagccgatggcctcggtattggcaaggccgacctccggctccagcataaagttgatatacatttccgccagctcccgcttctggctctccttggggatgcacaggcaatcggtgaaaagattgctgccctccacggggatggagaaggcaaggtcggggttgtccgctatcatggtgacggcatcgccgttataatagggcgccatggccgcttccccgccgatcattttatcgaatacctcatcggcgacataagcctgaatgacctttttctgctccttcagcagcaccacggccttatccacctgctcggtgctttcggcattaaggggcagccccaaataggcaaaggtgatgccgaaggcgtccttggagttattgatcatcaggatattatccatataggcttcgctccacagggcgccccagctggccaccaccgcttcgtcctctaccattttggtattgtagatgagccccagcacgccccaggtatagggcaccgaatactcattggtggggtcgtaggactggtaaaggtacttttcatcgatgtttttcaggttggggatattggacatatccagcttttgcagcatcccctcggcgatcatacgagagatcatgtagtcggagggaacgacgatatcatagacggcgccgccggttttcagcttggcgtacatcgattcattggtatcgtaattggaatagatgacccggatgccggtgacctcctcaaaggccttgttgacatccagcccgccatcggcaccgtcggagatatactcgccgcaattgtaaacgctgatggaatagcccttatccctgtagcggccgtagtactccatatctagagctgaggtatcaatgccggtttccgctgccaaagcggtaacgggaagcagaaggacaaccatcatcagcgccaaaaggagggaaaggatacgctttttcatgccgcaggttcctcctttcgcatcatctgcttttccttgcgggcagagtaatagttgctgagaagcagcagcgccagcaccaccacaaaaatgatggcggtaagggcattgatctccgggctgacacgcttgcggaccatcgagaagatggtgacgggcagagtctgcgaggaggcgctggacacaaagtagctgatgacgaagtcatccagcgagtaggtgaacgccatgaggaagccggataccatgccgggcatgatctccgggatgacgaccttatagaaggccagcttggggctgcagcccagatcctgcgcagcctcgaaggtgaagcgatccatctgacggagcttcgggaggacattgaggatgacatagggcgtgcagaaggtgacatgcgcgatgatgagcgtcacgaagccgagctgcatttccggcagctgaaggaacgaaagtgcggtgccgccgatccagttattgaacttctggatgccattgccgaaggaaacgaacaaaagcagcatagaaacaccggtaacgatctcaggattgagaatgggcagataggtgatgttcatcaccagtgatttgaaccacttacggcgcatggcatagatgccgaccgccgccatggtgcccagcaccagcgcgatgacagacgccgccagcgcgatgatcaaggtattgcgcagcgaggagaggatcagctcattgtggaacagctccttgtaccaatggaaggagaagccggtccagctggcgcgggatttggattcattgaagctgaacgcaatgagcacgatgatgggcagatacaggaagatgaataccagacgggtataaagcttggcataccatttcatatgagcatccctcctctgtcatcattgtcctcaaactggttcatgaggctcataacaagcaggatgaataccatcaataccagcgagatggcggagccgagattgggattgtaggcattgccgaggaactgggtctcgatgaggtcaccgaccatcatattggagccgccgcccagcatacgggaaatgatgaaggtggaaacagacggcacgaataccatggtgatgccggtggtgataccgggcaccgaaaggggcagcaccacacgggtaaaggtattccacgggttggcgccgaggtccccggcagcttccagcgtgtagggttcgatcttggtcatgatggaatagagcggaatgaccataaagggcaggtaattatacaccatgcccagcaccacggcaccctgggtgtagatcatcttgaaggggccgatgccgaagaactccaggatgctattgatgacgccgttattttccagcagggtcatccaagcgtaggtgcgcagcaggaagttggtccacatcggcagcatgaccagcataaccagcgtgcgctgattattggcattgtagcggctcatgataaagccgagaggataggcgatgacaaggcagatggcagtggccaccagcgaaagccagatggaacggacaaatacggcggtgtaatccgagaccttggcgacattggcgaaggtgaactggccatcactggtggaaaggccgaacaccgccaccagaatgagcggtacgacgacaaaaatcaccgaccaaacaatataggggacggaagaaaagcgaaatttcatggctttattcctccgtgcgcttcatgatatgaatatccataggcgcgaca

SEQ ID NO: 236 - DNA, 17794 bp, Unknown
  16S sequences of unknown bacteria
gcgctaccataacatttttaccaagcttctgcataccatctgccagacctaccgttgtggtcgtctttccttctcctgccggagttgggttgatcgccgttacgagaaccagctttccgtttggcttatcagattcatttaaaagattgtagtcaatttttgctttataattaccatactgctccagatacttcggctcaatgcctgccttcttcgcgatctctgtaatcggaagcatctccgtctcctgtgcaatctcaatgtctgttttgaatcccattgtcttgttctcctttcattccacctgtgttttaccggaatcttgtgtcagttttttatgtcgtccggcctttttttgtggattttcacaagaacctctctgcgtcagccgcattttttgcaataaaaaaactgcgcaaaaaggacataccgaaaatccatcttaacgcagtagcggaagcgataccgtaacgcgaagctgctgctccttcgttcacactaatgaccttcccgtcatgtgacacttaacgcaccgtatctactctactttcatagaaatatatgtcaaagcacgaagctgaaatctcaccgtccgcgatgctataccgcaccgttgcgataaaaaaagacaacattccaaattcaatgctgtccagacggccgactccttataattttgattacactgtggtgctccactctcatccgtcagcaatcaaaaccttcatatctttgaactgcagtcattataacagaccagaccggattcgtcaagggcttttgtcaattttttatcaaaacagggtctggtttttgtgtaattgtgtgagttccggtatggtttcgtaaaagttctcgtatatattgcaaacataccggaaaacaaacaaaaatcaccaatttctttccgttcataccattggtctgccggacagctgatccacaattttcttcacatcgtattccagtgcaaacgcttccgcaatcccgtataacctgttttacaaatgcaggggctctttcatctactgcccgcttacactttcatctatccatttctgaatttccggcacactgagcttgaccgcctttgcgattttttcaactgaaagccccatctctgtaagtgagaggactgtttctctttttccctgttctatgcctttttcgatcccctttttgattcctttttcgatgccattctcaataccttcactataaatctgctccatctcgtgacacataaattctacccccttctgtgtttctttcagctcatatacccggtctgccagaatgttgctgtacatatcgcctgcatttttacaatgtaagtcatgcatgagtcttcccaattctgtatcatcctgcctctttgcatttacataaataatatgcgcctcatccataaaattctctctgacttcttttattgtccggtctatatgataaatcggaagcccataaccaagtgcgtcatctctcgtaataaaaatcacataactctccggcagttcattaaaatcctgtcccggatttaagatattcatgtccatcaatccactgtggtacctcgcccgttttggatatgcaccctcgttctcctgctggatttccacattcatctgccgaccttcggaatctctggacacgcaatccagaatcgctgatcgcccctgcaaatttttgtaatccttctgcaagacctgatcaatcactttaaggtcctttttgtccataaccacctgaaggacatattccgtacattcacgctttttaaatacatttctcataaacatatcgctcatgattgtaaggtcttttaaaatacctctgtacctttcatagcgttcttccagtccttctggcgctctcttttgtttttttgccatattgcttcccgcatctgctctcccgaaacaatctccgcagaacttattatcctgttttcagtttatcagcaaaccatctgttttacaagtcccaaagcagctatttccagaaaacagaagagggtgtgaaaaacaactctgcgcttttcacaccctcttctgtttatgactccatcccagacaaaatccttatactgccggcttccagatgcgctggctgtacttgccaagtacggctgccagaatacatccgaagatctcacaggaaattacctctccgattccgacggtcagcatcatgagcgggatcggaagcattacgccgtatgcatagcgcagtacgaacggtacaatgcagatattcgccactaccggcgggagcgctgcgatccagtgcttctgatctcttagcttccaggtacataccgctccgatcagtgtcgcaaggctgccgaaaatgatatccggaagcactgcgcctcctaaaatatttccgatcaggcagccgacgaacagccccggtatcgctgccggtgtaaaaatcggcaggatcgtgagcatctcagagacgcgcacctgcacctctccgaagctgaacggtgcaaacaccaccgtcagtacgacgtaaattgctgcaatcattgctgactgcgtcaggaaggtaacattctttctttccatattctgttttctcctttagctttgttttacgagtggaaggtcacgaacactcggcacatttataggcggtgaccgccttgcagaccctgtacgaccttgtttttatgggctgcaacgggtgaaagtatagcacagcgctttataaaaatcaagtgatattcgcaatccactgcttattgctctgcacaatggaagcatgggcacttggttcacagcgctttacaaatttttcctgtacgataagaagcggagtcagcgtttctttctgcggatggaaaaaaaggcaaatggaatcgtaacaatccagagcattacaatcatcgtatcttcaccggcgtgaaaaagcttcatcgaaagatcaaaaaaatgataaacccatgcaaatccaaataaatttccaaatccttctgcaaagcacttcagcgtcacacatattccgcgcaatatcttattttctatccgatagatcgcataattgcagccgatgatcgcagcaatcacaactataaggatcaaaaatccgcctgagtcatatgcattgtctccctgtaaaagtatcgaaagcgccccgaccagcggcacaagcggccagatatacccgacctttgtcggatgccaccgtttatcctccggcccggaagctgcttcttttcgttcctccggcgccacctgcgctttttgctggttccggaaggctgccgtcgcgcccattgtcttatccagtgaggcatctttcgcctctgactgtccggcacgcggcattggttgcccgatcgtcgcgttggtatcgtgccatgcgtttgtctcggtgtggtgatatgccgatgcagtcgtcgccgccgtctcctgccactgattcgtgataccggaattgctctgtccagctgagtgcgtagtctccgagtgcatcgtctcctgaatgctgtctacttctctgaatccttctgcactccggtagctgcccggcgcatgttcttccgagagtgcctccagcgcctgatacatctcgccggcagaaggataccggtcctttgcgtcatatgcacacgctttcaaaacgatcgccttcagtccttcacttccatcccgcggcggcggaagtggctcgccattgtagcggcgcaccatcgcttctgatactttcgtaccatttaatatctcgtcggcacgcagcagcggcattcggcggttgttcagtagccagtacaaagtgataccgagcgagtagatgtccgcctcttttccgtacttctgcatgtgctctacttccggcgctgcatagccgtgcgttcccatctttgtcgcgttcgtcgtgtgatcctgcacccgcgccacaccaaagtcgcccagcttgaaatcgccaaagcgcgagatcatgatattgtccggcttgatgtcccggtgaatgatattccgctcctcacacaggatcagcgcccggcagatgtcttttccgagacggatcacctgctcctcagagagcatttccttcttcaccgcctttggaagcggcgtcagaagctccatccggataaaaatgctgccgccgatcccatcttcacgcggcacgactgcaaagtcgtcgcagctcacgatgttcgactgtccctgcagctcccgcatcatctgatattccttcacgtagcgctgcagctcatccgtgtatgtcgccaccatgctctctgcatcatagccattgtcatagtatgcctcgatctcctgatcatccgccgggcgtgaaataattttcagcgccgcctcttcctgaagtccggacaccgttcgctcgatctgatagacctttccatagcctccgccgccaaggtatgccgtgatcgtccagtccggccatggcagctgaatattctcccagttttccattttctctttcctctcagttccttttctgcagacagatattcacatgttatcttccgtattgattctgtggtgtactgattacagtctaattctaacatcttttatttgaaatcacaagcaaaccggcaagcctgcttatataagtatcagatccgcatcttcccacgcgccgtcgccgccagcacagcaaatacttcacgcagtacataatgcggctgcatgagcgcatcggacgcggacgggatgccgcagacgtcctcgtagccctgccgtcttgccatctgcacggcccggtaaatatgaaagtcattcgacaaaatcccgactctctctgtatgcagtgactgaagttcattgcaaaacttcagattctcccacgtcgtcgtcgagcggtcttccatgcgcagacgctttgcatcgactccggcttcgatcagatactcctgcatcgcttctgcctctgtgatatcctcgccgtctccctgaccgcccgacagaaaaaataccgtatccggattttctttcgcatactctgccgcacagtccagccgcttccggagtgctttcgacaccttcgtcccccgtacctgtgcgccgagcacgatcacatatggaaggttctgctccggcttctgccgcattccggcaaagatatgtgccccgatgaatccgacgaccagaattccgatcgccatcagaatccccgccgcgcgcagcagattagccagcactgccatgtgatgacgcgattctgcgaccatgcctcccgcaatcgccagaaggaaggccgcgcccaccagccatatccacgcaaagtctgcagtgatccctgcatagccgacaatgccaatataatagaagatacagatcagccccagtacgaggcatactgcctctgtgctatgccaaatgctcattgctctttttcctctcatctctgattttccacttgattctggacaaagcagatattcgcaatccgcttcgctacttgctcattaaccgaatagctgcttcgcagcttatcaggagtgacttgtaccactcctgatacaagcaagtcccaacccactgcttattgctttgcgcaattgaagcaggggacttgcttgattcggttaaaaaaaggatgacaggtcaccccaccatccttttcactttcgatattgatcttatcttccacagcaatatttatacttcttaccgcttccgcacggacatggatcgtttctgccgaccttcttgccctttactacagtattcatcttctttgcagccagatacagcgcacgcttcttctctgcatcaaagatcttgttccatgccggcagctcgtacagccagtctgcctttgcatctaccatgtttttgtaaagcagctcattgtcaaagtccaggctgacctcggtatcctcggtcatctcctcgatcggattcggcttctttaagctgtcattgatgccatccagaaatccggtcattgtcagcaccgggatgttgtacttctctgccagctccttgactgtaccggtaactgcctcttccggattctcaagcagctgctcgtagattcctttctcggtcagaaaatactcggaccagaacttctgaagctgttttctatctgtctcctgtgaatacgcgatatcgcgccactcctgtaataatgccatagtaataccatcctttgtttcataataaatagttctgaaaaatactttttctattatataacactttgcccgttgtggcaaggacataacaggtgaaattgcaaaatcccggctctccggaatcttcgacggatccggatattcctttcgccagtcgtccggaatgcaaaaggccagataatacaagatcaggccacgattccatgttccgcaaaaaatgctgcctctttgcaaaaatcactgcccttcccattgtagccgtggctcaggatcaccgccggaaacggacctgttccatctggtatataagccgtcgcaaaaatccggtcatcacgtacccgaacgctgtgcacttcggtacgatacatctgcttttccttcctatctggatctgccttccggattcggatcagtacctgattttccccgcatccctcaatacttcctgtcaggcacgtctcttccagccaggaaagtgcctcactgtctgtatagatccgtggagaagtccggagtccatctgacgtctcttctccgttgtttcaatgaaattaatgcgttacagatacgttacggtttctgccagctcttttctgctgctatgattcggaagcgcttctgttccttctgccgcaattccaagatccagcagcatcagaatttcctcttcttccggaagatcaagcgcctgtgccagttcctccggatcaaaaaagttaatccagcagctgtccacgcctgcattataggcagccaacatcatgtgcgttgccacaatactggcatcctcaattccggaatctcttttcccgcccggataggtaaacacgttgtttttattataggctaccactaaaaccattggtgcatgataacggcagggtgttactttatcaatcgccgccaggcctttttctgactgcactacataaatatgctgttcctgaagatttttcgcggtaggagcgaggcgccctgcctccagaatctgatccagtttctctttttctacttctttatcactaaattttttgcaggaataccggttcttgattacttctgaaaattccattctgaatcatcctttctacattcattctatgatatgatatttttagtctcaacatgttcctgctattctgccaaaacacctttgtacaccaaaaacattatacaccgaaaagcctctgactggtaggctttatccctgtttttccggctatgttaaaaaaagaaacttttgtttttgcgtatattccccgggaatccggctatactaagagtaatctcacaggaaaaaagcaacacggacgtgacattttcttatgagattgcgtatgttcttatcattggatcccctccgatgataaatacaaaagataaaaatatatacttatcctcccctttgtaagaggctgccgcttgctcacctgtgttggatgattttgcgacagcctcttttccgcttccctctacatctgcttacgcacaacaaggtactcatccccattgcgataatacggacaactgtagtgatcatctgacatcagccggacatattcatcctcgtccatatcgatgtcgcatacatagcactcataatcctcatcgtaagtaaaataggtacaggtctcacagccaccctgcttctttttcataccttttcatcctttctcttcgctttcccgggttttgcagtgcgcaccacagctttggcagccaatgccttacttctgaaaatcgctgacattctccctggtgactttctgatacggcagccggatatagcggtcattttccagaccgacctcatccagcccctcatccgtcgccagtgcaaaggcaaggttcagcatcccgtctgcctgtccttccttgtcattataaacagtagcgaccatttcgcccttttctaccgcctcaagccccggatccgttccatcgatcccaacaaccgccggccattcgtctcttgacagccctgacgcctttaaggcatcgatcgcaccgagcgccatatcgtcattgtttgccaaaatcagctccatctgtcccgggtactgtgccagcagcgaagccacctttgtctgtgcctgtgcccggttccagttggcaatcgcataaccgagcttttctacctgcacaccggactcgatgagcatatttaccgaacattctgtacgcacgatcgcatcctgatgtccagcctctccctccagtacaacatactggcagatgccatcctggttcttatccatggtcgcatccgtcagaaatgcatccgcggcaagcgccccctccagccttccggagtcaaacgcatcagcacccacataatacagctttgaccagcgttccagatcctctgccaccagctcccggttaaaaaagatgatcggaatattatttttctctgccatatctgtgatcgtcgtcggttccgtccggtcaaccagatttacacagatcacatcacaccctttttccatcagcgtccggacctgttcgttctgcgtcgtctgatttccggatgcatccaggatctccagactgatcgccacgcccttttccgattccattttcagtgtggtgctcttaaatgtctgcatcagctccgatataaacgtatcatactggtcgtacaaggtcacgccgatcttaatacttttcacagagtcctctttcccggaaccgcatcctgtcagaagcaggattccggccatcagtgccagccctgtttttcttatgtgtctcacattcatcccccatttaatgcacaaccggaaacagaatcttttctgcctccttatcgtacatcttttcctttgtcaccgaaatgaatccggtctctatctgcgtcgtactgctctctgtatgctccagctgcttctggatcagctgtgcactctcatagcccatcgcgtattcgtccggcacgaccatgccctgaatgtgccctctgtccagataataaactgcccgttctgagcgtccttctccgtaaaggctgcaatccggcgtctgcccgccctctgtcagccaatccagtgccatctccatcgcatcactgtccagtgccgctaagatatccggcgtcgctttcatctcctcttgaaactgcttatctgtctctgcacaaaaacggatttctcttcctgcctcttttatctttttacaaaatccttccagtctctttcttcccgccagtgtctgctgatttccggtcagcactccgatcgtttttcctgcagttttcttctcatccaagatcatctgggcgatggcttctccgatcgccttggcatccggctgcacgagcgcgtgtcccccctccagatccagatcggaatcaatgagtacgacacggtcttccgatacgagttctgaaagtcttccgcccagatccgaagtatcacagagcgccacaataacgccatctgcaccattttccaactcacgtccgataatgccatactcttcttcaactctggaaaacgcaggagcagacacaacattcagatacagtccggcctcatccgctccctgattcagaccttccttaaatgcattccaccggtcactgccgctgttgctgacaatcacagaaacaacataatgtgtatctttcttttcactgttcagcaaaccataggatgcatagatgaccactgtgacaatcagcgctgtcacaaatccaaggtacagccgatctctgttcatacgctccggcctccttttccgtccggaagttttccttcctccagctgtcgacatgtctcctccgtgtatggaatatatgggatatggattcgcactgtcatcccctcatccggaaaagattcaatctgcaatccatactgttctccaaagcgaagccgaatccggttatgtacattcagcagtcctactccgcttccccggctgcgcacccgctctccttccgtcagaagctttgccgccgcctcctccggcataccaagcccattatcgcttatctccagaaagacatccccgtctttttgatagccgcgcacagaaataatgccgtcatcgtccatcgcttccatgccatagtagatcgcattttccagaatcggctgcacgaccagcttcacagtacaggcggaaaggatctccggcgcaatatcaaacgatatctcaaacgcatttttatagcggatcttctggatattcatgtagttttccgcatgcttaatctcatcttcgacccggataatcgtcttccccctgcttaaactgattcgaaacaggctagcaagctgtgtaatcataaataccgcatcatcataccgctcgcccgtaatcatccatacaatcgagtccagagtattgtacagaaaatgcggattaatctgtgattgcagcgcatccagctcactctttcgcttctcttcctgcttcactacaatatcctgcatcagctcctgaatctgcttcatcgtcgagcgcagggtccgcccgagatgctcgacctcaagagaacctcccacataaatatcaggctcctgattccctgcctcccattcccgcacggaatcatttaaccgtcgcagcggcttggatatccgcgccgagacaaactgattgagaatgaccgttgccaaaagcgcaagtgacacaagcatgatgaccagatatctcgtactgtccttccccatcccaaatgattccagcggaacgacactgacaagcttccatccggtgtagctgattgttttctgtgtaacaatccgctgctttcctccaaacatctccttccagctctcatctgacgcatgcactgcctcctgattgttttcctgaaaccgccccatccggatcagttcctgcttcggatgataaatgatctctccattcggatccatcagataaacatactcagaggaaaccgacgctgtatttgccttgtctaaaatacgttcgatgctgctataattcatatcgaccagcagcacaccgagcgtcgatctacctccgtaggtcaggtcaaccgtgcggcttaaggatacgacccagtaataccgatatgtcagatcatcaaacagattctgtacatgcggtgtcgaaaaatgaaaattttccagttgattcttcgcgtcgacaaaccagtcctgcaatgcgactgtcacatctcttttctcatttgcgaccggcgtcgcctccaccagcccgccatcgtatgtatagcaggcgatgctgaccagattgtccttgttggcctcatacagcagggtcatttcctcatccataccctcctgttccaggtctttgtctttaatgacactgtaatacatcgcatcggagatccggcgcatgctgcgcagataatcctccagattgattgctgtctgttccagcagctggcgggagttttcccgcatcagtgtctcctctttcttggaaaactgcttgtaaagcaggacacccagaaaacacagacagcatacagaaacgaccgtaaatgaaagggcgatcgtcatctgtatgcttctcgagccgacgtatgttccggaatgcaccgttatttttctgatccattttctgattttatccacgctcttttaatttctccactctgtattttgacggtgatactccatactgcttcttaaacgcatagctgaagtaattcggatcggaataaccggtcttttctgcaatcatataggttttatcatcggttgtcaacaaaagctctactgcccgttccatcctgtaatccgtcagataaccgataaaggttttcccggtttcttttttaaatacggtggaaaaataagcggagctgacacccagcgtccgacagaccgtctcgatagaaatatttttatctccatatgaggtctgtacataatcaactgcctttgccacaaaggattttgtcgtattggcacgttcctgccggatataatcctgaatctttccacaggccaaaagcagccagtcccagaattcctccggcgattctgcctgaaagccacagtcgatcagcgcttctgccgagccgaaaatcttctccatcggaatctgattattgcttccgaaccggaaaagctccgcggcaagctccagaataaatatccgatatttctgaatcgagattcccggcctggaaaaccagtcacggcatgtccaaatctgccgctttagcgtctcccgatcccccatacgaatttcttttaacaggctctggatcgcatcctgctctgccgaaagctccacattctctcccgggtcaatctctgcgatattgatcgcccttgtattaccataaatagcccggtaggagactgcattctccgctccctgataggatatatgcagatctgacagccgactgcagatctgaccgatcccggctgttaccttcgcctcgcaaatacgctttgcgtgagtacaaaatgcattcagcacatctgtataccgtgtgatttctgctgcatccggaagctgtgagatcactgcaatctcccccagatacaccaggattttactgtcatactgctctcgcaactgctcctccgcaagctttttgaccgaaacagccatcagaaatggcgatattccatccggaagctgtgaccggctgatatgaaggactgtgattacataaaaaggagcctccaagtgaatctgatagctctccagatacctctcgatctcatccggctgcacccttccttcgatcagcgaggtataaaagctttcctgcaaaagtggcagactctccagataatattgattcagtttatcaatgttccgctgctcatccggctcgtgatcgagcatttcccggatccgtgaaaatacccgtcccagctcctcggcattgaccggcttgagcagatactgctctacctcaatgtcgatcgcttcctttgcatattcaaattcatcaaacccggaaaagatgatgatttttatattcgggtattgttccttgagcttccggctcatggcaagcccatccatatacggcatcttgatatccgtcaggacaacatccggaacacattcctctgccatctccagtgcctccaccccattatgggcatagccactgacctggaatcccatactctcccaatcaatttttttcatgatgacctgaattacatcttcctcatcatccaccagtaaaactgaataccgctgcattatgctccgtacctttcatccatctttttccacaaaataccaaacacaataatccacacgacgatctgtacgaccgctgcaatcacctgaaaatagagcaacactgtcataatcagcgagccagccgccagaaacagcataagcttgcccgcctcctttgcatagcgctcctcatcttttaattttccaggctgatcttttccccgaatcgcagaaatgtcatgcagcaccagaagccgcaccccataataggccagagtaatcatcatcaaaatcggaatcatggccattgaccagtagccttcctgcattttctcccctccgttcttctctgacaaatggggctgtcacatcgttgccaaagcaagtccggtgcggcagcccctccattgattttacctgtttttttactttctcgctacatattttctgatatccagagaaattgcaacaaagatgatgactccgagtgcgatccactgtgcgttcgcgttgacaccaaggaactgcagtgctgtctttaaaagctcaaaaactgctacaccgatgattgcagaggatacctttcctcgtccacccgatacggatacaccaccgattgtgcaggctgcgatcgcctccatctcgtatccaagtcccaggttgacggatgcaccgccggactttgcaccgagcataaagcctgccaggccatacatcgccgctgcctttgcgtaaatgataattaaggtcttctttaccggaacacctgctacttccgctgcctgcgggttgccgccgattgcatacatgtattttccatgacgggtcatgttgaaaataaaccatgtgattgccgctacgagaatcgcgatccagatcagataattgattccgaggaattttccggtcgcaatgtctgtatactgcttcgtatatccgccaagcggagtcgcattggtatagatcaggttaattccatatacgacttccatcattgccattgtggaaataaatggcggtacatgcatgtaagcgataaagaatccggtcacacagccaaatactgcgcagatcaccatgacaatcagcagtgccacaaaaatattcatcggctccatattcgggaagaatttcttcgaataatccatcttctgcagcagcgtacctgcaatacagccgccaaaaccgatcatacgtcctgcggaaagatcgcagcctgcggtgatgatacagcctgcaataccgagtgcaatgacgatacgggagctcatattcatcagaatgttgttaaggttattaccggacaggaaattttttgatgtaaagcccgtgtagataacaagcagaatcatgataatgatgacaccataattcaccatgatgtccttaaagctcagttttttctttcccatgtttttctcctcctatcagaactgcgttgcgtagctcattactttcgcctgggtcatttcttctttttcggtaatctcgccgcgaagctttccgtcgcacatgacataaacgcggtctgacataccaagcagctctgccatttcagaagaaatcataatgattgccttgccctgtgccgccaggtcattcataatctcataaatctcatgttttgcacctacgtcaattccgcgcgtcggctcatccatgatcagaatatccggatcgtttgccagccatctcgccacgataaccttctgctgatttcctccggaaaggttcgcgatatgctccttcatgcttggcgtcttgatacggagctttttaatgctgtcatccacaactccgttaatgcgcttgtgatccagcataaatccggctttcagatatttattatagacagatacaccgacattgtccttgatcgagaggcagccgaaaataccatttccgcgccggtcctctgtgatcagtccgattcccgccttcatggcgtcagacggctttttgatctttaccagtgttccgttaattttaatttcaccggattcaattccacgaatgccaaagattccttcaagcagctccgttctctgtgcaccgaccagtccaccaaatccgagaatctctccctttcttaaattaaaggagacatgctggaacgaattttcatggatcgagcagaggtcatttacttccaaaatcacgtctcccggctcatttttccgctcaggatatacattcgtcagctcacgtcctaccatcttcgcaatgatctgatctgttgtaagctcggatgccggccaggtgccgacataggtgccgtcacgcatgattgtgatatcatcagcgatacgcttgatctcatccatcttatgggagatgtagaccattgcaacgcctttatcccgcaggtcattcataatccgaaacaatgcctctacctcgttgtctgacagtgaggaagtcggctcatcaaaaataacaaccttcgcctgatgggatactgcctttgcgatctctacagactgcatctgaccgatcgacagatctcccagcattgccttcggatcaaaatccatctttacctcatgaagccagtatgcagtatcttcatacatttttttatgatcgatcatctggatcggtccaatttttttcaccgggaagcgtcccagaaacaggttctctgccacgcttcttgccggaaccggctgcagctcctgatgcaccattgcgataccaagcttcatcgcctcatccggattgtctacctggatcttctgtccattcatatatatttctccggcatccatcttgtagataccgaacagacatttcatcaatgtcgattttcccgctccgttttcccccatcagcgcatgtaccgtcccgggtctgagtgccagctgcacattatccagcgcttttactcccgggaatgatttacatacgcctttcaattccagtaaatattcggacattttcctcctcctctttttccggccatccctctttggttctgccgtcttcgtggtgtgccattcctgaaggttccgacagaactcccagaaaaaggaggtgcggtctcacaccagccgcacctcctgtatgatcatttctacagaaagttcacgcagtgcgctttctgttttatcctcctgcctgctacgttgtgccgcaagacggattattttaccatgtcaagaacatcctgtgcattgtcctttgttacttttacatagtcacatccgatgtagtgctcgttgccttcgccggtcagatatctgactgctgcatctgctgcactatgagactgtgagaagtgatcattgaataccgtaccagtcattgtgcctgcaagtacatcctcaagtgcctcggaaagtgcgtcaacgcctaccagataaatgtcctcgcctacggtgcggcctgctgcctcgatagactgcagtgcgccaagtgccattgcatcgttgttgcagaatacaacctctacatcgttaccgtactggctaagagagtttgctacgagctgctgagctgttgcctgatcccagtttcctacctgatcatcgagctcatttacctcaagtcctgcatcttccagagcctttacagagaactcggtacgatactgtgcgtctacgttctccggatcgccctcgatcatgatataatcaaccttgccgtttccgttcttatcaattgcatccagtcccagatcagcgatcagctcgccctggaatgtaccggactgacgtgcgtcacatccaacataagtaacgttccaattgttctcttcccaccttgcttcctcatctgcatccggctcacggttgatataaacgagcggaatgcctgcatctacaaccttatctgtgatcgtagctgcggaagaagagttaaccgggttgataatcagtacatctaccttatctgcgatgaagctgtcgatctgtccggactgagtcgcctgatcgtttacgccatctacgatggtgatgttatccttggagaatccaagccctaccagatagttctccagctcggtgcggaacagtgtcatgaagttatcagagaactgataaatgcaaacgccgacctttttgtctgaaagatctacatctgtagctgcagctgctgcttccgttgctgcttctgttgcttcctctgccattaccggaacggctgccaccatcgtgcctgccatcactgctgctaaaaacatgctgacaaatctctttttcattgtaaaaccctccctgttttgtataagctctattggctttcttttgttgctgttgaggaaattatagcacagacagatgaaatatctatacaaaatacttctgtttttctgtaatatccttcttgttttatataatttttctcagaatcttcctgatatctttatatgcattcagcatcttatccgttttctattcattttccgttatatctgccgtcattttatactcctgtttgtttttcgtaaataaagcggacattcgcaatccatccctgcagctctgctgacagggcctagcttcg

SEQ ID NO: 237 - DNA, 4225 bp, Unknown
  16S sequences of unknown bacteria
tgatgcccctcccctccctttcttgctcccctctttattcagttctcagggtatatccagaaccccccgccgcttttcgcggcggggggtttctcgtataccttagcctggatggcggtaacattcgattctctgcgaaaggatgcgaacttgtatgcctgcaaacgcaaaacgtccgaatttggttttgattatgaccgacgaaatgcggggggactgcctgggggcggcgggccatcccgatgtcaagaccccttttttggacacgctggccgcccagggaattcggttctcccgcgcctatagcacttgcccgagctgcattgccgccagggcggctctccacaccggcctgtctcaagagcatcacggccgggtagggtatcgggacggggtaccgtgggattacccggtgaccatggccggcgaactggcgaaagcgggctatgccaccgcgtgcgcggggaagatgcatgtctatccccttcgccgttctatgggttttcaccacatcgacctgcacgacggctacttgcacgcccaccgcaagcccaatatcccgcatcatgagcatcaaatggtagcggacgattatctctattggctgaaaaatgagaagggcatcgcctgtgatattaccgataccggcttggaatgcaattcctgggtcacccgtccctggatgtacgacgagcatctgcatcccaccaattgggcaactggccgagcgctggattttcttcgccgccgggacagggatcagccctttttcctgatgctgtcctatgtccgcccccatgccccctatgatccgcccgcctgctattacgacatgtataagaacaaggcgctagccccccctttttccggggactgggacgacttggagcgcctgcggcgggagggacgggtgttttgcaacaccaccggccccctggatccggagcttatccggcagcagcaggccggctattatgcctgcatcacccacgtggatcaccagatcggccggtttttacaggggctgatggatgaggagctctacgacaacaccgtcgtggtgtttacctccgatcatggggagctgctgtccgatcatggcctgtgccgcaaatcccgcccctatgagggcagcgcgcatattcctctgctgctctgggggccggaggcggtgatcggcccgggggggcgggtcagcgatcgcttggctgaactccgggatatcatgcccactctgctggacgccgcgggcgtcccgattccctcctccctggacggcgaaagcctgctccagcctggtaagggccgcgccttccttcatggggagcacaccgctggcccggattccactcattggattgtcactgcccgggataaatacatctggttcagccagacaggaaaggagcagtattttgaccttcaggccgatccgcaggaacggcacaacgccgtggacgacattccctgccgggaacgggtggagaaattgcgcgcccggctgatagaggccctgaccggccgggaagagggctttaccgacggtcgccgtctgattcccggtcgccctaccgtggaagtcctggggcaaaggctatagtgcggcgaatatctcgccgatggagccctgtatcaccagggatgcccgccgatcggccggggtgggctcccggttgataatgaccagatcccgcccctgaaaatatcggataagcccggcggcggggtagacattcagtgaggtccccccgatgagaagcagatccgcctgctggatatggcacacggccctgtccagcaccgcctcgtccagcggttcctcatacagcaccacatccggcttgataatccccccgcaggagcagcggggaaccccttcgcttgccaatatatccgccaaggcatacgccctgccgcagcgtacgcagtgattgcgatggacagagccgtgcagttctaggacttcttgggcgggggcgtggaggccgtctatgttttgggttatgatcgcttttagcttccctttggcttctaattgggcgagcttttggtgggcggcgtttggtttggcggtgggatggatcatcttcttgcggtaaaaatcgaagaagatttcgggatgcttttcaaaaaagctgtggctcagaatcgtctcgggcgggtaggcgccaggctgattgtagaggccggagggggtgcggaagtcgggaatgccgctctcggtcgagacaccggcgccgccgaagaagaccatataccggctgcggtctattgcttcccgcaacgcctttatcgatgcgttttcttccatttttctgtcctttccgggcgagtttgcccttggtttgtggcttccatttgcgcattttttcgtacggaaccgatcggtgcttcgaagaaaaagcgattgcgtctcattttttgagacgcaatcgctttttttcaaacgctgaaaaggatgtcgccgtaggtggggaagggccagcatttcttggcggtcagagtttccagctcgtcggccacggcgcgggtctcctgcatggccacgagcacccgatctttataatacatggcacagtcctccatatccggatgctccttgacccccatgagggccgcgttcaagtcgccggtcttcttatacaggctggcggacagggcggacaggcgggcggccagggaagtttccacctcgctgctgatgcccgcgtccagcgaccgcttcgtcagggcggcgtcgcacagttccttgatgtagccggtgacggcggggaggatctccttattcaccatgtccagcatggtcagcgcctcgatattcagcaccttgcagtagttttccagatgaatttcgtaccgggcgtgcatctcagtttctgtgaacacccggtgcttggtgaacaggccgacgtttttacgatccagatagtggggaacgcagtcgggggtggtcttaaagttatacagcccgcgcttctccgcctcggccagccattcgtcgttatagccgttgccgttgaagatgatccgtttgtgatcctggacggtggttttaatcaggcgggtcagggcggcgttgaaatcgtcggccacctccagcatgtcggcaaattggcacagctcctcggccacggcggtgttcaaaatgacgttggggccggaaatggactgggcggatcccagcatccggaattcgaatttattgccggtgaaggcgaagggggaggtgcggttccggtcggtgctgtccttggggatgcggggcatggtgtgcaccccgattttcatctccacccgttccgggccgtcgtaatcggcgtcgttttcgatggcctccagcacgtcggtcagctcgtcgcccaagaacatggagaccacggcgggcggcgcctcggcggcgcccaggcggtgatcgttgccagcgctggccaccgagatgcgcagcatatcctgatactcgtccacggccttgatgacggcgcagaggaacagcaggaactgggcgttctcgtgaggagactggcccggttccaggagattcaggccggtgttggtggacatggaccagttgttgtgcttgccgctgccgttgacgccggcgaagggcttctcatgcagcaggcagtacatgccgtggcgatcggccaccttcttcatgatctccatggtcagctggttctggtcggcggcgatgttggtggtgcagaaaacgggggccagctcatgctgggccggggccacctcgttgtgcttggttttggccaggatgcccagcttccacagctcctcgtccagctccttcatgaaagcggcaacacgggggcggaaggtgccgaaatagtgatcgtccagctcctgccccttggggggacgggcgccgaacagagtgcggccggtatagagcagatccttgcgctgatcgtacaccttgcggtcgatgagaaaatattcctgctccgcgcccacggtagtcttgacattggtgacctcggtgtggccgaacaggcggaggatgcgcatggcctgccggttgatagcctccatagagcggaggaggggggtctttttatccagcgcctgaccgccgaaagagcagaaggcggtggggatgcacagggtgccgtccttgataaaggcgtaggaggtggggtcccaggcggtatagcccctggcctcgaaggtggcccgcaggccgccggaggggaagctggaggcgtccggctcg

SEQ ID NO: 238 - DNA, 20294 bp, Unknown
  16S sequences of unknown bacteria
gacgactttttacctgccgcaagaccggaaaagcctaaaaatatcgtatattttgcaatcaaaaatcaaaatgccgatgttgtggcaaaaaatatccaacagcagggcagaagtaccgcatttgttataagcgataaaaaatacggcgattttaactgcgttatacctaccgtgggcaatcacaatgttatggacgcaatttccgcttatgccgttgccacaaggcttggctttgacccggctcgggtttgcaaaaatttgggcggataccaggtttccggttggcgacagaattttgtggaaaaaaacggcgctttgattatagaggactgctacaatgccgccccggattccatgaaagcggccatagacacccttgtaagcgttgcaaaaggcagaaagatttgctgtttcggtgatatgcttgaacttggagacgacactgataatctgcaccgtgaagtaggggagtacgccaaggaaaagtgcgttgattgcatgtggacttacggggaaaaggcaagttttattgcaaaaggcttcggcgacggagctgaaaattttgccacaaaacaggaacttaccgactatgtgattaaaaatctcaaagccggcgacactattgttttaaagcggagccacagcagaaaatttgaagatatacttgaacggatttataaatattgggagtaaaaaatggttaggatttcttttttggtcacagcgctgttgtcatttgcactgtcagctttaagcggttttatatttataccttggttaagaaagctaaaattcgggcaaactattcttgaaataggcccaaattggcaccgggcaaagcaaggcactcctacaatgggcggttttatgttttatgccggaacttttgtaggtatctgcggcggtttgtttatgatttcaggggagcttaaaaatttaatcggggcaatgtacacaaaccaggttgtcagcctttgcgtaagcatgcttacagccttgggttttggcattatcggctatgttgacgaccatataaaagttgtaaaaaaacaaaatttgggtctcagcccaaagtataaaattttcggtcaggtctttgttaccgccgcttttttggcagggcagtattacataggccatatcaccacggttattcaactgccttttttaaaaccttttgacttgggtttgttctactaccccatagcctttgtgggcataatatttatggtcaatgccgtaaatttaaccgacggcatcgacggtttgtgttcttccgtaacttttgtggtggctctcggatttatgatgatttccgccgcttacggctattacacaaatgcgattttcgccattgccttggcaggggcgcttgtgggctttttggtatggaacttccacccggcaaaagtatttatgggcgatgccggcagtatgtttttaggcggcgccgtggttgccatggcatgggcggtaaacagaccggaaatactggtgtttatgggaattatttacacatgcgaagctctcagtgttgttattcaggtaacatattttaaaatcactcacggcaagagaatttttaaaatgagtcctattcatcaccatttcgaaatgtgcgggtggagcgaagtaaaaattgttacgatttttactgctatacggacaatttttgctgccgtaggttatttgacattttaatttttaacggaggaaagtgttttggcgtcaaagacaaaaacgaaaaagcgttttaaaataggacaaattttcaacgaaaaaggcaacggtttcgatttgccttttttgggcattgtcattattcttttgcggtttggccttgttatgctttattccgcaagctatgtaaaggcgatttacaaatttgacgacagcctccactatataagaaaacaggttctatatgcgattttgggctttggagttatgatttttgcctcaagggtagattaccatatttaccgcaggtttatacctgcccttatggctctcacctatgtgctgttgcttgtggttctcacaatgaaagactacaacggctgtcacaggtggattacaattcccggtgtgggtacttttcagccttcggaaatcgcaaagtttgtggaaatacttgtattttctcatctgattgagcgaaactatgacagaatgaaagacccacgatacggtatagctccctttatgcttgtgattgtttcctttgtttcacttttgtattttgaaccgcatctttcctgtatcgttattatctgctttataggtgccaccatgatgtttgttggcggcagtgatataaagtggttcggcgtcggatttttggctttgctcggtgcggttatgatagcctttttgctgtttagggatcaaataggccggtacatttacccccgtatagagtcctggagacacccggagcttgacttgcaaggcgatggataccaaagttaccaggctttgcttgccataggcagcggcggtctgtttggcttgggtataggtaactcaagacaaaagcatttacatttgccggaaatgcaaaatgactttatatacccgattatttgtgaagaactgggttttatcggcggtatgcttgttatcattttgtttttggcactgcttttcagaggatttcagattgcaaaaaaagccaaggataaattcggcgcaatgatggttataggtataatcacacaaatttcaattcaggcttttttaaatatagccgttgcgacaaacacgatacctaacacaggtatctcgctgccgttcttttccgacggcggcactgcgctgcttatggtactgggcgaactgggtattgttttatctgtatcacgacaggcaaatatgaatgaggatgacggagaatgaaagttataattgccgccggcggcacagccggacacataaacccgggtcttgccatagcccagtatataaaatcaaaacacccggaggcggagataatgtttgttggccgcaagtccggcatggaatacggccttgtgacaaaggcaggttacgaattttgccacatggaggtaaccggttttcaacgcaagataacccctcaaaatatcggcagaaatatcattacggtgaaaaatcttttgacggcaggggcaaaatccaaaaagattttaaaagacttcaaacctgatattgtcataggttgcggcggatatgtatccggcccgatagttttgcaggcggcaaaaatgggtataaaaaccgctatacacgaacagaatgcctttccgggcgtaacaaataaaatacttgcaaaaaatgtggacacggtatttttggcaaccgaaaaggcaaaaaaatatcttgacgaaaaggcaaatatcatagtttgcggcaatccggtgagaatggaaattcaatctgccgacggccaaaaggctaaaaaagaacttggggtagagggcaaaaccgtcctcttgtctttcggcggctctctcggcgccatgatggtaaacaaccggatgaagagccttgttttgcacaatagggacagaaaagatattgtacatttccatgttgttggcaagtacgacgacggtgattttgtaaaatttttgagtgaaaacggcatacagcagtcggaaaatttaaaggtatttgagtacctttatgacatacctaaatatatggctgcggcggatataatcataagtcgctgcggcgcattgaccattgcggaaataggctgtatgggcaaggcatcaatacttattccgtcgccgaatgtggcggaaaaccaccagtattacaacggtaaagtgctgtcggatataggtgccggaattttgattgaagagaaaaatctgaacgaaaaatccattaccgaggcatttgacagcctgtacctaaacccggaaaaaataatcaaaatgggtcagcttgcaaaaaccacatacaggcgggattgtttggatataatctataataatcttaatcttgacccaaagaacggggattgaaagtgaaatccgagaataaatcaaaacaaaatagcaaaatcaagaaagcacaggatgaaaatgttctgcgaccggaaaaatttgccggtgaaaaaaagagccgaaaggatataagaaaacaaaaaaaacataatgccattgcaacatttatacttgtggcaatactcataggcatatgcggctacatatcggtaaaagtgttctttattgttcagtctgtggatgtggaagggtccgaaaaatactctcggcgggagattgcaaatttttgcgccatacctttcggagagaatatattcaatgttgatacggaatattaccaaaatgccctgccggaaaattttacatacatagaaaccgccacggtgcagcgcaagttgccgaacaaaataaaaatcaccgttgtggattctgtacccacatattatgaggaaacttccgtagacggcggcaccgcctacacggtgtattctcagagcttaaagcctttaaccggcacggcgcaaaagccggataaccttataggcatttgggtaaatcaagaggacgaaaacagccttggtgtatttaattcggttgtagaatttataaccgacggcggctatgacaaagtcactcaaataaacacggtgcaaacggataacatcagcatcgaatatgacggaagaatcaccgtaaaacttggcacaatgctggatatggcatacaaattgaagatggcgtattatgttttgcatcagaaaattcccgaaggggagagaggcgttatggacgccaccgacggcggaaatgttatttaccgtatgacggcgtaaaaaaataaaataattatgaaaaaatgttgaaatagcgacaaaaatttgttatagttattgtatataattatttcgataatttataagcgtaaatttaaaatatttctgttctgcccaaggcggaacttttggataaaatttagcggaggaattgaaaatgagtttttacttggatgaagaagttacaaatgccaccaatataaaagttgtaggcgtaggcggcggcggcggtaatgccgtaaacagaatggttgtttcgggacttaaagatgttgagtttgtcgccatgaacaccgacgcacaggcacttcaatcctctaaggcaacacaaaaagttcagcttggtgcaaagcttacaaagggcagaggcgcaggtgccgaccctgaaataggccagagagccgcagaagaaagcaaggacgaaattcttcgggcattaaagggctgccagatggtatttgtaaccgcaggtatgggcggcggcacaggtacaggtgctgcgccggttgttgcggaagttgcaaaagaacagggcatactcacggtgggaatcgttacaaagccttttatgtttgagggcagccggaaaatgaaaaaggcggaaaaaggtatttccagccttctcaaaaatgtggacagccttattgttatacctaacgaaaagttgaagagcgtttccacagaaaaaatcacattgcggaatgcttttgaaattgccgacagtgttttgaaacagggcgttgagtctatttcgggtcttatcagtgattcttcatacatcaaccttgactttgccgatgttcgtgcgattatgaaagacgcaggccgtgcccacatgggtataggcagagcctccggcgaaaaccgtgctcaggaagccgcaaagatggctatttcaagcccgttgcttgaaacatcaatcgacgaggcaatgggtgttatcatattctttgttgtgccggcagatgtaggtcttgacgaagttgacgaggccgcaacccttattacatcaacagccaacgaagaagcaaacattatttggggcgcacggtttgacccgaatatgacagacgaatttaaagttaccgttgttgccacaggttttgaaaatgcaaagaaaaacaagaaggacgacgatttttcaagagccgcaaaagcagaccttataggtgataaaaacggcaactggtttgacgatgaggattttgatgttataaattggagcagcaaaaccactcacttaaacgatgacgaaagcgaaaaataccttgaatcaataaaggctgtactcaggggcaattccggaaaataatttatcagtaataacaccggggtgtttatatggaaaatgttttgttcaaccagtcactttttggttttgacagggggcaggtgcttaaatatattgatgatatgtcggcgcagatgtctcggcaggctcgggagtatgcaaaaaaacagacagacttgcaggaagaaatagaaaaattatccgggcaggtttcacggataagtgatgagtttaatatttctgccgaaaatgccgataaactgaaaaatgacttacaaattttaaaacagaataatgacgaattaaaacgccaggtttctttgtaccgtgcaatggtgaccgaaagggacaagcagatagaacttgtaaaaggggatatatccgcagcacgggagcgacaaaaggctttggaggaagaaaacgcccggtggaagtccaagcaggacgagatagccgcctgtatggtagaggctcaaatgagggctaaggagattatccgaagcgccgatgacgaagccgccaggcgcaaacggcagtttaacgataacgccgctcggctgttggacaaggttgaggattttaaaaccgagattgccgatttagagaggcaacttaacgattcttttgaaaagctcaacaccgccatgcggaatatggacaaggccggaaatattatagaaaatcaggtaaaggaatatcaaaggggcataagaaccattgatattgtaaagccggatgttcgggagattgcaggtgaaaaacatacctccgccgcagtaaagccggtttccaaagccggcaaaaaaacgctgaccgatgcggttttggactccatttcaaaacttttggataggtaaatgtgatttaatcacaacattatatcccggtctctgttataatgcagacaaatgattacataatcagtaaaggagatataattatggaagtaacaattacaaaagaaaattttgaacaggttgttcttaaaagcgacaagccggttttggtagatttttgggcaacatggtgcggcccttgtaaaatgctcagcccgattatcgaagaagttcggaaagagacagagggcaaggctgttgtaggcaaaatcaatgttgacgaacagcaggaacttgcaatgcagttcggcgttatgagcattcctacattgttggttttcaaaaatggcgaaattgttaaaaagcagatcggatttattccgaaacaggctgttttgggattgcttgacctttaataaaaacaaaattttgccgggggcgtttgcctccggtttttgtttttattgatataaaatttgcaaaatatcccataaactgatataatacaaaagcttgtacgcaaataatcacatatttaatgattatactaattatataaatattaaaatctctttaaatgtctttttttcgttgattatttgcataaaaaagtgtaaaattacatcaagtatgtacattgggcgacggccgattttattttatacaatttgcttagccttaaacttaggagaatttatgtccgattattttcataaaattatgtctaaatatcgtcgagtgatattgtttttgacagactttgccattgtgtgcagcgcatatctttttacatgggtgcttataagcggccgtgccgatatgaacgattattacagccttatgatttcaagctgttttttgttcgtatcctgctatgttatagtttattttgcctcgggtatgtacagcagtctttggcgctatgcggaaattgtggaatttttccgctgcgcttggtcaagcgtaatggcggttgccgcctttttggttatttccctggtgatatataaagaacgccgtattcccatttcggtttacggtctgtctgcggcctttgcctcgtcacttacaatttacacccgtttgacctatcgtatgtatcgcaacacaaagatacagaaaatggataaaaagcgccgccgtgttttacttgtgggtgcaggggacgcagcgtctactcttatccatgagataaataaaaatgcggaaaaagaaatgagcattatccgggctgttgacgatgataaaaacaagcagggacgcagtattatgggcgttgatattttgggtactaccgatgatataccaagccttgcaaagcggtgccaggtggatacaattcttattgccataccaacccttactccggaaaacagaaagaggattatggacatctgcgtgtccacttcttgcagaatacaaaccttgccggacatagtaaaactgattgccgacggacgggatttaaccagccgtatcaccgatattaaagttgaggatttgctgggcagagagccgattgtattgccggatgaggcagaaaaacttgttaaagacaaggttgtgtttgtaaccggcggcggcggttcaataggcagcgagctgtgccgccaaattgccgccataggccctaaaaagcttgttataatagatatttacgaaaactgtgcttacagcgtacagcaggaattaaaacgcaaatacggcacttctcttgacatggatgtgtgtattgcatctgtgagagattccaagaaaatggatatactctttgatgaatatcgccccaatgttgttttccatgcggcggcacacaaacatgttccccttatggaggacgccccggaggaagcagtaaaaaacaatgttttcggcacctataactgtgccctttgcgcagaaaaatacggcgttgaaaaatttgtactcatatccaccgataaggcggtaaacccaaccagcgtaatgggtacaacaaagcgcatttgcgaaatgatagtgcaaaacatcggacaaaactccgacggaaacacaattttcgttgcggtgcgtttcggcaatgttttgggttcaaacggctcggttttgccgctgtttaaagaacaacttgcagaggggggtcctcttactgtaacccacccggatatagtcagatattttatgaccatacctgaggccgtaagccttgttttggaggccggttcaatgggagaaaaaagcggcgaaatctatgttttggatatgggcaacccggttaaaattttaacccttgcggaaaaccttataaaaatgtccggctttgtgccttataaagatatagatattgtatttacaggtttgcgccccggcgaaaaactgtatgaggaacttttgcaggatgaggaaagcgtaagagagacaagtaataaaaaaatctttatcggttcaccgttgaaaatggatgcagacagattttttacagatttgttggaacttaaatccgccgcttatgaaaataaccaaaataaggtaatgcacaaattgaaagaacttgtgcctacatttaaacatgaaataaaagaatagagattagatttatgtacgaaaaatatgtcaaaagaataattgatattgttttgtcctttgtgggacttgttttgctgtccccgttacttttgattatcgctttgcttataaagctggactctaaaggcccggtgctgtttaaacaaaaaagggtggcaaaaggtaaagcatatttttctattttaaaattcagaaccatgtatgcggatgtgccgaaagatgtacctactcaccttttggcaaacccggacagcaaaattacaaaagtcggcaggtttttaagaaaatccagtcttgacgaactgccccagatttggaatattcttgtaggggaaatgagtataataggccccaggccggcgctatggaaccaatatgaccttatagccgagcgtgacaaatacggcgcaaatgatatcagacccggacttacgggccttgcacaggttatgggcagggatgagctgcctataccgataaaagccgagtatgacggcaaatacgcccggcatattacattttggggcgatataaaaatatttttcaaaacaataggtaatgtaatctcggccgatggcgttaaagagggtaaacagtaaaaaacacctgcaaaattcgttgaattgaattttgcaggtgcttttaattatgccttataatacttagtttttagtgcttgaagtctttttgttttctgttgaagtcttcttgttttcgttagggctctttttgttttcgttagaagattttttgtttgattcctttgtcatgggtatcacttcctttcacagttatagtataaacagaccggaaaattttattcatggggcaaaaatttccatttttgtgctaaatatcacggttttaactttaaccgcacttgaaaatatcttttctgtatggtaaaataattcagttaagtatattttaatttaatcttatatataataatttaggagtatattatgtcaggacattcaaagtggagcacaattaagagaaagaaaggcgcaaacgacgccgcaagagctaaggtattcacaaaactttcaagagagattgccgttgcggttaaagagggcggcacagaccctaataacaacagcaaattgagagacttgcttgcaaagggcagagccgcaaatgtgccccaggacaacttgttgagagccatcaaaaaggccggcgacgacgataaaacaaactacgaggcaaatgtttatgaaggttacggcaacggcggtattgctgttattgttgaaacattgacagacaacaaaaaccgtacagcgtcaaatatgcgccactacttcgataaattcggtggcaatttgggcgccagtggctgtgtttcatatatgtttgaggaaaaaggccttatcgtaattgacaaggacgagtacgaagaatacgacgaagaaaaagttttgaacgattgcttggaagccggcgcagacgatgtttcctttgaagaagatgtaatcgaggttacaaccgccacagctaatgttggcgaagttgccgacgcacttgaaaaaatgggctacaaaatgagccagcgtgaacctgcaatgattccgaacaactacacaagaattgaagacgaagaaactctcagaaaacttgctcttctttttgaccaccttgaagaagatgacgatgttcagaatgtttggaacaaccttgaaaacgaagaggatctccctgaactttaataagtttataaagtaatacggatcataacgggctttgcgatttaacctttgcaaagcccttttaaaagaggtattgttatgacggaaaaaaattgtattttctgcggcggccctgttcgtgatgggcaggattgcccttggtgcggtttccatcagtcgggaagccatgttcggggcacactgccttacggagctaagctcaacaactatgttatagccgatgttgttgatatggacggcgtaagcacttcatatttggcttatgataaaaccctgcaacgccgagtaattataaaagagtatctgcctgtttcaatggtaggccccagaaacggcgataatgttgaggttcagccggacaaagaggttttattcaaaaacctgatgttggatttcagggatttgtatatttctttggctaagatcgaaagcccggcaattcagaaaatttacgatatttttaacgccaacggcacggtttatgccgttcttgaaaatgtaaaaggggaaagccttaaaaagactatgctcaaaagggcaagaccatatacatttaaagaggcaagatggttgtttcgggatatttttcggcttttgggcaaattgcgtgaaaataaccttgcccacggcggtataagcgacgacaccgttatcattacaccggacggcaacgcagttttaacggattttgccattcgggatttaagggttaaaaacgaccatgtaatgtacaagttgtatgacggtttttctgccccggaacagtataatgttgaacaattttccggcttttacacggatatttattccgttgccgcattgttttactatgttgtaaccggcaaaaatctcacaccgaattcatttgacggccgtgttccggaattgcctaagtgcgccataaacgcaattaaatttgccactaaacccaacccggaggacagaatagacaatatcgaagattttgtccttattttggacgacaaagcggttgcggaatctgcaaatgaacctaaaaaagaaaatccattggcaaatttggcggcaaaattaccttccggttttgacaaaaaatatgtgccgtacattatggttgcggcagttatacttatatttgcaatagctatacttgggcttgcaggtaaaagcggcgggcaaagttcttactccggggattcatcttcatatatcatcgatgatgaaaagttgaaagtgcctgatttcaaaggtatgacatataagcaaataagtgaaaatcaggagtataacgacaacttccttttctatgtttcttatgaatacaacaccgatattcaagagggctatgttatatcttacgagcctcaaaaagatatggttgttgaaaagggaacaacaatttaccttgttataagcaagggcgataagtatgcggttgttccggacggccttgtcggcatggacataagcgacgttaaaaagattttagacgaacagggaataaaatataaggtaaccgaaaagccgcaaacaaaagaatattcttacggcaaggttatcggcacggatatttcatccggcacaaggataagcactcttaaagacaccttggtgatttatgttgcggataacacacctgtggcaaccccaactccgacaccaacacctacaccaactccgacacccacaccaactccaacacccacaccaaccccgacaccaacgcctactcccacacctacacccccaccggattcatcatccgaagctgttgacagcagcagtggagagccgaccggagaaacacaataaaacaaataataaaacagacctaagctcggtttatcggcttaggtctgtatttttgtaaaagaagtttttttaatttaatataaaaaaaataaaaggcggaaaaatccgcctttttgaacatctaactatattagttgtttgtgtaagggagcaaagcaacatatcttgctctcttgatagctgttgtcaaatgtctctggtgataagcacatgtacctgttactcttcttggcacaatcttgcctctttcagtaacgtactttctgagctttgcaacatctttgtaatcaatgtattctgccttttcggcacagaaagcgcaaacctttttgcggttaggtcttcttgcagggtgtccgcccttgaattctctatcgtttctttccatggttggaattttctcctttacttaaattttaaaacggtaaatctccgtcatctgttgatactaccgaaaaaccgtccaaatcccctgttgaaaaggaatttgcagacattctgttttcggtcgctctcggagcaggctgtgtgtaaccttgacttgtgcccatgccccgtgaggcgctgtttctgctttctacaaaataaacattgttagctacaacttcaaaagatgaaagttttttgccggtatctctgtcggtgtaccggtttacctgaattgcaccgctgagaccgatcatattaccttttacaaaatatctctggacaaattcaccggttgtacgccacgccacacatctgatgaggtctgacggataaaaaccgttttcatccttttttgcgttaggtctctgaactgaaattacaaaagaacaaacgcttgtaccctgtggggtctgacgaagttccgggtcggcgataagtctgccgactaaacaaacaacattcattttcgtattcctttcaaattaaagagcaatgatcattgagcgcaaaacgccgtctgtaattttacttacacggtcaagctctgcagggaaagcagcttcactttcaaaagtgaacaaaacatagtagccttcagcttctttgttgataaggtaagcaagctttctcttgccccattcgtcaactgaagtcaatgtgccgttttctgaaataagtgttgaaaacttttcaacggtagctttgatggactcttcatcctgctttgtgctgataacaaatatagcttcgtatttctgcattagtatttacctccttgtggacttttcggccatgccactttgacatggcaaagagcgctatttttaaatagcaatttattataccaaacccggtaaaataagtcaagtattttaaaggctgtttttaaaagataaggccgctttcggcggcctttttacacttttatattaagttagaagagcaaaaatacatagaaagtgtaaattatcgcataccggcaaataatggcaatgcccaccttgcttgggccggattgttttattattttttcgtggtattcgttttcatcacggcttgtggcttttaatttattcaaatcttttataacattttttctgtaaagaacattggccttaaaaccgatataaatatttatcattatttctaagacggcaaacaacagagcaaccgtttcaatacccttgaaatacagtggggaagaggcgggcaaagcccctatttgaactgcggaaactataaggttcggcataccgaggaaaccgtttatcaatgccgttataatagcccacttacccattttgcggaatacaaaccacaacggccgaaataaaaacgctgtgccgttaaaaggtttgtatttagggttgctgtccatttttttaaatttatagatatagtatccggcgttgaaaccgatatatgcggcgatgtcttttaccgcaacaccgtcaatttcgccggccaaccgacgatcaatctgagctttgtaattttcattgtcaaaaggtgaaccaaaccggccgttatttggatttgccgttgcgttatcattgtgtggcatatctccgtcggcaagttttgtgccgcagttttcacagaacaaggtgccccggggcatcttccgaccgcagttagggcaggttatatcggcaacattccgttcatcgtttacaccggcgataaacaaaggcttccactcaaatccggtgccgtgtttgtcggcgtttacgcaaccgccgttttttgcccagcaccgtctgtgataaggggtgccgcaatccgggcagacaacaatatcgtcattttctttaaaagtctcgccgcacacagggcaagtctgatttttatagttaaacataataccaaattactcccaaataatgcattttttatagcatattttatattatacataaaaaaatcgcatatgtaaagaaacaaacactttactatataagatttttcagctataatatatatagcaaataaatgtgaaatattggggtaaataatgataataattgatgattataaaaaaatattaaatgatacaagaccgcagatcgccgaattggcaaagggtcttggctatgaaaggctttcaaacgaaatcgaggagcttgaaatgcacactcaccagcctgatttttggcagaaccgggagagggcaaattccattatcgcaaagataaacgggttaaaaaagaaaaaagacggcattgacaaacttaattccatgcgggacgattacgaaactttaatcgaaatgtacgaagaaatggaagatgaagaacttgaaaaagaaatcgttgaaatttccgacaagtttgtacaggcagttgaaaatttgcgtcttaccacacttttaacaggcgagtacgattccaaaaacgcaattatcactctccatgccggtgaaggcggcacagagagccaggactggtgtgaaatgcttttcagaatgtacacaagatattgcacatctgtaggttacaaaacacaaaccgttgattatcttgaaggggacgaggcaggtataaaatctgtttcatttaccgtagagggtgaaaatgcctacggctttttaaagagcgaacacggcgtacaccgtcttgtaagggtttcgccttttgactctaagggcagaagacacacatctttcgcctcctgcgaagttatgccggaaattgaggacgatatggaaatcgttatcagagatgaagatatcaagatggatgttttccgttcttccggtgccggcggtcagcatatcaacaaaacatcatctgccgtaagacttactcacttgcccacaggtatagttgtttcctgtcaaactcagagaagccagttgcagaacagagagacctgtatgaagatgcttcgttcaaaacttgcggaaatcaaagagagagaacaccttgaaaaaatcgaagatatcaagggtgtacagaaagaaattgcatggggcagtcagatacgcagctatgtatttatgccttacacattggttaaagaccaccgcacaggatatcaggattcaagggttgattctgtaatggacggcaatattcagggctttttgaacgcatatctcaccgcacggagcaaaggcacattatccggcgacagcgacgaggatatgtaaaaacaaaatagacaataaaaaggcggatttgggattttatccttaaaaatccgccttttctattgaataataaaaaataatgtgatattatagctttacaatttaaaagtcggcagggccataggctttcttgagcaaaactcttgaatcaggggaaggcggtcagaatccgccgcaacagccattaccgtatgcgctatgcgttaagtcgggatgcctgtctgtcgatacatacgttatctgttgtcttgggcaaaagaaggcaaagtacccacaaggggttattgcgcctgtttgcctatgcaagcgggcttttattttgcctatgtgagtatgtggttgtgccatgacagggtacggcgtaaagcgcataatcactttttaagctttgggttttaaattaaaatcggcaaggcaataaaaattatacaggagataagaaaaatgaaaaaattattatcattggcactttcacttgctttggtgctctcttttgctgcttgttcaaacagcacatcctcaacaccggattcatcttccgatgagcagtcctctgtttcacaggctgttgaaggcctttgggcaactgccacttacacggaaaatgccgaagtaggcgagggcgaaaaaactgttgaaatgacagttacagcagaggacaagagtgttgttatcacagtaaagacagacgccgaaacagtaggcgatatgcttcgtgaaacaagcattgccacaggcagtgagagcgattacggtctttttgttgacactgtaaacggcattaaagccgattgggatacagacggcacatactggggcttttatgtagacggcgaatattcaagcgttggcgttgacagcgttgatattcctacagacggctcacttaacattgcttttaatcttgaaaaagacaacggctgataaaaacaaatattaaaccaaatatgcaccttgaaagacagacacttttggaggtgcatatttttataggcatatattttgaagaagaagccgatggtctaatgaaagaaagacgaggcaaagcttgttattgcaatagtagcggttgttattgttgcgttggttgtgcttatgaaaaagagaaaagcagaaaactaattaaacggtaaatacagcaaaagcaaagctgaaaatttcggctttgcttttttgtgtgtaaaaaagagcgcaaccgttttatagggttgcgctttttatagggttgcgcttttaatatactatattatgtagaacagattttacgggcttattttacaactgccgtgcagacaatttccaaaaggaattcttcaccggcaagttttgcctgaacacaggctcttgtaggccggttttcctttgaaacccaagcgtcataaacgctgttcatctcgccaaacagcgacatatccgcaaggtaaagggtcattgtaaggatatgttccttatccgagccgtatttgctcaaagtttcttcaattctctccaaaacttccgctgtctgctgtttgatgtcgccgtccggttttttgcaaacaaggccggaaaggtagagaataccgttgttttcaacaactttggaatatcttccgtttggttcgtatcttttaattgacataattttatctccttttataatgggtgttcccaaattttaacaaaagtaatccggctcattatcgtcgatggtgatgtactccgtctttgtgcggccgattaaataatttacggcggcaccgaagaacacggcaaatgtggcaagagctgcaataagcttgaataattttttcataaaaacctccgcatcagtaatttagtataacaaatgtttcaaaattgtcttccggcttgtaattttccccggccggggcaccggccaaggcacaaaaatcgccgttttcaaaggttttgacaaaattgattgttataacgcttttttcttccggcactgtgtcaaacaactgttttattttatgccgactgattgtaatctgtccgcaccagtaaaagccctgctcgtcattggctttaaaacattcaaggtttattccgtcggcagatattttttcgccgtcggtaaaataaacattttccaaattgtcaaagccgaagttcaaacaaagggttttgcccagttccgggtttaaattgagatacagtgatatgtcggcatttttttccggctcggccgtaaaacaatatgtgcaaattaccaagtcggcaccgtgaacatagctttttaaatagcaataaaccatgtgttcttcgcaccgagatttgtaatttgtagctttaaatgcgctttgcgtatcccaggggatttgtccccggcttttgtaaataatgttttgcaactgtttgacctctgtcgtttaaattctttaaaattattataccacatttttcaccgtaaagtacatagcaatgagagaattttacaaaaaataaacattttatcggtaaaaatttattttttgaggctgtaacggctaaaacaccttatttgctattgaaaaattaaaaaataaatgctaaaatatgtatttgaaaaagtgaccgaaaggtctttttaaggaggattatataagtggcagtatttaaaaaacttgttcgcagtgcaagtggcgcaaaagtgcctcacaacaaaaacactgagaactgtgaaactgttaaaatgccggtgccgaaaagggtttcggttgccatgtcaatgcacattggcgctccggcagttgcttgtgtaaagaaaggtacagaagttaaggttggcgatgttatcggcacagccggcggctttgtttccgccccggtacattcaccggttagcggcaaagtttttgctgttgacgaacttatgatgccaaacggtaataaaactcaggtagttgttatagacacagacggccggcagaccgtaagtgaaaatgttaaaccgccggtagttactgactatgcaagctttatcgaagcaattaaagccagcggacttgttggtctcggcggcgcaggtttccctgcaagcgttaagctcagcccaaagaatttggacgatgttggtacattgattatcaacggcgcagagtgcgaaccttacatcacggcagactatcgtgaaatgatagaaaacggcgcagatgttatcgagggcgcaaaggctgttaagcagtatcttaacattgcaaaggttgttatcaccattgaggcaaacaaacctgaggcaatcaaaaagatgagcgagctttgcaaaggtcttgacggctttgaagttaagacattgccaagcgtttacccacagggcgcagaaaaaattcttatcgaaagcgttacaggcaaggaagttcctaagggcggcttgccggcagatgtaggcgttgtcgttatgaatgttgcttctgcaggttttgtaggcagataccttgcaacaggtatgcctttgataacaaagagaatcaccgttgacggcgacgctgttgcaaaagcacagaatgttgaagttgtaatcggcacacctattaaggatgttattgaattttgcggcggctacacagaagaagccggcaaaattttgtacggcggcccgatgatgggcacagctgtttcaagcgacgaaatgccgattttgaaacagacaaacgccattatagtattcggcagggaaaaggcagttttgcctgcggctaac

SEQ ID NO: 239 - DNA, 2553 bp, Unknown
  16S sequences of unknown bacteria
attcgccttagtctcgtgggctcggagatgtgtataagagacaggaatgtacagcgtgcccaacgcttcaaaattcccgtcaatttggttgcaggtaacataggttgtaaacccctcttgacgcgaagtgccctcatagagttcaaggcgcgcgtcggacgcaagaaaaacgttgttcgttaatccgcttccccacctgccaaacagcatcgtctcctctcggtgctgtttcagggtgctgccgctggtaatattcacctgcgtcatgctgccaatgctggtaagcggaacttcgccgtaaatattcagggtcgcattgggatggcggcccacagtggtgttatcctgatagctgttgtaaatccgctcatcaatctcctccgtcgatccgccgccgtatacgtcgatgacaactttgcctttgacaccggccccatcgccagtagcgtggatattgggcgcatgaacattcttcagtgtaagcgttgcgtcgcccagaatcatattcggcccagatgaggtgcggtcccatccgctgacaaagataccacgccgcagataaactccgttcgcattacctcctgtacaatttgtcagggtcatgtcaacatttccggtgacaagagacagcgcactaccgctctcactattaccgccgccataaacgaactgtacaagagaattatttgccgcaattgtgacatcgccatttacttggatcattctgttttccgatccataagaaatataaccgccgccaaaaatacgatgccatacattttgaaactggcagtcatcaatatcgatcttgaccggccctgtagtacctgtgatcatcgctgcgcgagaccggcccgcgtcgtagcaacctccaacaatgcagtccacctgctcaccggtaatatcatttaagacaatatttacagcgccggcaacattagctgtcgcggtttgaatatcagaatttgtaccaatcacgcttggatcattgctcaaaatatggccgccgccagcgacagcgactgtatcaggatccgtggaagatactttggtatcgccggcccaagccccgccgctgatggtgatgttcgtgtttccgcccacatctgcggtcccctcgtcctgatccaccagaccgccgccgacaatggaacgaacatgaacgttttcacccatcagtttgacgtttgtatttccagaaacatcgctgcatcggccgccgccataagcgtatataaaggattcctcgttttcgagcttcatctccaaaacaagatgcgtatcgccggtaacatcgttctcccggtcgccgccgccgaaaatgtataccggggacttcaccatacgggaactgctgctcttaggactttctttccattcaggtgtgctgagaacggcagtatccgtcaggtgaagcgtgtggccgtttgcaaaaataaaagcaggaagcgacggcccgccattctctggtacggtgtattgctgcttagagaactccagtgtcaagtctttcaccgtgagatcgccctgtagagagagccaaacctccgttgtagaaccatacccagcgaattttaatacagcgttctcatccgcaccctggatcgtaatatttgcttccggcgtcgtccagttctccatttctaccgtgccaacaacggcgaacacgtcgccatcctcggcattggccatggccgtatcaaagttcaacgcactttcggcagatgtgccatcgccgcctgtgtcgccctcctgcgacacatagatcgcgtctgcgggaatggccggatccgtttcctcctccgcaaacgccacggccggcgccattgtcaacgccatgcacagcgccaacagcacagacaaacatcgttttttcatctcatttacaatctcctttcataaaagtgtacttttgtgagctgtgctttttcaaaaaagtgtacttttacagaagggagttttcattgcgaaatagaaaaatttctattgtaattttgcctgtttttgtgtattataaataataacttgagtgtactttatttttttgaaaaagtacactttttcaaattctactattttccatttggtgaacatagcgcagtaagaaagggctgaacggacggttttcgtaccagaagccaaaagttcccccggccgatctgtgatcggccgggggaacttttgacttcctgcatcaattcccggctatgcagactactccactacagcaaatgtttatacccacatcgatattgaaacattggtgaagtctgttgaataaatcacggttactaacgcgttactaacaaatcattttcaggagaaaagaagaaaacccggaaaccattgcggtttccgggtttttcctggtggagactacaggactcgaacctgtgacctcttgcgtgtgaagcaagcgctctaaccagctgagctaagcctccgtataaaccccgcagcatatgctgtgaggttttttgtggtgacccgtacgggactcgaacccatgttacagccgtgaaagggccgtgtcttaaccacttgaccaacggg

SEQ ID NO: 240 - DNA, 9495 bp, Unknown
  16S sequences of unknown bacteria
gccgatggcggctcataagggatacggactcgctgtccttgtggagctgctctccgcggtattgaccggcgcggggatgctcagcgaggttgtcagctggaatctcgacatgccgtccgcaaacaacgtaggacacgcgttcatcgcaatcgacgccgcgaagatgctcccgtatgaggatttcatcgcccggatgcagaagctcgcaagcgagctccgcggcgctccgaaggcggagggctctgagcggatctggctacccggcgaaatggagtgggaaaagcgcagaaaggcgctcgcctccggtgagcttgagctgacggacgcgatgcttgagagcctgtccggactttcggcagagagcggcataggcattgatttcattgatgaaagtgaggaatcctgaaatggacagaataatgtacggcatactgaagacgacaggaatctgcccgataatggtcgcgccggagcttgatttcgcggctgacgcggcgcacgcgcttgctgaaggagggcttccagtgtgtgaggtgctgctccacagagacgagcactctctggagcgcgtgaggagaatagcaaaggaggcgccggaggtcatagtcggcgcgggttcggtcatctctctgcgcgacgcagaggaggcgatggacgcgggagcgagattcttcgtagcccccgggcttgtgccggaagtcgtggagttcgcgcttgagaacagcatgccgatactccccggctgcgtgaccgccagcgatatctcaatcgctctcaactacgggataaacgtcctgaaattcttcccgatctatcagctgggcggcgcggagatcctcgcgcagtatcacggcggaccgttcggaaaggtcgagtgggtcgtcacgggaggactgaacggaaagaacttcctgccgtttgccggcataagctatgtgctggcttccggcggtgactggatgttcgcggagaacaacgccgtttgcgacagaaactacgggatgatagtcgagaacacccggaggactataagcgacgtgcttgaagtccgccgcgtgaaatgagggttgtggaatgccgaatcctgtaaaattcgatttttccgggaagaaagtgatagtcaccggcggcgagcgcggcataggtcttgagctggcgctcggatttgccggatgcggcgcggatatagtaatcgccggaataatggacgaggagttcccggacgccgcgagactcgtgagagaaaagggcgtggagtgcacctgcgtacacaccgacgtatccgacgaagcgtcggtgaaagctcttgtcgcgctcgtgaaggagaaatacggacgtatcgacatactggtgaacaacgccgggataaaccggctcgctcccgcggagtcgatgccgcttgagacctgggagcgcataatcgccgtgaacctcaccggaagctttctgatgtgccgcgaggttggcggggtgatgctcgcccagggcgggggaaatatcgtcaatatcgcctcaatgtcgggacttatcgtaaatccgctcccgcagcagcaatgcgcttacaacagctcgaaggcgggggtcataatgctgacaaaatgcctggcgaatgagtgggcagggcgcgggataagagtaaacgcgatagccccgggcttcacccgcaccccgctgacaaaaaaacggctggacacgccgggagaccccgccgtgaagaaatggatcgacggaacgcctatgggaagggtcgccgagccgcgcgaaatggtcggactcgcgctgtatttcgcaagcgatctgtccagcttcacaaccggaacctgtctgcctgtagacggcggatacacatgtctgtaaaggaggacacaagatgaaatcattgaaggatactcacagactccacaacggagtcgaaatcccctgcgtcggactcggcacatggcagtcgcctgacgagaccgcgaaaaacgccgtgctttccgcgctttcattcggttaccggctgatagacaccgccgccgcgtacggcaacgagcgcggtgtgggcgcggcgatagcctcgtgcggtcttcggcgcgaggagatcttcgtcactacaaagctcaggaacgcggctcacggatacaaagccacgcttgaggcgtttgagggctctatggagcggctcgggctcgaatacctcgacctctatctcatccactggccgaaccccgtgcagttccgcacgcactgggaggagtcgaacgccggaacctgggctgctttcgaggaattgtacagagcgggcaggatacgcgcgataggcgtcagcaacttcatgccgcaccatatcgacacgctcatgaaaaccgcgacaataaagcctatggtgaatcagctgaagctttgcccgggcataacccagccgggcgtcgtgagctactgcaaggagaacggcattctcgccgaggcgtacagtcctttcgggacaggcgctgtgttcggcgatgagagaatggaggcgctctcggaaaaatacagcagaaccgtcgggcagatatgcctcagatggagcttgcagatgggctttcttccgctgccaaaatcggcgaatccgatgcgcataaaggagaacggcgagatattcgacttttgtattaccgaagaggacatgaatctcatctccgggctcgagggactctgcggcgaagcgcccgacccggacagcattctcttctgaccatgaggataaacaacaaagagacgctcgtaagccacggcaatgagcacggaagacgcatcgtcgccgagctgctcgacgcggggctcgactcgatcgacccttatctccgggtaaagcagctggtaagcgtcagggactccaggatagttctcaacactgagggctttgagatgaacggcgacccgcaaaaaggtccgctcgagttcgatctcagggattacgaccgcgtattcgtcataggcgcggctaagggagttcagcgcgccgcactgggcttcgaggaggcactgggtgatattctgaccggaggtcatgtcatcgcaaagcacaatgaggatataatctgcaaaaaaatcggcgtcacgctcgccggacacccgataacggacaggttctgcgtcgagggctgccggaggattgaggcgctcaccgaagggcttacccggcgcgaccttgtgttcacgattttcggaagcggctgcggttctctgctcacgtatcccgcggacgacatcaggatagaggagatagcggaattcacccgcatgatgcagatagaaaagggcgtcgcgacgggtgagctcaacaaaatccgcactcatattgacagattcaagggcggaagactcttaagaaagctcatgcccgcgacggtcgtcaacacagtgaccgccgacccgtcaaagaccgacacgccgatagtccgcgtggggtattacgagatgctgagcgcgaataccttcttccctgcgatagccgcggcttctacctatgaggactgcgttaaaataatcaagaagcatgacgcctgggagagaactccggagtccataaaaagacacctgctttgcaacaacgagctgaccgaaaacatgggcatcccggagtacgagagccttggctgccggttcttcgggctgattttcaaggactcgaccgtatatcccgccgtgaggaagagagccgccgagctcggcatcagatgcgttatgctctcggagtacactcagaccgaggcgcgtgaagccggattttcagacgccgcgatagcgctctgctcagcgcgctccggcgaaccgttcaaagctccggtggttctgatgtcctccggcgagaatgtcgtcacggtcgggaaagagcgcggagtcggcggaagaaatcaggagtactgcgtcgccgcggctttgagaatcgccggatgcggggatatcgtcatcggcgcggtcgacaccgacggcacggacggtccgggcggattcagttatccaggagctccggagtgccttgccggagcgctggtcgacggcttcactgcgggtgaggctgagcgcgagggcatcgacctgtccggtgcgctgaagactcacggcacttccgaaccgctatggagactgaactgcgggatcgacgcaaagagcaatgtctcggcgctcgacctcagaataatttatatcggagagacgaaatgaacagaaccgccataaaatcaatgagagcgcatcaggtctacacgaatcgcggaaatcccggcatagaggtcattgtcacgactgaaaacgacgccgtgggcagagcgatgtgcacctccggcgtctcggtcgggatgcatgaggtggagtttcagttcgacggaggggaaaaattccgcggcaggggagtcactcgcgcgtctgagcgggtcaatagtgaaatcgccccgaaaatgctcggagtcgacgccgcgaatcagtccgaagccgaccgcgtcctgctctcgcttgccccggacagcaaggcggctttcggcggaaacgcgatcgcggcggtctcggcggcgatactgaaggctggcgctgccgcgctcggaatccctctctaccgccacataggaggcgtcagcgccatgtacctgcctgtcccgggagtcgctatggcagcaggcgacggacgttacggcggagggattacgactcccggcgggaagccgaccatgtccgtgatggcgtacggcttcggacgcttcgccgacgcctcatacgcctgctgggagatacacacccgctgggcggaaaaaatgaagaaaaagttcggagggctgccgaacatccgggatttcatatccatccctgccggagtctacaaatgcgaccgcgagatctgggaggatatgacaaggacaatcgccgaagccggatacgagggcagagtcggcttccagatggatgtcgcgacagatacctactgcaataaagaggacggcaggtactacgggctctttgacagcactccgaagaccaaggaggagctgtacgagttctacatgacaataataaaagactatccgttcgtgataatcgaggatccgttcaacgaggacgattatgacgccacggctgagctgacgaagaacagcggcatacagatagtcggtgacgacctgttcacaacgaatcttgagcgggtcgcgcacgggataagcaggggcgcggcaaataccgttctgctcaaggtaaaccagatggggacgatttccgaggcgcttgaaatgatacaatacgcctataagtgcggatacgccgtgatgccgtctgacagccggggcgagggcgagtcaatagccgactacgcggtcgggatcaacgcgggctctgtccgggagagcgcgataggtccgcgcggcaaccgatttcttgagatcgaggaggagctcggcgcggcggcaaaattcatcgcgcgcgcgggctcaagggattccgcaatcagatgagagcggacgaaaaagctttgaggtgagatatgttcagacaatacataaacggaaaaacagtcgacggcaacggaaaaacagcaaaggtaaccgatccctcgaccggcaaagtcattgacaccgtgagctgcgctgacagcgaacaggcgaaagaggcgctgaacgccgcggcaagggcttacagaacctggtcgaagaccccggtgaacgagcgttatgactggctcatgaagcttcggagcgcgtgcgctgccgagcgggaaaaactggtcgatctcgtctccttcgagtccggaagaccgtatccggcggcgtgcggcgacgttgactggcttctgacgagcctctcctactacgccgaggaggcaaagcgcatcgacggcgaagttctcccgactcagtttgtgaacggcagggagaactaccatatcgtgaccagaagaccgctcggggtgactgtcggtcatatcgcgtggaattacccgctcggcaacgcgggcataaagctcgctcccgccgtggcgtccggctgcacctgcgtcataaagccttcgagcgagacaccgctggcgactctgtatctcggagtcatagccgagagaatcggcttcccggcgggcgtgataaacatcctctcaggtccggcggatgaggtcgcaaaaacgctcaacgagagcgatatcccgcggatgataaccctgataggctcgtatgagaccggacttacggtgatgagacagggggcgtcgtcgctcaagaagtattcgctcgaactaggcggaaacgctcccgtcatcgtcatgccggatgccgaccttgatgagaccgccgcgaatatcgtcgccaaaaaggtcggctttgccgggcagacctgcgtgaactacaaccggatatatgtccatgagagaatatacgaagcgctctgcgaaaaggtcgcaaaggagctctcaggggtgaagctcggaagatacagggatgagggctatataatgggtccggtcataaataacgcggcgcgcgaccggctgcttgagcttatcgacgacgcggttaaaagcggcgccagactcgtgatgggcggcgaagttcctccgcttctgaagggcagctatataactccggcgctgcttgtcgacgtgaccgacgatatgcgcgtctcaaaggaggagatcttcggaccgataatcccgatgcagtccttctcttcgcttgacgacgcgctcgaaagggcgaacaatacgatatacgggctctcggcgtacttcttcgggcacgacgcccgcgagatcgcaaaggcgttcgaaaccctggaagccggcgagatattcataaacggcgggatcggaagcgagttcactccgcacccgggactgaagcagtcgggtatcggctgcgacaagtcaaagtggtcaatggaggagtattacgacttcaggctgatctcgctcgtaccctgaggagacgccatggagaagagattcgatattatcgggctggcaacgcccggacaggatctggtggtcgagcttgagaaaatgccgcagaccgtcagcagccggatgtacgactgctgcttccagggaggaggctgggtcgccacggcgctgtgcgccgcgggaaacctagggatgagagcctcattctgcggcgttgtcggggacgatattttcggaaggatgatagccgaggatttcaggtacaataacgtcgacatatcccacctgatagtcgaggagggcaggcgcagcaatttctgtctctgcatcaccgaacgcgcggacaagaagaagactataatcagccgcccgggcgagtgccgtgaactgactttcggggatattgacgaggaatatatccgttcgtcgcgcatgctgcatgtcggattcgtgaacgaggggataaggaaggcggctgaaatcatccgcgcggacggaggaaaagtcagtgtcgacgcggcttactacagaccgtatgtctgcgaaaactatgatattttcgatatattcatcggctctgagtactatttcaacgaccttgccgcggagcttggcgcggattctccggagaagctgtcggacggcgagaaattcgatatcatgcgccatatccagagaaaaggacccgggatagtgatattcacgttcggcgcggagggctcgaagggggtttacggcggaaattccttctcaatccccgcaatggacgtgcctgtggtcgacacaaccggagccggcgacgtatatcacggcgcgtttgacacggcttatctgaacggtcttgacgtcgtgagcgccgcgagatacgcgaccggcgcggcttcgataaaatgcacgcggatgggcggcagagccggtatccccgacagcgagacactcgcgagattccttgcgacaggcgagatagacaatgagcgaaccgagcgccgcgccgagcgctacaggcgcggaatctgaggctgaggaatccctgagtcagagccttcggcaaaaacaattcagcttgagaagcggaggaaacaacatgcttgattataacgtcagaataggacttgtgccgctgagacgcgactgcactccgagacccggcatattcaactgggaatacgcgcaggaaagaggacgcagaaccgcagcgtacatagaggagcacttcacgagcgaacacgttacatttgtagatctgaagggcgtgatcgacgtggaggtgctctggtcgcttaacgacgtcgaaaaagtcgccgggcatttcagaaaacacggtgtggacgcgatattcctgattcccgcgaatttcggcaacgaggaggctgcgggcgctctggcaaaagcctgcggaaagccggtgctcctgtggggaccgcaggacgacacattctggtctgacgggacgaggatgacggacactcagtgcggcatcttcgccatgagccgtcagctgatgcggatgaacattccgttcacctatatcgaaaactgcttcccggacgacgaaaagctcagaagaggggttgagagattcgcaagagtcgtctgcgcggtaaagaacttcgccgggatgcggatcggtcaggtcggactcagacccggacccttctgctcggtgatcttcaacgagggacagctgatggaggagttcgacattcatgtaattccgataaatctcgcggtgatcaaggacagattcaacgccatccttgaggacaggaagccggagcttgcggctggcgctgagctgatacgctcaatgtacgaggtcgacgcggacagcgaaaagaacctcgaaaagatctacgcattcgttatcatgtataaggagctgttcgaggagtaccggctcagcgcaatctcagccgaatgctggaccgcgatgcagcagctggtcggcgcgatgccctgcgcggcatacgggatactggctgacatgggctgcgtcataggctgcgagagcgacatgcacgccacaatgacgcaggttctgctcaaatgcctgaccttcggggataagaagccgttcctgggtgagttcacgacgcgccatccgaccgaccggaacgtcgagcttctgtggcactgcggacccttcgcgtactcgctgcaccggagcgacgagccctgtcgatgcgtcaatatgcgcgaatggtttcaggtgaaaaagggtcactacaccgtcgcgcgcatcgaccaggatcacggcagatattcgataatcgcgggcgagtgcgacagcacggacggaccgtataccttcggcacgtacatgtgggcgagattcgacgatctggacgcctgggagcgcaggctggtcgaaggaccttacatccaccacgtcagcgagatcgagggcagcctcaccggagagatcagagaggtctgcaaatacataccgtccctgaactatgacgcagttacgtaagttcccataaaaaagcacggggctgtcgcaaaagcgacagccccgatctgcatcaagacgaaaggcgcagaaccctaagggcgttgaaaaacgtccattttaagtatgaaattgt

SEQ ID NO: 241 - DNA, 14740 bp, Unknown
  16S sequences of unknown bacteria
agcatagcgagagcgcttgacacaagtgctcttttggtgtttttgctgttcataaaattttcctccttaaaattttatcgcaaagggctttaaaccgtttacaatttatgcatatattgtacccctcccccgacatttttgtcaataccgaaattaaacttttttattttcgtcattttgacaacaataaagggcatgagtcaaaactcctaccatttatatttgggctgttacaaaacaaacttttcaaggtcgtttggcacataaatgtttccgtcaaaatgctgtctgccctcggcggtataaagcgcctttctgtttttgatgtttttgtcctcggtgtgataaagcagcaggtttttgacctcaagctctttcgcaagagtgcatgcgtccttaacggtggaatggtgcttttcatagggcgaaaaaatatcggcctcggagaaaaggcaaaaggcctcgtgaagcagccactcgcttttccttgcatatttttcctcgcaggggttatagggctcgtcgccgcagcaggtcagctttttgccctcttcgtattccatgcaaaatccgaattgcttggcctttttggattttatgtcaaaaaaggcggtgggctttccgagaatttccctttgctcgccgtcgctcacctttatcgggtgaacccgctttcccaaaaggtcgctctgctttttctgaagcaaattgtccgacatttgcaaaagcaggtcaataacctcgtcgtggccgtaaatatcaagctcgccgccgtaaagacccttgttcatgtcctgacaaatcattcttataagccatatgacccccaaaatgtggtcgatgtgcttgtgggtgacaaaaatcgtgtgaatgcttttgcggtcgattcccgcggcttttagccgtgaaagaataccgtttccgccgcccgcgtcaacaagaaagtattcatccttttccctcagcgcaaagcaggtgttataacattcggtcaccgccgcgtttcccgttccgagcattgtcagttccatgttcttacctcccgttcttttaatatattttaccgcaaacgggacaaaatttcaacaaaagcccccgtacaaaaatacgaaggctcttgtgatttttaatttattctataagtccgctttccttaagcaaaagctcaatatcggttcccttgacctttttgatcgcaagcttgagcacttccttttcggcaaaggacagcggcgcctcgcttatgggctttttgtcaatggcatagtagcaggcgcgaagcagctcccgcacgtcgtatttgctgccccaaacctcgggcacgccgcggtcgacgtcaagcagcgtgtagaccgactccatacccgttctcatggaatattcggtggtgaatatggtgtcgcggggggtctcggcaaactgaccgataaatgcgaagttaacggctccgtcgggaaccaccttgggtcggtcggattcctttctgggctggaagaatgcgttgatatagggcatgaagcaggtggtggtgttgcaggcgttcttggcaagatcgtcgattctctcggtgggcacgccgatgtggtaaagccactcgcggcagacctcctcgccggtgcagtcccgcatggccttctttacatagttgccctctttgtttgtgttcagcgaatagagccacacaagcacggtattcttgtcctgcgccttaaactggggctggcggttgattgtccaggaaagataccagttgtcggtgctgtccttgacggtgacgattccgccggtggtcaccttgcccgaacgggggtcgcgcttgcagatattcataatatgacggattatttcctcgtcggaggtggcgacggtggcgctcatccagttggtggcgtccacatcggaacagaatttatctgggttgccgtattctccgtcctttgcctgggcggcgatggctttccacatatcccacgactcgcccttgccgttttcaatgccggacagatcaggtgcatgagtctggtcgccgtagcaggaggtgtcggtgcagcagccgttggtgataaacacaaggtcgttttcggtaaggttgagggtctgttctttgccgtccttgacatagactatctgttttgcgacttttttgtctccctttgtttcgataacgacatttttaacgtccatgccgtattcgatagacacaccgtgagcctcgagatatttcacaaggggaagaatcatgctttcatactgattatatttggtgaaacgcagagcgctgaaatcgggcagtccgtcgatatggtggacatagcggcaaaggtagcgtttcatttcaagtgcgctcgaccagcgctggaaggcaaacatggtctgccaatagagccagaagtttgtgtcccaaaaggaatcgggcagcacatcggaaattttcttgtcctcaagctccttttcgggggtcaaaaaaagctttgacagcgccatggccgagtccttatcaagcttgaactgcttgtcggtgtgggcgtcctcgccgcggttcacgctggcgcggcagagggaaaagtttgggtcgtgtttgttgagccaataatactcgtcaagcaccgaaactccgggagtttcgatagagggcacgtcgcggaaggtgtcccacattacctcgaaatggttgtccatctcgcggccgcctctcatgaaaaagcccttggtaacatcctttcttccgtcgcagctgccgccggcaagctccagcttttcaagaagatgaatacgctcgcccttcatctgtccgtcgcggacaagatagaaagcggctgtcagaccggcaagaccggtgccgatgatgtatgcggattttttatccacatccttcggcttttcgggatgggcaaaagattcataagttcctgcggaataatacatattgaagcctcctgttttttgtccgctcggatttttttattgtgagcggtttttctttatgtcttaagtataccccgccgaacttattttacaatatacaaaaatcccttagtgacaaaaaatttatcacagagggcaaaagtgtaatgtttttaaacaaaagctcggatttgtttaagatttatatttctcatatattcgcttatatacaattgcaagaattggaagtccgacaatgcaagttgcaacgatcaaaataagcgcaaaggtttcgttccacaaaccaaaaatcgttgacaaccacaatggcaatgaatacaccatccacattcggccattggcgcggttaaaagcggaaacatcggaaatttcggattcttttatgtctgtatccgaccaaaaccacatgggctcctttctattccacgcataaattcctatgaccgtaactacagcgctgcatggcaccatgatagcaagccaaactgcattttccataattattttccttcaactaattcagattcggagcgattttctgtttcatcggtgctcagccttttatcgttgaccgtaacacagataaattgcaggaatcgtattccttgttttaaatcttaatactctgcaaagcaaattctttggattttataatcaacggactatcagacatattatcgccgccttttcaatgattatattactgtatttcaatgaaagcaaggcataatcttactgtttcaatcggcggagccacaccgtactttttcactataacctattacttattacctcccaaaaatcccgtctcaaactttatttgaagtaagagttaaaaggtaagaagtaataagtaaaaatcccgcccacttatgtgaacgggatttttggcggagagacagggattcgaaccctgggctctttcgagtcactagttttcaagactagctccttaaaccactcggacatctctccgtaaattttatgtattttatcatacctcggccgaattgtcaacgcaaagggcgtttctgcgaccgaaatccggtttaaccgccgacacctatataaggccgccctatcaaccgacggaagggattcttccgtcggttaaaggcatttgtccgagccgattaaagcagctcgatgacgcacatttcggctgcgtcgccgcggcggggtccgattctggtgatacgggtgtagccgccgtttctcgaagcgtatgcgggagcgatgtcctcataaagcttctttataacatcctctttggttatgaatgccattgcctgacgctttgaggtcaaggtgttatccttagccaaagtgatatatttttctgccatggcgcgaacctctttggctcgggtgacagtggtctcgatcttaccgttttcgagcaggcaggtgaccatgcatctgagcattgcttttctgctgtcggtctttttgcccagctttctgcttcctggcattgatattcactcctttacttggtagtgtgttagacttcttctttgctgagggtaaatcccagcgaatcgagcttgttgatgacctcttcgagggactttctgccgaggtttctcaccttcatcatgtcgtcctcggttctcgagatcagatcttccacagtatttattcccgctctcttaaggcagttaaagctgcggaccgaaagatcaagctcttcaatggtcatttcaaggaccttttccttaccggcgtcgcccttttcaaccatgatgtcggctccggcgccttcggccgagagattgacaaagaggttgaggtgctcggtaattatcttggcggcaagagacaccgcgtcctcggccgaaataacaccgttggtccaaacctcaagagtgagcttgtcgaagtcggtaacctgaccgactctggtgttttcaaccttataattaaccttgcttaccggagtgtatatagagtccatgggaatgaccccgatggtgttgttaagctgtttgttgcgctcggccggaacatagcctctgcccttgtcgatggtcagctccattccgagctttccgcccttcgacagggtggcgatgtgcatatccgggttgagaatttccacctcgctgtcggccttgatgtcggcagcggtaacctcgcagggtccttcggcgtcgatatatacgactttggggccgtcggacagaatctttgcggtgagtcccttaaggttgaggacgatctcggtgacatcctctttaaccccgggaatggtggagaactcgtgaacaacgccgtccagctttaaatatgtggcggcgacaccgggcaggctcgaaaggagaactcttctcaagctgttgccgagagtggtgccgtagcctctctcaagaggttcaacaacgaagcggccgtaagagccgtcttccgaaagttcctcggtctcaattctgggcttctcaatttctatcattcggaaccctccttaaatagcggataaaccgccgaatattgaaaataaaaccgtcaaacccgcagagattatttactgtagaactcgacgatgagatgttcctcgatgggagcatcgatctgttcacgggtgggaaggtttacgacctttgcctcaagagtgtcggcgttaacgctgagccattcgggcttgggacgggatccgcaggcctcaacaacggccttgatcttctcggagccgcggctcttctcgccgatagcaacaacatctcctgccttaacaaggtaggaaggaatattaacctttttgccgtttacggtaaagtggttgtgaacaaccagctgacgggcttcggcacgggaagatgcccagccgcagcggtaaaccacgttgtcgagacggctctcgagcagacggagcaggttttcaccggttacgccggtcttgcgctctgccatttcgaaataatggtggaactggctttccagaacaccgtaatatcttcttgctttctgcttcatgcgcagctgaagaccgtattcagaaaccttcttgcggctctgtccgtgctgaccgggggcatagcctctgcggtcgagggagcatttgcctgaatagcatctgtcgcccttcaaaaagagcttctggccttcacggcggcataatctgcaaacagcacctgtatatcttgccatattattacacctccaaaaaatcagacgcgacggcgcttaggcggacggcatccgttgtgcgggatcggggtaacgtccttgatcatggtgacatcaaggcctgctgcctgaagtgcgcggatagcggcttcacggcccgaaccgggtcccttaacataaacttcaacagttttaagaccatgttccatagctgccttggccgcggtctctgctgcggtctgggcggcgaagggagtggatttcttggatcctctgaagcccatttcgcctgcggaagcccaggaaattgcgttgccctgaacgtcggaaatggtaacgatggtgttgttgaaggtcgattgaatatgtgctgcgccgcgttcaatgttcttgcggtcacggcggcgggtgacgtttgctttaccctttgttgccatattaaattcctcctgcttacttcttcttgtttgctatggtcttgcggggacccttgcgggtacgggcattggtcttggagcgctgtccgcggacgggcagacccttgcggtggcgaacgccacggtagcaaccaatttctataagccgtttaatatcgaaagctacgtcgcgacgaagatctccttctacgtgaaggttgtggtctatatactcacgaagctttgcaatgtcatcttcggtcagatccttgactcttgtgtcgggattgactccggtggcggcgagaatatctctagaggtcttaagaccgataccaaagatatatgtcagtccgatctccacccttttttcacggggcaggtctacacctgaaatacgtgccatttattttcgcacctccatatttgagttgtcgggattagccctgacgctgcttgtgcttgggattttcacagataaccattactcttcccttgcgcttgattattttgcatttgtcgcaaatctttttgacagaaggtctgactttcattatttatacctcccaaaaaatctttaaaccgataaaggttattttgatcgccatgttatgcggcccttggtcagatcgtatggcgacatctcgatcgtgaccttatctcccggaagaattcgtataaagttcatgcgaagctttccggaaatgtgggctgtgatcaggtgaccgttaggaagctcgaccttgaacacggcgttgggcagtgcctctcggacgattccttcgacctcgatcatgtcttcttttgacacttgattttccccctcacattagtgtttggccggcaacataatttgaaattgcctgccgcaatgctcggtttgtggacattgagccgctgtctaatacggtggtagtggttccgatatgcttaaggttcttgcatttcggccgctccaggggacgctcctttccgtcggcgacgtaaacgccgcagtcggaaattttcgtgaccgcaaggaatttaccccggtcgcgtcctgccttcgaatacacaagctgtccgacttttaattccatggccatcctccgtcagggtctggtcaaaatgatcggccctttggtggagattgccacggtatgctcaaagtgagcggacaattttccgtcggcggttttcaccgtccaaccgtctttcagcgtgcggacatcaaatgtacccgcattaatcatcggttcaatggctatggtcatgcccggcaaaaggcgcgctccgtgacccgctttcccgaaattgggaacctccggatcctcatgaagctttttacccactccgtgacccacaaactgcctgacaaccgaaaaaccgttcgactcggcatgagcctgtacggccgcgccgatgtcgccgattctgccgcccgcgacagccgccttgatgcccttgtaaaggcactgctcggtggtgtcgatcagccgctgtgcttcggaagaaatctttccgacagcaaaagtggcggcgttgtcgccgttgtatccgtgaagctcggcgccaaggtctatcgacacaatgtcgccctcttcaagaatacggtgtttgctcggaattccgtggataacctcgtcgtttaccgagatacaagcggtggccgggtaacccgcatagtgcaggaaattcggctttccgccctgactgataatataatcgtaagctattttgtctatctcccaagtggagatgcccggtctgaccgcctcgccggcgattttcagggctgcggccgaaagcctgcaggcctcggtcatcagttcaagctcacgggaagttttaaaaacgatcatactaacgcctctatggtagctaacattagtgccgtcgtgtccttaagctcctcctgactttcaaccgtgtgcagcattccgcgctccttatagaaggctttaagcggctcggtctggtcatgatagaccttaaggcgttcgagaacggtttcgggtttgtcgtctgcgcgaattgtaagctcggctccgcaggcgtcgcatttgccctccgtttttggggccttgtataccgtgtggtaggaggctccgcagtcgggacaggtgcgccgtccggacattctttcgacgattttttcgtcggaaaggtcgatttccacaacggcggttatgtcgggaacaagcttttccaaggcctctgcctggggaacggttctcgggaagccgtcgaggataaatccgtttttacagtcgctttgcgcaatgcgctcgctcacaattccgacaatgatgtcgtcggacacaagctctccgcgctcgataacatcctttgccttttttccgacctcggtgccgtttttgatcgcttcgcggatcatggcgccggtggagatggcggggatgttgtatttttcgctgattatctcagcctgtgtgcccttgcctgctccgggaggaccaaacaaaatgagtttcataaacggttcctttcctgtatggcgggggcgccggctgattgcttttccgaaagttttaatcaaggaagcccttatagtatctcatcatcatctgagattcaatggacttaacggtgtcgagggcaactccgaccagaatgaggatggaggttccgccgagggacacgttgatgtttccgattctgccgacgataatgggcaggatggccataactccgaggaagaatgcgcccatgagcgtaatcttggaaattattttgccgatgaagtcagatgtgggcttgccgggacggatgcccgggataacacccgagttctttctcaggttgttggccatttccacgggattatactgaatcgcgatgtagaagtaggagaagaaaacgatgagtataaggtagagcacggcatagaaaggtctctcgtatgagaaaatatcgaggaatttaaggaaggaggaaggattggaggtgcttccgcccgcaaaagccgtgatggtggtgggaatggcaaggatcgagcttgcgaagatgatggggagaacgccggccatgttgacctgaatgggcaggtgggtgttctgtccgccgtacatctttcggccgaccacacgcttggcatactgaaccggaattctgcgctcggcgccggtcataaagacgatgaaggcgatgatagcaaggaacagcacgcagacagcgataacggggatgtagttaccgttgacgatctgaccccagagataagcgaagcctctgggtccgcgggagataataccggcgaaaagtatgattgagataccgttgccgatacccttttcgtcgatctgctcgcccatccacatgattacggccgaaccggctgtaaagcagagaacgatgatgactcccacgaggatctgggcgaaaactccgtctcccttgccgtaagagagcatgctctgattacggaggtagatgtagtaaacgataccctgaatgagcgccagaataacggtggcgtaacgggtaatggccgcaagctttttacggccctcttcgccctctttggacagtctctcaaggggcggaatggccaccgtgagaagctgaatgataattgaagagttgatgtagggggtaacacccatggcgaagatcgcgccgtattcaagggcgccgccggtcagtatcgaaagatagctgaaaagggtgtttccggtgttggtgaaggtatcggcaagctgagaactcagctttgcggcgtcgataaagggcgccgggatgaaggagccgatacggaaaaggataatgatgaagacagtatagaaaatcttctttctgagctctacgactttccaaccgttacggatagtctctaacagctgcatcttacatcacctctgcctttccgcctgccgcttctatcttagcttttgcggactcggaaaaggcagctgccttaacggtgagcttcttcttgaggtctccgtttccgagaaccttgacgccgtcgagggtcttgctgataagacctgcgtctttgagagctgccgcgtctacggttgcgccgtcctcgaacttgtcgagagccgcaacattgacagtggcgtatttcgttgcgaaaatattgttgaaacctcttttggggattcgacgctgcaaaggcatctgaccgccttcgaagccgggacggatagagccgccggagcgagccttctgacccttatgtcccttgccggcggttttaccctgtcccgaagcggggccgcggcctatacgcttggaaggacggtttgcaccggctgccggagaaagttcatgcagtttcatttttattgcacctccttagtttacgctttggttacctctacgaggtgtctgatctttacaatcttaccctgtgtctgggcattgtcaggctggactctctcgtcgccgatcttgtgaagtcccagagcagcggcggtagccttctgtttgtcggtagaaccgatgaggctctttacaagctttacagaaatgtttgccatgatcgctgcctccttaacctaagatttcctgaacggtcttgccgcggactgcagcaacctgatcggcatcgcgaagagcggtcaggccttgcatggtcgcacgcacgacgttgcaggcgttgttggaacgaagagcctttgcacggatgtccttgataccggcagtctcaacgaccgcacggacgggaccgccggcgataacgccggtaccgggggctgcgggcttgagcagaactctgcctgcgccgaactctccgatgatttcatgaggtatggtggttccgcgcatggaaatcttcacgagatttttcttggcatcctcgatgcccttgcggattgcgtcgggaacttcgcccgatttacccataccgaagccgactgtgcctttaccgtcgcccaccacaacaatggcggagaacttgaaaatccggccgcccttaaccgtcttggaaacacggttaatagccacgacacgctcggtcagatccagagttgatgcgtcaattttactagccaaaattttctcctcctttttagaactcaaggccgccctcgcgggcaccgtctgctaattcttttactcgaccctgataaacattgccgccgcggtcgaaaaccacggttgtgattccctttgccttggcgcgctctgctatcaaagcgccgattttcttggctgcttccttatttccgccgtagccgaaatccttttcgtagctggaggcggatacaagggtaactcccttagtgtcgtcaattatctgggcaccgatgtttgcaagggagcgatacacgcacaaacgggggcaggaagccgttccgtttatcttaccgcgtacacgcgcatggcgtttcatacgggcttttttgctgtcaggtctggttaccatttaactttcactcctttacaaattatgcgcctttaccggatttgccttccttgcggcggacatattcaccggcatagcggatgcccttgcccttgtagggctcggggggacgttttctccttacctcggcggcaaactgacctacctgctgcttgtcagcgccggagatcacaatgctgttggggttgggaacgtcgatggtgatgccgtccacctcgggaacgacaacctgatgggagaaaccgaggttcatgacaaggtccttgccctgctttgcggcacggtaaccgacgccctgaatttcaagagccttggtgtagccgttggccacgccctcgatcatgttggcaatgagggttctggtcagaccgtgaagcgagcggttttcctttgcatcgttgggacgggttacgataacttcattaccctcgaccttggcttcgatttcgccggcgacggtgtgatgaagagtgcccttggcgcccttaacggtcacttccttgccgtcgattttaacctcgacgcctgcggggatagcgatgggttttttaccaattctcgacataacttcttacctcccttaccaaacgaaagccagaacctcgccgccgacgttggcggagcgggctgctttgtctgtcattacacccttggaggtggaaactatggcgataccaaggcccttcatgaccttggggagatcttcgcagttagcgtaaatgcgaaggccgggcttgctgactcttttgagtccggtgattgccggagccttgccggcattatatttaagcgtcaaacggataacgccctgctttccgtcgtcgatgacctgaaagcttttaacatatccttcgtcaacgagaatctgtgcaatcgacttcttcatgttggacgcgggtacgtctaccgactcgtgctttgccgaactcgcgttgcgaattctggtaagcatatcggctatagtatcggatatttgcataccgtttttcctccttttcctaattgcaaaataaagtgattaccagcttgcctttttaacaccgggaatttcgcctttgtaagcgagttcacggaagcagatacggcaaatgccgaatttgcgaagataggcatgggggcgaccgcagatcttgcatctgttgtatccgcgggaagaatatttaggagtccttttctgacttaccttcattgatgtttttgccattgctgattccctccttatttcgcaaacggagcgccgagcagtatcagcagctcgcgggcttcttcgtcggtattcgcggtggtgacaaagcagatgtccataccgcggaccttgtcgatcttgtcaaactcgatttcggggaagatgagctgctccttaagacccatggagtagtttcctctgccgtcgaaggagttggcgttaattccgcggaagtcgcggactcggggaagggccaccgagaaaagacggtctacaaactcatacattttttcgccgcgaagggtgacctttgcgccgatgttcatgccctcgcggagcttgaagttagcgaccgattttttagccttgcagaccacgggacgctggccggtgatctgggaaagatcggaaacgatagcgtcgataacctttgcattgtcccttgcttcgccggcgccgacattgatgacgaccttctcaagcttggggatctgcataacgctcttgtaactgaattttttcatcagcgcaggagcgacatcatttttgtaagtttctttaagtcttgacatttataatgctcctcctgtccttagaaaatttcgccgcactttttgcagatgcggtcttttttaccgtcttcatactttttggtgcctacgcgggtgggcttgccgcacttggggcaaacgcacacgaccttgcttgcgtacatggcgccttcggccttaacgatacctgcgggatcgccgggctttcttgccttgacgtgcttggtcatgatgttgcggccctcgatgatgaccttgccctccttggggctgacctcgagaaccttacccttttggccgcggtccttgccgctgaggatcataacggtatcgccggttttaatatgcattttactcattgtaccgttacctccttaaagcacttcgggagcaagggagaggatcttaagataatccttttcgcggagctctcttgccaccggcccgaaaatacgggtacctctggggtttttgtcttctcttataattactgcggcgttatcgtcgaaacggatgtaagtaccgtcgttgcgacgaaggccctttgcggttctgacgactacggctttaaccacgtcgccctttttgaccacaccgccgggagccgcttttttaacagatgcgactactacgtcgccgatgttggcgtacctcctgccggaaccaccgagtacgcggatgcacataagctcctttgcaccggtattgtcggcaaccttgaggtaactctgttgctgtatcacagtgttttcctcctcgtaataagttatttcgccttctcgactatttcgacaacacgccatctcttatccttggaaagggggcgggtctccataatctgaacgcggtcgccgatgttgcaggcattgttttcatcatgagccttgaatttaaccgtgcgcttgatgatttttttgtaaagcgggtgctttacgttgtcggcaattgccacgacaacggttttgtccatcttgtcgctgactacggtaccgacaagagttttacgcaaatttctctcgctcatcgattatacctccgttttggttgcggcggcttttatctcattgtcgcgcagaattgtcattatgcgggcgatgtcctttttaacagccttgatccgcatgctacaatcaaaacattataatcatcatgaaatctt

SEQ ID NO: 242 - DNA, 4152 bp, Unknown
  16S sequences of unknown bacteria
ggggagatccagtccgttggtaggttcgtccagcaatataatctgcggctgcccgaatagagcttgggccaatagaattttgaccttctcactttctttcagcgtattcatctgggcgtataacaaagaggattcaatccccagcccttgcagaatctgttggacctctgtttccgcttcccacccattcatctcggcaaattcaccctccagataggaagcgcgctcaccatccgcatctgagaaatcctcttttgcatatagtgcttctttttctttcatgatgtcatataatttgggattccccataatgacagtgtccaaaacggtatatgcatcatactgaaaatgatcctgctttaaaacggacatacgctcgttgtccggaatagagatctcacctgtagatggctccagatcgcccgataaaatgcgcagaaaagtggattttcctgcaccgttggcgccaataatgccatagcagttgccggattgaaacataagatccacgtttttgaataaagtgctgcctccaaattggaggctgacatttgatacagtaagcatgatgactccatttctgcccataggcaagatattgctaaacgttgatagtatagcataaaatgacagattttaacacgcgattcgattttttctccttttcaagcaaacaaaggcaaaaatatttttttgttttgtgaaaaagacatataaaaagacggcatcccactttttgagggataccgtctttttatatgggcggttattgttggccgttaaaatcttcaatcgtgcgaattatgccgtcagcgattcccaaggccgtttgataaatgcgaagcggttggcaaagatcttcatattccaaaggatttaccacaaatcccaattccagcaaaagggagggggcataagtcatccgtgtgacacggtagtagtcctgataagcaccgcgtgcctctcggctagtggcggaagtaacgctatccaaaatattttccgcaaatgttttggactgttcctcatggtaataaatctccgttccaaaagaattgctgctgtcaaacgattctccggtactgttgtgatggaaagagaggaaaaagtctgcccgaaggcgtcgggccggatccatgcgttcttcaaaatttaatctggcattctcctccgacaccatataaacgcttgcgcccaacgattctaaaacctgcttggaggcataggctgagataaaattcagatccttttctgtcggcccattggatccggcaacgcctaacgcgcccggatcttcgccgccgtgcccggcatcgatcacgataacaatgccattgagaggcttttgagacaattctgagaaaacaggagcttttttggcaaaaatgacaatattttcgccatcatactctacattatatccccaaagttttacaccatcctgataagaaaaagtcagcgtaaccgatccatcgctattttctgctgcagaaatttcttcaaaaagagtagagctttttggttttatgttttctgcaatgcccttggtattccagagcgttacagtcagttgagtatcggtcatctgcgctttatatggagcttttgctgttccggtcagagtcaggctttctccacgatcttctacggcgaatcgagcagaggacacctgattttctacagctggcgttccttccagaatatctgccgtggatttgggaaggtatccgccggagcgcagtttataatagctgattgtcacttcttctacatagtcgcatgcaccattatacagcgtcatgtagaaatcgtcttcgatggttacatccccataaacgttattgatataatcattggctttgactgccagtgtcgtggtttttccaactgcgtacaattctccggaagatgtatagctggtcgtggcgccttgataagaaagggtgtaggttgccggtccgatttttgtcgtggcgttatcctcacccaggtcaggcatggtcattgtaccgctgtaaacggcaggaacgccggactgagccgctgctttttgtgtaagggaaactttttttccttggaatgttaccgaaacattggctcctgctggtgcggtacagctaaagtgaatcggctcgccaactgttaccgcttcatggtaataaggatacatagaactttgaacaattttggaaatataagacacgctgctttgatctggggcgattcgggtgatggaaaaggtttggctttggagtccttgggaaagggtgtgggtacttgtcccaaccggaatatcagtcaaataaacaccaaaccctccattggtggttttcctttcaatcagctctccatccagataaagcggaagattaggatcagaagtccccataacataataagaagatgtggtgatcgtaatatcactactgggtctggaaatggaaaacacctgcggaatttgcagcgaatagccgtccggaatcagatccaggtctccggagagggcagaagacaaaagcatggcattttcagaagaatttttcagctgtgtatagtcggccactgcgatagaagaaagaccggattgccttagcagaaaaatctgactgctgatatcgaatttctgacggccagaatcagccgaggtgctttgcaggcagggaacaaccggaaggccattggcccaggcgttccattgcagggcttttttttcatagtccacagtatttttgttcaccgtaggatagatcgtatcagccagctgattctccaccaatgtttgaggcaatagcccaggggaagataataaacaggaatttgatgccgtgggggaaacaatcgggtcatatgaaatagaaacagaaagccctccaccgctgattgcctccaaaaaagaagccattttttgcgcttgagaaacctgactatcttttaacccgtcttgcgccggagataaaaaggccgtatttggcatcaaaagttcatcagtgatacttccagcagccaatcgtttctgcagatcccattgggcaagcgcttgattttgctcttgcgccggatcaagatgcaaactttctccatcccaaaccgcgatcgaactgccatggtctgtcacggtttttacaaaacgaaaggcagggtgagaaggagaaagagaaaagggatctaaaacaagagaaagagaaattccattttcttttaacagagatgtcaaataggaaagttcttcaagagttctttcctggtccgatcgcagtcgtaccatgggtaatgacaagcttttttgctctgtttcagaagaaaaagaataatatattcggttaaaaccgctgtcatttgtaaactgaagcagtgtatccatttggagaacagcagattttttctcgtcaaaggtactttgataaaacaggccttttggaacatcagcggcagatgaaagagatgccggcccatccgcagcaacctgtactggaagcaaagccagcaaaacagcgaggatggtgcaaccacatttttttctgacttttttcatttgcgtcttcctttcaaagattaaatgataaaatcttctttttggaaagtttggcgaattggtttttttggtttccgcttcaaaggatcgtattgaaaacggcgacaggcatattcataggtcacaactccctttttggggcaaagaatggtctgttcgtcagatgaagccattccataagtacagtagcggcacgagggaatgatgtgggaatcaaaaagtgcttttgtcatacatagcctccatgttttaacattttgtgcttttattttttatattataacaaagaccaaaagaaaaagctaatccaatctacggtaattgcgggcagaaagggatagtaaaaataccgcacagagaacaattaataaaaccgcaatggtgggtgtttgagaaaatgcgggaataagcggatgagaaaaattggaaaagactgtacatgctgtctggggaaacaggagaatcccaatcctgaccaaaatggcagttatcattccgtgtacgactcgggaaaggaaaaaaggaaaaaaggaaaaatctttttctttaaaaaaggatattgcctgaaagaataccgagaggccggaaaaggatacaaaaaaaccaatcaggacaagatc

SEQ ID NO: 243 - DNA, 3474 bp, Unknown
  16S sequences of unknown bacteria
atttgatccgatctctgctgtttacctcaaatctacgacaggtttcgctgtaactcaatttctcttcctgcatggtttcaatcaccagttttttgaattctggcgtatatcgtttgtttggtactccttttggcatagcaaaacaccccacttgttagatagtatatcatactgtctaacaaatggggtgcagttcattcctatgaaaaggagccggttttttgaaaatgttttactggaaatattgaaaaagaggaaaggtgtgttataatgaacttgaaatacttggaaggaagccgaaaggctcccaaacatagagaggagaagcagaatgaaggacaagacaaaaggcttggtagcaggagttttgatcggggctctgggcgtcagcggcatggtgggggctaaaagcctgactgagaccattcaagttacttattccaacatcaagatttttatggatggagagcagctggacccccgggatgccaacggtacccaggtggaaccctttatctataacggcactacctatctgccggtgcgggccgtgggggaggccgtaggcaaggatgtaagctgggacggcatcaataaagtggtttacctgggagccaagccgggggacagcgagaattggctgaatgtgtgcggcccctatcagtatacggatggggaagagtacactttgaaagaaaataagtatttcaccatgtctggtcagaaatacaccaacggtttcgtgctcacccccagcgactgggatgatgacaaggcggaagcgctgttcaatctcaacgggaaatattcctccgtcacttttacagcggggcatgtggatgattccggggatcacgatgctgtgctcaatgtatacctggacggcattatcgcttatagcacggagctgcaatacgacgatgtggcaaagcccatcactgtgccgctgaagaatgccctgcaaatgaaaattgagattgtggggaaagatttgaatgtaaatacttcttcccgtgtttcttatgggttctctcaaggggaattcaaataagccaggaaccaaaaataaaaaccggacagccttttctggctgtccggtttttatttttggttggtttgcccttattcttctgttttcaccgtgccgtcgggattgaaaagggggagtttttccagatagatgatgtcctcccgcttctgggcgtcgccctcggccaggatggccatgcggccgcagacaataccgccggcctgggtgacaaggctttcggtggctgccagggactgaccggtggaaatcacatcatccaccagcaaaatacgcttgccccgcatcatttccgcatcggcagtgtccaggtacaggctttgtttgccccgggtggtgatggagtggacactcacctcaaaaatgccggtcatataaagcttgggctttttgcgggccacaaaataatggcgatcgccattttggcgtgccatttcatgggccagagggattcctttggcttcggcggtgatgatgtaatcatattccggcgcccgttccagcaaggctttggcacaggccaccgtcaggggtgcatcgccaaaaatgacaaaggccccgatggacaggttttcattcaccggacagatggggagctgacgctccagaccggcaatggtcatggtgtgataatgcatggcgataacgccccttttcactgattttcagaggggaacaagcgccttccctccgggcacattatactggtttttggaggaaagctcaagagaaggcggaatttttggaaaaaaaagagaagaaagaaaataaaatgtgaattttttatgaaaaattccagcttgctttttttcttagtctcttgtagactaaagtcggtgagccattcccctctgtccggatgggctggctttccaaatattttttggaggtatttcgcccatgagccaaatggaaaagctttttaagctgaagcaaaatggcactaccgtccggactgagatcgtggcaggcctgtccacctttatgaccatggcctatattgtggccctcaaccccaacctgcttaccgggtttggggcaaacggaggccagcagctgtggaatgcggtgtttatggccacggttctttcggcgggcatcggtactctggtgatggcctttgcggccaacaagccttttgccatggcccccggcatgggtctgaacagtttctttgcgctggtggtgggcaacatcgccgccatgaccgggatagagtacaccggggcttataatgccgccctgtgcatcattctgatggaaggcattctgtttttggtgctgtccttcctgcgggtgcgggaaaagatcgtggaggccattcctctgggtgtgcgtatgggcatcgccccgggcatcggcctgatgctgatgaacatcggttttggttccaacgccggtgtctataccgaggatggcggccccttctatatgctgggcaccttcttcacaaacctcacttcttccattacccgggacaccatgggtaaggaaggctatgccaccatggtgctctatgtagttaccacactggtgggcctgtttgccatcgtggctatgaaccacaagggcatcaagggctctgtgctctatggtatgctggtggccgctgtggtttactgggtgggcggcttcatcttcctggatgggtttgctccctttgcttccctgaaggacgcttcttttgtgcctcccttcgctgatatgatgaacaccacctttatgaagtttgacttcgctgacttcttccagatcggctgggccactgctgtgatgctcatcatcaccttctgcatgatcgatatgtttgacaccatcggcactctggttggcacagccagccgtgcgggtatgctggacaaggatggcaaaatgccccagatgaagcaggccctggtggccgatgcggtgggcactctggccggttccatcaccggtacatccaccgtcaccacctttgtggaatcggcttccggcgtggaggccggcggccgtaccggtctgaccagcctgaccactggtgtgctcttcctgctttgtatgttcattgcccccatcgccgcgctgattccggctccggccacttcggccgccctgatctatgtgggcgtgctgatgatcggcggcctgaaaaacatcgactggaacgatatcagccaagtggtgcctgtggcgctgatgctcatctttatgcctgttaccggctccatcggccacggcatcggcatcgctcttatcgcctatactgccatcaagctgtgctgcggcaaggccaaggaggtcacggtgctgacctatgtgctggccatcctcttcctgctcaagttcttcttggtggtctaagttttgataaccgaaaaaccggcggaattgaactgcaccccatttgttagacagtatgatatactggataacaagtggggtgc

SEQ ID NO: 244 - DNA, 11496 bp, Unknown
  16S sequences of unknown bacteria
tagaggaactttttgaggagcaggaacagaatgacgaggttgcagagcgagatgattatctgccagatattaacggaaattacttccagtgattgcatttaattcattccttatttaatagcgttgagcaggatattgacgaatctgccgggcgcgaggaagatgaggaggatagcgatgacgagggcgtaaagaccggtggtctcggcgattgcgcagcccatgagcatcgttgtcgtgacggcgcccttggattcgggctgacgacctatagcctcgcaggctttagcgacggcgttgccttcaccgataccagggccgataccggcgatcattgcgcagcccgcgccgagagcgcagccgccgaggatgataccaattgcaagttctaacatttttttgaattcctttcaagaatttaacgtttgaaaaaagttttaagcggcgttttccgcggctttttttgccgctttcttagccttgagcttctcccagtcgtccgccgggaaaccgccggagacgtagagcatggtcagcatagcgaagatgaacgcctggaggcatccgctgaatatgtcgaaatataccgacaaaatcgcgggaataccgatctcgagcagcgggaattttccgagaactcccggcagccagccgagaatgatgttcgagagcgacccgagcgcggagccgatcatcatttcgatgatgacgcccgagaggacgtttccgtagtgacggaaagtcatcgagagcggcgtcgcgacctcgcttatcacgttgagcggcgcgaggagcggcacgggatccccgaagctcttcacatagtgtacaaatccgcacttacacttgtagtatgtgatgagcacgaacacgatgaccgcccatccggcgatgacgttgaagtcggacgtcggcgggtaaagccctatcagcgtgacaaggcttgagaaggcggagagagccatgacggcggcgacgaagggcgcgaaccctgcgaagtatttcgcccccatgttctcgtcgacgagcttgtcggtggtctcgacgatcatctcggcgacagtctgtctcgttgacccgccgcggacggtgagcccgtgggtcagccatttcacgaggaagaagatcgagagcatgacgagccaagtgttgacctgcgactctgtgatcggcagatcctgaaaaggcatcgggatggtgaagtagatgagcgctccggagacctctatgccgtcggaagcgggcgtcgtcagcacattgatgacgatcccggcgacgagcggaagtatcgcgagcacgaggtacagcctgtcgacgaaacggaatttaccgtccgccgggctgttctgtgtgctgctcacctgagtgatctcattcatttgtcatttttcacccccttccggattctgacttgttacaggcgcggaggaagaatcgtctgtttcgccgttttcttcgttttgctcacgcgtgacgacgagcgggtcggtcccgccggcgtccccgaggcgcttcgcgaagagcggtctgaaggcgatggcgatccggttgaaaaacagcgggattatcgcggcagccgtgttgaagcagggcgcgatgattccgatggcggcggcggcgacgatcatgaggtatctcatggtcatcgagaacttcactttttccctcgcggccttttcgtcgagtccgacagcggactgaacgccgagccccatcaggaaaaagttgagcaccccgatacccccgccgagcaggttcccgagcggcacggtgtaatcgaaatacccgagcgcgaggaaaacaagctccataataacgctgagcgccagcattgagaccgcgatatagatggtctcgcgtctgacgaccggatcaactttcttcataacgaaattctcactccttaaaaactaaagcaattaataaactgcccactgacaataattataccatatccgcttccggatttcaatagtcacaggaaaaaaattgtctgataatgtacaaacagcggacgaatgtaactttaagcgtcgaccctgagctgagcgttatagagcgccgcgtactccccgcctttttccagtaattctttatgcgtgccttcctctataatatgcccctcgtcgacgaccgcgatacggtcggcgtttctgacggtcgagagacggtgcgcgacgacaattgtggttcttcccttgcataactcgtcgagcgacttctgaatcagtatctcggtcgcgttgtcgagcgcgctcgtcgcctcgtcgaggatgagtatcgacgggtcttttaagaacactcgggcgattgagagtctctgtttctgtccgccggagagctttactcccctctcgccgattttcgtctcgtacccctccgggagcgagaggatgtagtcgtggatgttcgcgcgtttcgccgcctccatgacctcctcgtcggtcgcgtcgagcctgccgtagaggatattttccctgaccgacgcgttgaagaggtagatgtcctgctggacgattccgatgtttctcctgaccgattccattgtcagcgagtgaatctctttcccgtcgagcagaatctgaccgtcggtgacgtcgtagaagtgcgggatgaggtgacatatcgtggtctttccgccgccggacggaccgacgagcgcgaaggtctcacctttgtttatcttcagcgacacgtcgcgcagaacctccttcgcgccgtcatacgagtagctgacgtgcgagagggcgatgtccccggagagctttccggcgtccttcgcgccgtcgctgtccttttcgggcttcgcgtccattatttcgacaaacctctcgaacccggtgacgccgttctggtactgctccatgaagttgatgagcgtcatgaccggtgtgacgaatatgccgatcgacacgatgaaggtcgagtagtcgccgaacgagattttgttattatagagaaacagtccgcccgcgatgagcacgacgacgttgaagatgtcggtgacgaagctggttccggagtggaactgacccatagccttgtacgcggcgctcctcgagctgacgaacttcccgtttccgacctcgaatttttcggtttccttttccgagttcgtgaaggcttttgtgacgcggatgccggagatcgaggactcgagagcggcgttgatctcggcgaccgactcgcggctcttcttgaacgcgtcgcgcatcttgaccctcagcgagagcgagatgatgacgaggagcggcacgcaggcgaagacgatgagggtcagcggcacgtttatgcttatgaggtagcagaacgaggtgatgatcgtgattccggagataagcaggttttcgggtccgtggtgcgcgagctctgagatgtccatcaggtcgttcgtcattcttgacatgatctttccggtctcgtgtgagtcgtagaagctgtacggcagctcctcgaggcggcggaacatatccgagcgcatctcggcttgcatcttgacacccatgacgtgtccgtagtactgtacgaagtagttgagccccatgcgcacgaggtagacggcgagcagcccgatgccgaagatgacgatgagcctgtattcgcggttcggaatgaggtcgttgagcatccggcgggtgatgatcgggtagatgatgccggtgagcgatatgacaagcgacgccagcatatcgagcgtgaagagccgcaaatgcggtttgtaatagcttatgaatcttttcagcatttctttctttcccctgaaaaataaatatttacaacattataacacacttttccgggaatgtcaaacctttttttccgctatggcaaacaaagagcaatttttgtccggaaattattttgtcatatccattgacaagaggagaattatctgctatactgtagacgtattccgcaaaaacggataaggaggagacgctttatgaaatattccataagaaacatgaacgaatggctctacccggacgaggagctgacagagcggcggttaaatccgctccggacagtccgcggcgggagcgcgggtctgtgcgtgctgctttccgtcccggcggggacgagggtgacggcgcgcttcacgtcctccggcggggcgttttccgccgagctgttccgccttctgcccgtccgcgtggagcacaacacgggtgcgcacggcttcacggcggactgggagacggcgaaggagtattcgacgcgggaggctccgttcgatgtgttcgacgccgcgatgccgctgaccggcgagggcttcaccgccgggaaccggaacgaggcgctgtacctttccctgcgcgtccttcccgaggcggcgccgggcgcgtatgacggcgcgctgaccgtgacggcgggcggcgaggctcgggaaatcccggtgagcctttctgtcgcggacgttcttctcccgccggagagtctgaagatcacgaactggttcagcgtgagaaacatggcggcggcgcacggctgtgagatgtggtcggaagatcactggaaaatgatagagaaatacggcagaaagatgcgccgtatgcgtcagaacgtgttctggataacgtgggatctggtcgacgcggagaagacggacgccggcggatatcactttgatttttcaaatatagagcggcttatccggatgtacctcggaatgggcttcacgacgatcgagggcgcgccgctctacgcccgcgagagctgggacgcggcggagttcgggataaacacgccggacggaaaggttccctccctctcgccggagggttacgcgtactcggcggcattcctcacttcctggaggagctttctcgaggcgcgcggctggtatgatctgctgattcagcatgtcggcgacgagccgcacggcagggcggcggcggagtaccggattctctccggaatcatccgtaaatttctccccggcgtgccggtaatcgacgccgtcgagacgcacgagctgtccggcgcggtcgatatctgggtgccgaaaaatgactactacgagcggaaccgcgacgcgatggaaaggctccgcggcggcggcgacacgatctggttctacacttgctgcattccgggcgggcactacgctaaccggcttcttgacgcgccgcttctccgcgcgcggatgcttcactggggcaatttccgctatgacctgccgggatacctgcactggggtctgaatcactggcgggacggagatccgtttatctgcacgacgccgatgaacggcccgacgaaccgcctccccgcgggcgacactcatgtggtgtacccgctcgggaatgacgtgctctgctcgatgcgcggcgagatgatgcgtcttggagcggaggattacgagctcctgcgcctgctcgcggagagcgacgataaactcgccgagcggatatgcggagaagtcttccgctcgttcgacgactgcgacaacacagccgaagctttcgaggggtcgcgcggcaagctgatagacgcgcttgagaaaataaattaaaggagaattaaaaatgtcaatgacactgaaaataaccgatatagcccccggcatcctgcgcctgcgcctgtccgagaagcacgcccagacgctcgccgagcgctataaactgatcgagctcccggagaccctctcggagagcggaataaaggtcgacgagaccgccggaaaaataactttcccggacggaagaataatgtccttctcgatgatagacggagaggagtacgattccctgcacgagagccttgagaaggagttcgagaagaactacaccgactatcaggcgataatcggcgcgccggaagaagaggcgaagaaagccgaaaagaaggctgccgagccgaagtacacagacggacaggtccgcgccggactcgttcccgccgactccgttccggaaaacgctcatttcgccgtccgcttctcgatcctgccggacgaccgcttctacggtctcggcgaggcgtcgcgcgaccgggtcgagctgcgcggaagggcttaccagaactgggtgagatatcagtacaacgagatttcggttccgttcctgtcctcggacggcgggtatggttttctcgtcaacgcgaaccgccggacgttcatggacatcggcggtcgcgagaaggattcgctgattatcctcggcgagaacgacgagatggatatctttattttcgccggagagggtctgtacgacattctcccgaagtacacccttctgtcgggacgtccgatgcttctcccgaagtgggcgtacgggcttacttatatcgcgccgatcttcggcacgcagcatgacgttctttctcacgcggagaggttcaggaaggagcatatcccgtgcgatatgttcagcctcgagccgggctggatgaagaagttctacgattactcgacaaagaaggagtgggcgaccgagcgcttccacgtcaccgattacatggtcggaccgaactcggacataacgttcatctccgcgctgaagcgttacggcttccatctcgcgctctggatctgcatcagacacgatctgaccggcgaggcggagcgtgagctggcgcgcctgaacgatcctcagtacaacgccgagagcgacacgttcggcgagtcgtggtacgagcacctgaagaagttcaccgacctcggaatcgcgggctacaagctcgacccggcggacatggtctgctgctttgacaggatgtcccgcccgacctgccgcaacggtctttccccgatgacgatgcacgacacgaaccagacgctgctcgcgcgtcagatgtacctcggttactccggacagaccggtctcagaccgatgatacattactgcggcggcttcaccggaacgcagaggtggtgcgcggcgacgaccggagacaacggcggcgagctcggcgcgatgatctggctcgagaccctcgctatgaccggcttcatgaatactacaattgacatgaatatccatcacccggagtcgatacatttcggaatgttcgtgccgtgggcgcacctgaacgcgtggcacggcgcggaacagccgtggtgggcgggcgacgacctgcaccgtatgttcgtcgagtacgcgagaatgcgctaccgcatacttccctacatctattccgcggcgctcgaggggcacgaggagacaaagccgatagtgcgcccgatggttctcgagttcccggacgacgagaactgccgcgagctgtcgagacagtatatgttcggcggaaatcttcttgtctcggcgtacgccgattcgatctaccttcccgcgggacggtggaccgacgcgttcaccggcgaggagtatgtcggaccggcgacgattgagaattataagccgacccggacccgcggcggcggactcttcatccgcggcggcgcggtgatcccgaactggtcggatcgcgattacagcacgcagaaggacgacgagacgatagcgctcgacatctggccggacgaaaacacgtcgtatgtcttccgcgaggacgatggcgtgagcctctctgaggcggtctcgcacacgctgataacgctcgagggcgacgaggagaagctgaacgtgacgataggttcccgcgagggcgtatacaccggaaaaccggagcgccgcacatggctcgtccgcgtccactcgaagccgggcgacgacaggctgctcagcgtgaagtgcgcgccggaggatcgcgttttcttcaccgtgagggacggcggagagacgatcttcgacgtagacgcgtcggacgtgctcgaaaagtaaaaaaacagagcccggaaaaaatccgggttcttccgaaaggatgatatcatggaaaacatctcaaagaacgcggcggcgaacaccgtctccgcggtacatcagctcgacccgacgaaatacgtgaggatcaccgagaagccgggcgcgaagctgaaggttctgtttgtcggcaactcgataacccgtcatatgccgctcgagtcgataggctggacaggcgactggggcatggcggcgagctgtgaggagaaggattacgtccaccagacggtgaggctccttgaggaaaagctcggcgagccggtggatttctgcgtcgcgcagctggcggagtgggagcgccgttaccgtgagggcgcggcgccgctcgaggagttctacatcccggcgagggacttcgcggcggacatcgtgatcatccgcatcggcgagaacataaaccgcgacgctgaccatgaggttccctgcgaaccgttttacgaggagatggtgaagttcttcgtgacggatccggacgcgcaggtgatcgtcactgacaatttctggaacataccgcagctgaacgtgcagttcgaggcggcggcgaagaagaacggctggactttcgtgaagatcggcgacctcgagaaggacgagaggacgatggcaaagggactcttctggcacgagggagtcgcggcgcatccgagcgactacggaatgctgaagatagccgagagacttgccggagcggtaaataaaattgtgaaataaaaacgcggcagccgcgggatcaccgtgactgccgtttttttgcggaattttcgctgattattttgtatttacgcctgtttttctttctccgccgccttatccccgtgcagaagatacctgaacgtcggataggcaagcgcgatatcggcgaggagccacgcgaccggatccgccgcgcagagcgccgcgtaagccatcttcgacgcgcccgcgtcgatagctccgccgttgatcatcgccgggaggaaccagcacacgagcgttctcgcgacaagctccgcgcacccggcgagcagcgtgaactccgagtgcccgaccccctgtacgccgcttctggtgacgaagagcgcgccgaggatgaagtacatcgacagatcgacgtaaagatacgtgtttccgaactttatcgactccgccgaaattttgtcggcgctgaggaacaggtgctgatacgcgccgccgatggtcaggagcagaccgattccggcgaggacgacgtacattatcatgattatcccgaggctcttgagggttccgcggcggatccgcccgaactctcccgcgccgtagttctgcgcgttgaagctgacgatcgcggcgccgatggcgttcatcgggcacatgaggaagttgttgagcttatttgccgcgccgaagccgttctgcgcggggttgcctgaggtcatgatgccgccctcgccgatatcgaagctgacgaggcttccctgcatgacgatgattccgatggcgagcaccgagaactgaagcccgagcggcactccctgcctcagatgatgcgtgaggtcggaggcgctcaaccggaaatcctccctccggagcctgagatccgggtacttcacaaaggagtagacaaagcacgccgccgccgacagcgcctgagcgagcaccgtggcagccgccgcgccgatgaccccccacctgaaggaaacgatgaagagaatatccagcccgatattaagcacggtcgacacaagcaggaaaatgagcggcgtcaccgagtccccgagactgcggagcaccgagcagacgagattatagtagagctgcgcgaagatgccgatgaaaatgacaaggcagtagtcgtgcgccgcctgccagacccccggattgtccggcgtgaccccgatagccgcgagcagcagggacagcgacgaaatcgcgatcgcggtaaggacgaccgtgaccgccgcgccgagaattatctgcgccgcgaaggatttccggacccccgccttgtccccgcaccccgccttgatcgacgtcacgaccgagaatcccgccgtgcacccgaacgcgaactgaaggaagatgaatatcagcgggaacacatcgttgacccccgcgacctcgtcggcggtgagcgtctgcccgcagatggcggcgtcgctgatcgtgtagatctgctggagaaggtatgagaagattatcggcaccgagaagcgtaataacgctcccgcttcccctccgtgaaggaggtcgaccgatgagtttttcttttttgtgcttgtggattccacttgggatgatttcctttctgctttatcttttcttttccgatttttgtgcaatatgacagaattaattttcctcctgaaccacatccgagtcgggcgcttcggcacggatgagctctatctcggcggcgcaggcgcgtttgtccgagaaggcgtcgccggtggcgatgatttccccgttgcgcgccctgagtctgaaccggcagctccccgccttgtcgcggtagatttcgaagcgcgggttcggcacgacgggtatgtcgtcgaccgtgaggtcggagagattggctctggcggcacagcggctgacgcttcccgctcctttcgcgcacccggcgagggttttatagacctcccccgaggcgatggcgcgcccgttatctgtctcgagcgtgaacctgaagccggtcgcgaccggccttatcctgaacgttcccatgacgttttcctttcgctgtttttgtattccttattataaaacaaccgggcgcttttgtcaagtcccaaaaacgcagaatttgcgtaaacaaatttcggtttctttggcggtattccgccgacactgttcatttttttgaaacaataattgttccgcgcgggttcctgtttgattttttccgtttatttatttgatttaccccttgacttttcgcgccggattgtttataatggaatcagacacggaaagcatgacgtttccggtgaaaaaatatccgaaaggaagaatataaaatgatagttttcgacagagcgaaaataaaggataagatctatgcctgctggctcggcaagaatatcggcggcacgatgggcaccccgtatgagggccgcaccgagatgcaggacattcagggcttcgcgaccgcggagaacgtcgtcctcccgaacgacgacctcgacctccagctgatctggctgagagcgatgcaggagaagggtccgaaggcgctgaacgagaagatcctcggcgagtactgggtctcctacatacccccgcactggaacgagtacggcatctgcaagaacaatatgcgcatcggacttgaggctccgctctgcggcgagtacaagaacgagtggaagcactcgaacggcgcttggatccgcaccgaggtctgggcgtgcatggctccgggctgcccggatatcgcgatgaagtacgcgcagatggacgcgtgcgtcgaccacggcgcgggagagggcacttacgccgcgatgttcgtcgccgcgatcgagtccgccgctttcgtcataaatgacctgagaaagctcattgagctcggtctgacgaagattccgtacgactgccgcatggcgcagacgatccgtctgctgcttgactgccgcgacaagggcgtcgactggcgcgagacccgcgagctgctcgtcgagcacacgaaggacctcggctggttccaggcacc

SEQ ID NO: 245 - DNA, 7180 bp, Unknown
  16S sequences of unknown bacteria
aaccggaatccatcttttctcgctgccgattcaatctattgggtgacacgaactccccggcatccggtaggctcaacctgctcaaatcgaacgctgcaacaagaggatggctgaccgtcttcaaagcggacatacgaagcccaagggagtgaacgtcagccagttgctcctcttattgtagcttaggcacgagatggagggaaagccggactggctgcccggctttcctgtccaaatttattgtaatagggagtgaaaaggatgagcacatatcagaaggaacacatggaaatggaatatgcccgtcattttttgagagcgctgaaactgctggaagaagcccagcgtggcaacgaagatcctgacacactgatcaacggcttattacaggcggcgacagaattttacgatgcagacagtcatatattatcgaagcggattgggcggcaggcattggcctgagtacctatgagtggtgccaaaaggggatagagtacatgggcggcaagctgcagtatctggaaatcaaaaatttcatgagatgggtggccacactcaaaaggagcgaaccgatgatctttacagatatcgaggagctgcgcaggacagttccggcggaatatgattttttcacacaatacggcgttcgctccctaatcgccgtccccttttccaaacggctgaaccagggttatatcggcgtagataacccgaagcggtacggcgcagatcctgcgttcctgttcataatcgcttacgctgtcgcccaggaattaaatgaaattaaactgaataagagcctggcggccgcaaagcaagcgctgaagcttactgcaggggaagtgcggatcaactgctttaatgggctcacgatacatggcagcaagggaacgctgtccgaaaaggatttcatttcttcccgctgctatacgctgctgtcgtatcttgcggtgacggctgggaaccgggcaacggcaaatcagcttgcactgatcctgtggccggatgagtcctgtgagatcccgatgaaatccgtgcggaacattgcttacaggcttagatcgctgcttggctatgttgggctggaggatttggtggtctatgccaacggcatattcagcttcaatccggaaatcaaggtagtgacagatgtggggttattcgaagaactatgtgacagtatcgagatggagaacaatccgaaaaagcggtatcggctgtatgaagctgccgtcggactgtattccgggaatcttctgccacggttgtccgataatatttattttatcccgagtattacatactatcagggcctgtatttccggctcgccggccggtatatagaacgccagaccgagtgtggcgagtatgtctatgcgcacaaggcggccaaagccgcactggcctttgacccgtttaacagtagcctgaatatgcacttgaccatactgctctaccagcaatcgggagcaggaactgcaaatgccttttatacaggaatcaagcggcatctcacggaggcgcatatccagaggataaaacaaacatgtccgaatatgattatctgacagccggaggtgagcctgaaatgagacgcggatgaggccaaaaatatgttgcagatgagtcgcagacgagtcacgagctgagacgcccgcctgttagtatagatttccgtaggttaaaaacgccggaaatacagcgcaggcgggtggctgtccatgtatgcgaaccatacaacgcaagccgccttccgaccgggagggcggcgttttttcttatcaggcttacgatcagaccttacaggatttttgcggccattttatgccaccccaccgaaccgctgcgattcaaaccgccccatagtgccgctttgcgcctacagcaatcttgctgtgggcgcttttgcgtatcatggcggatttcattgccgaagtccaccggtcaatcgttttgattcactcaaaaacgattgattggaggacaaagagatggatgacaggcatccaaagagaagaaaggacaagtataacccctataccctgtcgatgatcgacgggaaatgttatctatctttcagggacggccagggcgtaccacacaggctggaactggatgtgaagctctatgccgtgtttgaccggtttgagttggacgatctctccttccttaacgagcaggagaggcaccttgactggaccgagctgaacgaagagctgctgagccgtcgttcggcacaggagccggccccggtggaggacgccgtctatgaatccatgcagacgcaggcgctccgggagggcgtcaaccagctgccggaagtccagaaaagaaggctgcagatgtatttctttgacgggcttacctatgaggagattgcggtgcgggaagggtgcagctatcaggcggtacagaagtccatagcggcagctctgaaaaaaatccggaaatttctgaaatagagggttgagttttgtgtggaaggggaaagcgaacaaatgaagccaaacccgaggctccctctcgtttgaaaaacgaatataaataaaccgggcgttccctgcttacgcggccttagctgcatacaagcaaggaacacccggctttttcgatctgcctttttactccatcgcttccctgtattccggatatgtttcctgaattttccgcgccagatcccagatctcctcgtcgccggaaagcacataggatgttccgccggcgccatggaaccggttttcatcaaaccagaagaggcaggtatccccatccgctgtctcaaactccaggatccggctgtctgtagagccgctgaaagctttggatacaatggtcgtttcccgtaatgcctgcaggatttcggagatgatttcttcatccgtcgtttcgtagcgtcccaggatgttatcgttgtgatgataggtaagcgcgaccggcagctcttccagcgactgatccagaaattcctgctggctttcggtgcaataggcccgaagcgatgtgtcttttggggaacaccccgccagtacgcacaataaaatcagcaaaacggtaattttaatcctcttcatccgaatccctttctgactgtcatagcctgcgctgtttttctatgtagagctggtacaatcccatgcgtgattttacacccgctttctcatagatcgccgcgatatgccgctgacaggttcgccgggatagatacagtccatctgcgatctcctgaatactttcctctgaattgaccagcttgtcaaatacttcggtttccttgggcgtaaggataaacagctccgacaaaagacggaacgcttcctgagggtccaggtctgtcgggatatccttgggggtgccggatgaaaccggcatccaggctgtataaagatagatgactacgctgacggccacaaacaggaccagtgccagaatgatggatgccatgccattgctgtcagaaacaagcaacgctacagaggcgttggtaagcaaagcggcgctcacgttattcatggcgcgccccataccggcccacagcgctggcgtgggcatatggcgggcaaaatccagaaagctggtggtgaagaataccacaaaaaatccagccgaaagataaaatacgatcaggccgatcaaaaacgggccgcccagcttgagtactaccacacagatgacggacatcagcatgacgcagtacatcatcatggccataaatttccgctttcggatatcaaaaagaaagccggcagaaaggccgcttaccgccagcaaaagccgcggccattgcccgatgtcagtgcctgctgcatgatgcatggtgaccgcgttgtccagcgtactgaagatacatgccatcaggatgacaagcagtgcaaggagtccgccggcggcgatcttctttcgggttcccttcccatcatcctctatggcgggggactggagttcttccgcttctgcgttttcctggcggcaaagcctttctgccttcagcaacagcgctaacgctacaagggcaaagagtgaaagtatcaaggcttccgcagtttctagatccacaagattgttatttagaaactgcaggaagatcccaagggcataggagacaccaaccatacgcgccagatgggtgcgatccctcgccagtttgaaaaacaggtagtgggccgcgcttcccaatatccccagaaacaggaacaatgccattccggagagcagagtggacgaataagaaacatgtttttgaaccaaaaaattgcatactgacgctgctagtgcaaggataaaaagtccaacgatttgtacccgccttttcaaaaggcgatgaaacagcggatagagcaaaaaaccgacagcgcttattcctaacgcgtagttttgcgtaatcaccgttttttcttcccctgccgtaagcgagatcatgtttacatataggtactcggctccaagaaatagaaaagtaaaaacactaagcagcagaatcgcataaatggattttggatttgtgaagcttttctttattaccatacgtcccattccaccccctttctccgcaatggtacagttatagactattatactataaacggcatggattttcaacgatttcggtcggttagagactttttttcgctgacgtttttgcggaatatacaatccttcctgtttgacctaaaccagggattctcctggataaaaccgtatatttttggagctgcgttccgcatccgggaactaccggttttttgcgcccgcacatgccgttttaccgcagccacacggtgcagccgcggtaaacaaggaaatatcctgaatgagagaagctgtctagtaggtgatattgtggacgtaaaaataaatcagcaggccacccagcccagcgccgcttatcaggcttgcccacgtccagaataaagacagcagaagccccaggaaaataaacacgcagaacaccacgacaaaagcgtctctctggaagagcatgatgaatttgatacaggcgatcacaacccctgccatcataacgagagccccaagaagagccagaacaaaaacgtacacccccgccatctggagaattgagatcaggacattaaaaccaagacctatccccgcgatcaggctgcctactttgatgaggctgtcacgggaagcgctgaacgcgccaaagaaataagttgcgattaacccgttggagccaatgagcagcatgtttacaataatgacccattccgcgcttatgtagtacgatgtggaaactgccaagctgataatagcggtgagaacagtgaggaaccccccgatggcgccaatgagatggtacggccttaaccttgcatacatacgatatatcccctttctgatcctgcgttccgaaaaggccagctgaagctttttggacattctgtgtcttggccgaccttccatcatgcgaacttttcgttttttatcatagcaggaagccggtgtttttgataggccgctttagcgccaaactaaaaaaacactgtggcgcacctgcgccattttgagaaacgaagctttggagccagaaaattgaggccatccaccctgtatagagtgtaacacttcttaagtttacaggatgtaacaggccgctgtcatgatcggcaatcccttttgcacaatcaaggtgtttttgaattttcacacaaaaaatagattggcgcaggtgcgccatgcgttttttgataaattggcgcgaaagcggcctgcacagatccttaaaaaaacgatacagtaaaaccataaaaggacaaaaaagagtttggatcgcctttggcgttacaggccgagcagcaaagcgattcatgagaccaggacagaagaaaggaggcacgaatgaaaaaaagaggggcagcggcacttctggcagccatctgtttgctggcggggtgtgcagcatcagatcctgcgcttccggcagagactccgaccccgacagagacttcgtccccggcataccaaggggactccctttttgcttactgtaccgaaaggcagcgggagcttttggagctgccccatgaggaactgccggtggaactgatctttcaccattggacggagacggcggcggactacgagacaagggacgaaacggtgatcgccggggtcttgcaggcgctgcgggatgtgtcggtggaatccgagtcacccatcgtctctacagataaccgggggcttacatttgtgacggcgcaaggggatacctacagtttctggtttgataaacgccggttcgaaggggtggatggcaggtgctatgtcctttccgaagatgaaaagctttgggaattggtgtgggggattcgggcggcagacccagactatcaggatctgatgagataagcggtatttccccatgatttctgcgaaaaatgcggattggcgcaggtgcgccacataatttttgggaaattggcgctaaagcgacctgcacaaatcccgaaaaaggcgctacagtaagaacagcaaaaaaccagggatggttttggataatccttaagatttctttatcaggaggaaaacaattatgagacagtgtgacaatggccatttttacgatgaatccagattcgatagctgcccctactgccaggagggcgccggggtcggcaagacggttgcggccggaacggtagggaagaccgtggctgctgtgccgggcggcgctgcgccggaagcagacagaggcaagacggtgggcattattaaaaagaagatcggtattgatcctgcagtaggattcttggtctgtgtttccggtccccatcgcggcgcagattataagctggtagcaggcagaaacttcataggacgggcagcggcgatggatgtggccctggcggatgacgataccgtgtccagagaaagccatgcattggttacatatgacgccaagcataacagcttttccctttctcccggccagggcaggggcatcacttactgcaacgacgagcaggtggaaatggtacgccccttaaaagcctacgatgtgatcgaggtgggaaagagccagcttctcttcctgcccctgtgcggcgagcaattccagtggaatgaggagtaaaggatggagcgtgtactttcatggttaaaccagccgctgtttccggataccgtcatccgcgtctggatggcggttgcggcgggcgcagcg

SEQ ID NO: 246 - DNA, 2110 bp, Unknown
  16S sequences of unknown bacteria
aaatattgtttaatctctaagatagtcattttcttaactccttttgatctcaatctccgccacaatctcatcaattttcttctatagatgctttcttgccacattctgtgcactttcagcattaagttttttcgatgttgatgacctcacgggctcctcccgctcagcgtaagtggaaacgaggaagcatactcgtcagttttttcgcttgattccgattttcagcagtatttcttgtatcttctgttcttcaatcccataatccgccgcctctccatataaacatttgatccaacggttatactcgctacgtgtttctccgcgttttacaacctgtttacgcattcgctctaagtatgaagctatcgtatcagaatcacagccatcttttatcaggtatataatgacttttcgagtatagtaattattacgcacatcgctgcggcaaagatagtattctgtaaggattttacttcttgcaatgatatgtagcaggtcagcaccatatggatcgttattatctgagacactgtctggtgcgagacgttcatctgcatactgtgtgatgagccgttcccagtactttgttacggttttaggattttttcgtaccagtttctgaaaggatgcatatatcgcttctctattacggagttcaagtgctttatgaaataactccttgggatcctggttcctatccagcttgattgctgcgctgtcaatcgcagcattttcaatgtcatttttcttaaataagtccgctggtttttctggaagtacgaaatggactttactcagtttatcccgaaggattgcggaattgatctgctctgtgtatatccattcaactaataccaccccattttgcttgcactttttctttttgagagcgtcattttccatccgatgttctaatgccgcctgtccgccgaagaactcaacgctttccttgatactcaaaaccaacttttatagatggcacataggcatctaaactttgacgttccaaccactgactatgatattgaaaaaccacatcagggtaatacatcttgactagtgaatacatctcgtattctcttttccaacgaacgtataacgcttggtcaatatcaagcgattcaagaattgagcgaagcgtttccttatacagtcccaagtttccaatacagtgggctgtgcgatatgtattgatgtgcatatcaatatcgtcaagtaattgtaaaagtctttctcccatgcattctaaaaagcttggatctgtaatatttgcatgattccgaatttggatatatgcagatctatctggtcgtgcgccaagaatctttaatccgtactgcttcaagtccctagcgatatttttagccggttcctcgtaaaatgtcagataagaatgaatcttgcaataatgcaatgcatagtccatcagtccgatgtaatcgcactgttcgcgatcaaatacggtaaagtagacaaaatcactatcttcagcaaatagacttggaatgcgaatatgtcgtaacgcatactttgcaattagcaatacacgtaagcgtcaaacctccccgcgcataaaaggccgccatctcaaggagaactgttgctcaccgagatggcggtcaattattttgcagcacatagcattcttccggggcatttgcgggaagcagcttttcagcccatgctccatccgttttgctcagccccggcgcattttgcaggagccatagcagatagcggtacggatccaagccgttcgccttcgccgtttcaatcaggctgtagatcacgctgctggcctgtgcgccgcccggcgtattggcaaacagccagttcttcctgcccatcacaaagggcttgatgctgcgctcagcacggttgttgctcagcttcagacggccatcctccagataccttgtcagacacggccactgctcccgcaagtaatggatcgcctttcccagcgcggatttcggcgccgttttcgcctgcatcgcatttgcccatgacaacagcgcgtctaaaacaggtttctcctgttccagccgcgccaggccgtctatgcctttacgcagatctgtgtagccacaggcaatatagactttatctg

SEQ ID NO: 247 - DNA, 13503 bp, Unknown
  16S sequences of unknown bacteria
ggcggtgtataatatacatcgagtaaaatatttatataaggtgaaaaatggaaataaccgctgaaacactaagtaaaaatacaaaggaataccaaatatacgatatccgcggagaggtggacaggctctacggcataatacccgactcagccgcagcgacggaagagagcatactttcatgcccgccggaggataagtcaagaccgatagtcatagtctgcgcgaggggacagataagccttgatatcgccgaaaagctgtgcgggatggggtacgctgcctacagtctcaggggaggatacgcggcgtggctcagggaagaggtgaaaaagcagtctacggaggacgaagcatacgcactgcgcaaaaaggtggaggagagcatacagaagaaattccactccgcgctgatgagcccgttcacaaaggcgctcaaggactacgagcttgtgaaggacggcgaccgagttgcggtatgtatgtccggcggcaaggattccatgctgatggcgatgctgtttcatgagcttatgcggtacagtacggtgaagtttgaggtggaatatctcgtgatggaccccggctacaacgaagcgaaccgaaagatactcgaggacaacgcgaaaaacctcggaattccgataaaaatattcgagacaaggatattcgagtcggtgtacaaggtcgaaaagtccccctgctacctctgcgcgagaatgagacgcggatatctctacagcttcgcaaaagagcttgggtgcaacaaaatcgctctcggacaccactacgacgacgtgatagagacgcttctcatgggacttctccacagcggacagattcagggaatgatgcctaagctgcacagcacgaactaccccggaatggagcttatccgcccgctttatttaatccgcgaggacgatatcaaggcgtggcgcgactacaacggactgcattttctacagtgcgcctgcaagttcaccgacacctgcacgacctgcaacaacggtcagaaccactcgaaaaggcaggagacgaaggagcttatccgcgaactgaaaaaatcgaatcccgatgttgaaaaatgcttgttccgcgccctcggaaacgtgcatctcgacacaatgataggctacaaaaccggcggcgtgcgtcactccttcctcgaggattacgataagtaaaaaaatcggaaaaatccgaaaaattttgcaatgaaaccgcctgccccgacactatatgagtgaagcgaaacaatagagtgacgaatcccgaggaggtaagatagtggagctgatgtcggaatacatagaaaacggttatccggaaaagctgttttactattgcctgagaaaaaccggagacgttcgggaagcggaggatcttgcgtcggatatttctctatgcgtaatacaggagctgtcgaggggtgttgtgccgcagagcttttccgcgtgggtctggaagattgcaggcaaccgatacgcgcgctgggctgacaaaaggcgtaggacacgcgataacacagccgagcttgacgtgagcgaatacgacctgcccgattatgacagtgcggctgactcggacatgatactccgtgagcagatatcgatgatgcgccgtgagcttgcgttcatttcgtcggactaccgtgaaattgttgtgcggtactacctcgaaaacaagcgcgtcgcggatatagcaggatctcttggcataccagagggaacggtcatgagcaaattgtttcgtgcaagaaaaatattaagagagggcatgaacatggcaagagaattcggaaaaatgagctacgcaccggaaaatttgagattcgtcatgaacggaatggatagcgaaaacggagcgccttggcgttatctgaacagactgcttgatgttaacattatgcttgcggcatgcagaactccatccaccgcagaggagctttcggttgaagtcggagtcgcactgccgtacattgaggaagagctgaatgacttgaccgagaacacgctcatgaagaagaacggtaaaaaatacgagacgaacttcttcataatcagcgcggacgctcagagaaaggcggaagagcacctgaaaaccgtaatagagccgctcacgcagtcgctttgcaaaatgagcgtcattacacaaagcggaattgtcagcatgggctatcagccgaaggaggacgagctgtggttctatctcatgagagaggtggacggcgaacgctataaggtcgagaattcggttgacagtgataaagcagacatgagcacaataggtccgtggggacataccgtaagaccgtttaatggagagtgggatataatcggtcgcgaggtatatgacggagaaacattcaggataagctgtctcggatgtgtgagcgacccggacgcgagactgaagccggagataaagtggcttaaatatcacttcccgagtcatcagcatcgctatgatataagctatgacgatgcggcggctctgtgcgatattgtccgcggcaatcctgtggagaagtggatggaggacaggctttcagcataccgtttgataagacgaggggaaaacggacttgaaccgactttccttgttataaaagaaatcaataagctgaccgatgagacgcaggcggagtacgatgagctgacaaagtacgcggaggagcttatgatgaagcactacctctactgccgcgagcttgtgaaaaacgaaattccagagccgctgaaaaacgacgcgaaccagatcgggcaggcgtgcggtgatctgttcagcctgagagaagcggtgcttgacgaggctttacgcgagggactgcttgctctgccggaggacgagggcaggagagacgtactcggagcgcgccttggaatgtaaatatacacacaaaaactgaagaaatattcattctgccgctgtcgtggacaaaattccgtgacggcggtttttccttcgttttgtgcagattatgccgcctttgaatttcactcaataaaaatacgtaaaacgcgccgtgcattcgccgaatatgcgtccgagaataataaatattcgcataattacagcgttcatccgcctttttgccataattaacaatcatcaaggtaaagcggtaaaaaatcatgtagaaatagtgaattgacttttacatgaatttttattacaatatcggaaaggcaataagttacctttttaaatgcatttgcgcagagcattataattttttaccaaagcaaaaaaagcaaaataaagaaggtggatatgtttatgaaaaccgcaacaaaaatagtctccaaactgctcgcagctacacttgcactgactctcggcgcggcagctctaacctcatgcggatccggcacaagctataccgatggcaatacggaatatttcatcggagctacaggaccgcttacaggcgacgcttcctcatacggaatctccgtcgaaaagggcgcagagcttgccgtcgaagaaattaacgcacagggcggactaaacggagtcacattccactttgaaatgctcgacgacggcgcaactgccgacaaagccgctacagcttatactacactttacgaaaagggtatgcagatttccatcggaagcgtaacctccggctcatgcgcgtcatttgcggcttcctccaaggatgacaaggtgctgttcatgactccctccgcttctgctgccgatgttattgcggcaagcgactacggattcagagtgtgcttcggagatccccagcagggtactatcgcagccgacaccctcacaaaggactacagcaaaatcggcgtaatctacgacacaagcgacacatattcctccggtatctacgctgcgtttgaagctgaaatgacaactctcggcaaaaaatccggaacagattatttcgtttatacattcaacaaagaaaacaacaaggacttctcaacacaggtcgacggtctttccgctgaaggctgcgaggtgatattccttcccatttactataccgaagccggacttatcgcaaagagagcagcttcaagcggatttaacgtcccgatattcggatgcgacggacttgacggcatagcagaccagctcgacagctccgttacggcacaggtgcagtacatcactccctttgacgtgaacagcacagacgccgatgtagctgcatttgtttccgcatacacagagaaatacggcgacactcccgaccagtttgcagccgacggttatgacgccgtgaagatactttactccgcaatgaccgctgccggagtagataacgttacaattgaccccgcctccctcgcggatcttgttaaaccggtactcaccggcggcacattcagctattccggcgtaacaggcaagcatatgacatggacaactgacggttcctgcaacaaggacgccaatatcgttacactcgacagataagagcgggaaaatataaccaacacaatatcttaatgcagcgataccaaggctcattccgcgcggatttacagccttggtattactgttataaacacaggagaggataaaatcatgatcaacacattgataaacgggctttgtctcggcggtatctttgcactgatagctctcggctacacgatggtctacggtatcgcgaagatgctgaactttgcccacggcgacatcataatggtcggagcgtatgccatacttaccacgctttcgctaacaggactaactgttcccgctgtagtcgtcgccgtcgtcgtctgcactctccttggaattgtcacagaaaaggtcgcatacagacccctcagaggcgcgtctccgcttgcggtgcttatcacggctatcggagtcagctacctgcttcaaagcatagctcagcttgtctacggcactaaatcccgctccatttccatcggcaacttcggtactgtcgatttcttcggcgtctcgataagcgtctcgtcccttttcacactcgctctctgccttgtcatcatggtcggacttacgctctttatcaataagacccgtatcggatgcgcaatgctcgcggtatcggaggacagaggcgcggcgcagcttatgggaatcaacgtaaacggaattatcaccctgacctttgccataggctcggctctcgcggcgtttgcaagtatgtgttacctcatgcagatacccagcgtgacaccgactctcggctccatgcccggcataaaggcgttcactgcggctgttatcggcggtatcggctcaatccccggcgctatgatcggcggaatccttctcggagttattgaaaagctcgcgctgagtgttcccgcacttgctccttatactacagcaatagagttcggactgctcatcgtgatacttctgtttaagcctaccggactgctcggcaagaagacaagagagaaggtataatcatgaaaaagccatcaaatttcaagctcaaatacataatcaactatatccttgtccttgccgtgttcattccgacagcgataatgggattcaccggcagcataaaaggctcgtccgcgctccttctcactcagatagcgtacagcatggttcttgcggtttcgcttaaccttgtcgtcggatttctcggggaactcagcctcggtcacgcgggattcatgtgcgtcggcgcgtatatcggatgcttctgcgcgaactatatgcatgctgtcattccgtcaaagctcgcggtgcttgtcatctccatgctcatcggcggtatctcggcggctgtcttcggactgataatcggcttgccgtgcctgagactcaagggagactaccttgccatagtaacgctcgcgttcggtgagatagtccgcacggtgttcatgaatcagccggttttcggtggcgcgctcggacttacaacgcagaaatacggcaaaaacctgtacataatcgcgtttgttgtggtgcttttcactgtgttcgtctctcaaaacctcatgcgaagcaagcacggaagagctattcagtcaatacgcgacaacgaaattgcttcccgtgcgatgggcgtcaacgtgacctactataagctgataattttcgtgatatccgcgttctttgcgggcgtcgcgggagttatctacggtcacaacactacgcctgtagactacagtttcttctcgttcaactattccatagaaattctcgttatggtagtcctcggcggcatgggcaacatcagcggctccatcatctcggcggctgtgctcactttcatcaacgtaaagctccagactcagctctccggcgaccttgcggcactgaaacagctcatctacgcgcttatcctcatcgtaatggtaatgtggaacaacgcgcccgctctccgtggaatccgcgaaaaggtgaatatcagaagccttatcgacttcttcacggaaaaggtgctgaaaaagcaggagacggcaccggaaggcggcatagatcctccggcaagcgcgtcttgggataagatacccacgaaaatcccgatggacgctatcctctcaaccgatataacaccggacaatccctatgaagccgacgcacccaaaaaggaggaaaagagatgagcgaatacattcttgaaacaaaaaatctcggaatatccttcggcggacttaaggcggtgcaggacgtaaacctcaagataaagaaaaacgagctttacggacttatcggaccgaacggcgcaggcaagaccactgttttcaatatgctcacgggcgtatataagccgacaaccggttctttcatgctcgacggcgaggatatcacgggaaaatcccccattgacataaacaaaaaaggtatcgcgagaaccttccagaatatcagactgttctcgaatatgtccgttatagacaacgtgcttgtgggaatgggcaaccgctcgtcctgcaacctcttcgagagcatattccgtctcccgaggtactggtcaaccgaaaaggagcttcgcgcaggtgctcgtgagcttctccgtgtgttcggactggacgaggaaaggcgcaccgtcgcgtcaaacctcccctacggcaagcagagaaagctcgaaatagcacgtgcgcttgcgacaaatccgaagctgcttctccttgacgagcctgccgccggaatgaacccgcaggaaaccgcggagcttaccgagacaatccgctttgtcagagacaactttgatatgacggttctccttatcgaacacgacatgagccttgtgtcaaagctgtgcgacgagctgaccgtcctcaacttcggaacaactctcgctcacggcaaagtagaagatgtgctgaacgatcccgaagtcgtaagagcatatctcggcgaataaggaaggagaagttatggctttacttgaagttaccgacctcaaagtcaactacggactgatacaggcgataaaaggcgtgtcgttcactgtaaataagggagaaatcgttgctctcatcggtgcgaacggcgcgggaaaaactacgataatgcactccgtatgcaatcttattcccaaagccggcggaaaggtcacgttcgaggggaacgacattacggcaatacccgcacataagctcgttccgatgggaatatcacaggttccggagggcagaagaatctttcaggagctgacagtcgcggagaacctcaaaatgggcgcgtataccagacgtgacaagaaagaaaacgaagaaactctcgagcggatgtacaaacgattccctatcttaaaggacagagcgaagcagattgctggaacactgtccggcggagaacagcagatgcttgcgatgagccgcgctcttatgtcacacccgaagctcttactgctcgacgaacccagcatgggactgtcccccttgtacgtcaacactatctttgatatgataaaaaaagtcaacgaagagggtacgacggtgctccttgttgaacagaacgcgaagaaagctctcacaatagccgacagagcgtacgtccttgaaacgggtatgatgataaccgaaggaacgggacatgatttactcgaagacgacagcataaagaaagcatatctcggcggataaaatatgaagaggaacggaaaaccaccgttcttctttttttgcgtgattttatttaagcttcaataaaatgcggtgaaaaaattaatttttgaggttacacattatgttatcataacacaaaaacgaaaggagtaattattttctcaaatgacagcgttggaagacagattgatatgtttcaattgcgaaactatcggtgcggagaaaacggtaagtcttaaagtcagataccgtcttctccaaagggtcgagaacaccgatattttttctattgaaatcgttacagatatgtgcggagaaaaggatgtggctttcgcagacagcattaccgcagatgtgtacgaagccagatcaattttccaagcgctatatcaaggcagagtgacgtcgtgtacattgttcgatatacttgaagacagcataggagtacagtagcgttgccgcaccgaagcgggatcgttttttaaaggagtctctgtgattcggagatttccttgcgagacggttccgccgttttttgtttgcgcggattttttcacatgagcgtcacatggattttaccgaactttcgggattaaaattatataaatcacttgacaaaatatataaaccgagatataatatatgtgtcagaagaagaaaggatggtacagaaatgaaaaagacactatacagcctgatgctctccgaagaggtcatgcgcgagatagacgctcttgcccacaaaatgggaacgaaccgctctaacctcgtgaacatgatactcgcggaaaaggtggaaatgcgcacacccgagcagcagatgaacgatattttcagcgggatagaacagcttcttgcttcatcgcgtgagctgataccgctgtttgcgccgaacacacagagagttaccgtccgctcaagtctcgaatacaaataccatccgacagtccgctacgaggtcgagcttgtaaacggatttgttccgggtgagccgataggtactcttaccgctaatttccgcacgcagtcgcagggacttcttgagcttctcggaagatttttccgctgtctttgcaggatagagggcagagtgcttccggttgacgttgcgtactcgttggacagcggaaggttcacacgaactctcgcatatccgatgacgcgtgacggaaaggacggcgtgataggcgcggaggatatagcaaaagccatcacatactacgtcagccttgtcgataagatgatgaaggcttgcgtgggtggtgcggacgccgaaactctctccgatatgtattccgccgaccttgagacaagacaggtaatactttaagacagatttgtagataaattataaatttgcatttagcttgtatttatgaaatatcccccttcgataaagaaaggatgatgatatatgaacgctgaaaaattcacacagaaaactattgaaataataaatgacgctcaaaacctcgcaagagaaagacagaaccagactctcgcggctgagcatctgttatacgcacttctcgcaatggacggcggacttgtgcgcaccctcgttatgcgtatcggtcagaagaacggcaggggcgacatcatagactccatgcttaacgataccgacgcggctgtcgaaaagctcccgaaggtaagcggctcaaacggcgagctttatccttcgtcagaggtttccgcagtcctccgttttgccgaaaaagccgcggcaggcatgaaggacgagtacatctccgtcgaacacatcatgctcggtcttctttcggaaggcggcagagctgtacgcgatatctgcgcaagatacggcgtcagcacgaagagcttcacggatgagcttgcgaaagtcaaaacctctcccgtgacgagcgacaatcccgaggatacctacgacgtactcgcaaaatacggcaccgaccttgttgaaagagcaagagaacaaaagctcgaccccgtaatcggacgtgacagcgagataagaagcgttgtaagaatcctttcgcgtaagagcaagaacaaccccgtgcttatcggtgaacccggcgtcggtaaaaccgcaattgccgaaggccttgcacagcgtatagtccgcggagacgtacctgacggacttaaagataagacgatattctcccttgatatgggcgcgcttgtggcaggtgcaaaataccgcggcgagttcgaggaaagactgaaagccgtgctgaacgaagtcaaaaaggcggagggcaagataatcctcttcattgatgagcttcacacaatagtaggcgcgggcaaaaccgaaggctccatggacgcgggcaacctattaaagcctatgcttgcaagaggtgagctgcactgcatcggcgcgaccacgctcgacgaatacagaaagtacatcgaaaaggacgcggctcttgaaagacgtttccagccggttatggtagacgagcctacggttgaagacacaatctccatcctccgcggacttaaagagagatacgagatattccacggcgtaagaattcacgataacgcgcttgtagccgccgcagttctgtcgcaccgttacatcacagaccgtttcctccccgataaggctatagaccttgtggatgaagcgtgcgctatgatcagaacggaaatcgactccatgccgagcgagcttgacgacctgagacgcgacatcatgcagctcgaaatcgaggaaatgtcgctcaaaaaggaagacgataagctctcgcaggacagacttgcaaagctgacagaagagcttgccgacaagaaggaaaagttcaacgaaatgaaggctcgctgggaatccgaaaaggacgcagccgagaacgtaaagaagctcaaagccgatatcgagaagatgacgggcgacattgagcaggctcagctcagcggagagtacgagaaggctgcaagactgaagtattccgagctgcccgcactgcaaaagaagctcgacgaagccgaagagataacggaaaagcagaaccagaatatgctcgtccgttcaaccgttacggatgaagaaatcgccgaagtcgtagcgcgttggacgggcattccggtatcaaagcttgtcgagggcgagagggaaaagctcctccacctcgaagatatccttcacaagcgcgttatcggtcaaaacgaagccgtaagacttgtcagcgaagcaattcagcgctcccgtgccggaatctccgaccccaacagaccgattggcagcttcatgttcctcggacctacgggcgtgggtaaaacggagcttgcaaaaactcttgcggaatgcctgtttgacgatgagcacaaccttgtcagaatagatatgacggagtacatggagaagtacagcgtgtccagacttatcggagcgcctccgggatatgtaggatacgatgaaggcggtcagctcaccgaagccgtaagacgtcatccgtacagtgtagtattgttcgatgaggtcgaaaaggcgcatcccgacgtgttcaacatcctgctccagatacttgacgacggcagaatcaccgacagccagggcagaaccgttgacttcaagaatactataataatcctcacctcaaacctcggaagccagtatctgcttgacggaatcacaccggacggcgagataagcgaggacgcgcgcgctaaggtcatggctgatctcagagcgtcgttcagaccggaattccttaacagacttgacgagataatcatgttcaagccgctcacgaaggaaaacctcggcggaatcattgaaaatctgctcgcgggtcttagaaaacgtctggctgaaagaagcgtaggcggcggactcgagcttgaagtaacagacgcggcgaaggagcttatcatcgacaagggatatgatcccgtctacggcgcacgtccgctcaagagatacctccagggcactgcggaaactctcatcgcgaaggagattcttgccggaaacctcgacacaggcacgacgcttgtgcttgacgcggagaacggacagctcacctgccatcccgtgtataatcccgaagtaaagtaatagaaaaacagagaaaataccgttcatgcatgaaaaactgcacgggcggtattttttgcttttcgttcaaacaatgcggatgaatttttctcacgagatgtggtatcataaggacgatatggtatcctaataaaaaacgaaggagaaaaagctatgtgtacggcggcaatatataaaacaaaggatttttatttcggcaggaatcttgattacgaggtgtcatacggcgagagcgttgcagtaaccccgagaaaatacaaattcgtctttaccgaggcgggagagtgcgcggagcattacgcaatgataggcatggctcacgtaagcggcggctatccactgtactatgacgcggtgaacgagaagggactgtgcatggcggggctgaattttgcgaaaagcgcggtgtatcacagctctacggatggaaaaacaggcgtcgcgcagtacgagttcatcccgttcatcctcggacagtgcgataatgtttactccgccaaagaattgctcggcaggataacggtgacggggacagaattcggctcatttccgacggcaaagctccactggatgatagcggacagggacgagtgcatcgtagtggaatccacatctgacggactgcacgtgtacgacaatcccgcaggtgtcatgacgaacgagccgccgttcccgatacagcttttctcactgaataactacatgaacctctcacctctcccaccgaaaaacagcttctcgaaggatataccgctcaccgagtacagccgcggaatgggagcgataggtctgccggggatttatcctcgcagtcgagatttgttcgcgcggctttcgtcagggcaaattccgtctcgggagagggtgaggaggaaagcgtcagccagttcttccacatactgaagtcggtagaacaacagagaggctgctgcgtgcttgacggcggaaagtgcgagataacgctttactccacctgctgcaatgccgagcgcgggatatactactacacttcatacgacaacagtacaataacaggcgtggatatgggcagagaaaaccttgacgcggacgaggttgtgtcgtacccgatgaacgataaacccgcgctatttataaagaactgaacaaaaagctgtctttgaaccgatagagttcggctcgaggacagctttgttttatttaatttgaattatatttcttatatttcacagaattcgcgccagtctatgtacgcttttccgttttcgtcaaaatctatcggcagaacgatgtacgatgaggtaaagtatttctccccgccgccttcccatctgtccgcgaaatagagataagcgacatctccgttttcacgagtgtacggcagaacgaacgcaggctgtgagcggtaggtggtactgtctc

SEQ ID NO: 248 - DNA, 5936 bp, Unknown
  16S sequences of unknown bacteria
gagctcttacctcgcctttccacccttaccgggaaatccggcggtaactttctgttgcactatccctagggtcgcccccggcggtcattagccgctatccttgccctatggagcccggactttcctcacggcaggcgcgttggcgccagccgcgcggctgtccggcccggttgcaaggtttattgtagcggattgctgcggaaatgtcaaagtttattgcaaatttgtcttggaaaggctataataaaaataattatgctgcgcgcagacacgcgctgcgcgaaaaatcagatggccggagccgaagcgcgcccggcggaagggaaggatcggggatgacagttcgtcaatattttgcggcgctgcagggcaagcgcgtcgttgtgctgggcctgggcgtcagcaatctgccactgatgcagctgctgctggactatggctgcaccgtcaccggctgtgacaaaacgccgctggagcacctgccggaggaggtccggcagcttgcagaccggggcgcagtcttgcggacaggccacgggtatcttgacggcctggcggcggatgtcgttttccggacgccggggatgcacccggatatcccggcgctgcaggcgctgcgccaggcgggcgcggtcatcacctcggagatggaggcattcttcgccgtttgcccggcaaagctcatcgccgtgaccggctccgacggcaaaacgacgaccgcgacgcttatttccgagcttttgaagcgggccgggcgcaaggtctggctggggggcaatatcggcacgccgttgctgcagtacgccgagcagatgcagccggaggactttgccgtcgtggagctgagctcgttccagctgatgtacttcccctacagcgcgcatgtggcagtcgtgacgaatctcgcgccgaaccatctggatatccataaggacatgcaggagtatatcgacgccaagaaaaacgtcttcctgcaccagagcccggcggactgcgttgtcctgaatgccgacaatgcgatcacccgcagctttgcggcctgcgcgccgggcaagatcgcctggttctcccgccgcagtgctgtggaaaacggcgtcttcctggaagacggcgtcatttaccgcgccaaggccggggtgcggcgccggatcatggcggcggatgatatcttactgcccggtgtgcataacatcgaaaattatatggcggccatcgccgccgtcggcgaccatgtcacggcggacgagatcgccgctgtcgcccggtccttcggcggggtggagcaccggatcgagtttgtccgccaggtgcggggcgtgcggtattataacgactccatcgcctcctcgccgacgcggacgatcgcggggctgcgcagcttctcccagaaggtcatcctgatcgcggggggctatgataagcatatcccgtatgatgtcctgggcccggagatctgcagccatgtgaaaatcctcatcaccaccggcgcgacaggcccgaagattcgggacgccatgctggcggtgcaggaccagccccatccgcagctggaggaggtgccggattttgctgacgccgtccggcgggctgcgaatctggcgcagccgggggatgtcgtcctgatgagcccggccagcgccgcgtttgatcacttcaaaaactttatggttcgagggaaattcttcaagcagctggtgcaatcgctctgagaagcggggaggggactatggcgctttccaacttgacccgcgcggcggccaaggccctgcgcaagcaaagaacgcctgccacggcgatcctcgtcgccgccggcagcgcgacccggatgggcggaatcgacaaggtcatggcggctctggcgggccgcccgctgctggcccacagtatgctggccttccagcagtgcgtgcagattagcggcatcattgttgtgacgcggcaggaactgtgctcttctgtggaggagttggcgcagcagtatggcgcctctaagctgcttgccgttgtccccggcggggcgacgcggacggaatctgtccaggcgggcctggcccaggtcccggcagattctcggcttgtcgccgtgcatgacgcggcccggccgctggtctcgcagagtgtgatctatgccgccctgcaggctgctgcggagacgggcgcggccgccccggcgctgccggtgaaggatacgatcaaggtcgcaagcggcggtgtcgtggtcgcgacgccggagcgggcgaagcttttcgctgtccagaccccccagtgctttgaccgggaccttttatccgccgccctggtccagcccgacggcgtttggacggacgactgcgccgccctggagcagctgggcgtccgcgtccgcctgaccccgggcgaggagcggaacttcaaagtgacgaccccgctggacctgcagcttgcccggctgctggcggcagaagaaaacgagcataacaaagaatagaacttgaatacgacaggaggccgcttatgaatctgcggatcggacatgggtatgatgtacaccggctcgtcccgggtcgggctttgatcttaggcggcgtgcagatcgactggcgcctgggcctggacggccattcggacgccgacgtgctgacccacgccgttatggacgcgctgcttggtgcggcgggcttgggcgatatcggtgcgctgtttccggacaacgacccccagtacctcggcatcgacagcaccatcctgctgcgccgcgtgggggagaaaatcgcccaggcaggttaccaggtcgccaatatcgacgtgacgatgatcgcccagcagccgaagctagcgccatatctgcccgccatggaggagaccctcgcccgggtactggccctggaccgggagcagatcaatatcaaagcgacgacggaggagcacctgggcttcaccggcctgggcgagggcatggcctgccacgccgtctgcttgctggcgtcgcgcccggcctgaagagccctggggaagaaagagagaagtaaggagaagtagagacaaatgtccctgatttcggaacagtttttggtatttgcagcggtgctggtcctggcgttttacctggcgccaaagcggctgcaatgggtgctgctgctgcttgccagctgcgttttttacgccgccgcggggctttccaactgcggctacatcgttatcacagccctctccgcctacggcgcgggccttgtgctggagaagcttgccgctcgcggcaaggccaagctgcaggaaaacaaagcaagctggagcaaggaggagaaaaaagcctggaaggcccgggtcagcacccggcggaagtgggtcatggctgggtgcctcgttttgaatttcgggcttttgtgcgtgttcaaatacgcgggctttgttttgcagcaggtcaatgagctttccctgctgctgggcggcggcgagatcaagacggtttggaatctcattacccccctgggcatctcgttctacacgttccagaccatgggctatgtcgttgatgtttactgggaaaagtgcccggcgcagcggaattttccgaagctgctgctgtttacgtcgttcttcccccaggtcacccaggggcccatcagcgattatcagcagctgtcacagcagctgtttgcgcagcatgattttaaagatgaaaatatcaccttcggcttccagcggatgctctggggctatttcaaaaagatggtcatcgccgacgctgccgcgccgctggtgcagacggttttcacgtcctaccagctgctgcccggcaataacgtcctcatcggcgcgtttttatacagcctgcagatctatgccgatttttccggctatatggatatcatctgcggcctgtgccagatgctggatcttcagctggcggagaacttcgagcggccgtatttttcaaaatctgtcgccgaatactggcgccggtggcatatcaccctgggcgcttggttcaaaacgtacctctattatcctgtcgccgtctccggcgcggccaaacggctgacgaaatggggcagccgcgtctttggcgcgcgcttcggcaggaccctggcggcgtcctttgccctggtcgtcgtctggctgacgacgggcctgtggcacggggccagctggagctatatcgcctggggcggaatcaacggtatctgcatcatcgcggccctgtggcttgagccggtgtgcaaccgcctgaaggcgcgctgccatattaaagaagattccttcgcctggcgggcgtttatcaccctgcgcaccttctttttggtgacgctcatcaaggtcttcccggaggtcgggagctttggtgacggcgtcggcttctgggcccactgctttaaaaattgggacctgggcggtgtcggcggccggatgctctatccggtggagatgccgcggcagctgcttttaatgggcggcggcgcgctggtgctttttgccgtgtcgctgctgcagcggaagggatccgtgcgactgcagctgtgccgcctgccgcggcttgtccggctggggctgttcgtctttttgttctttgtcgtcgtctggtacggcattccgctgtcgaccgagaccgggggatttttgtatgcgcagttttaaaaaaacgctggccaagctgcttgcctttattgcctgcgttctgctcatcacggagctggtgacagagccgtatttccagaacgaggtattccagtaccaggacagcgccgtgcgcgacacctacgccgggcagctcgatacgctcatctgcggctcgtcccatgcctaccgcgccatcatgccggcggttttggacgagcccttagggaccagcagctataacctctctaacagcatgatcaccatgcggggccgctacgagctgctccggcaggagattgctcgcaaccctgtgaattttgtcatcctcgacgcgacgtacaacagcatgacccgcagccgcgccgccgagggcccggagggggatatctaccagctgggccgctaccggaatttcttcactcgggctggatattttttcaagacgatccgcttggacgagtacggccgcgtctattacgatatgctctcccggggcgtgacgtcctggcgcaagctgctagacggcaagggtgcccgggggacctcaatcaaatatgagaccaggggcttcgcccccatggaggaggccgtcccgcgcccggtcacgccgccggaggaatacggcagttaccccctgcagacggcgctggacccggactgcgtctactatatgggcaagatcctcgagctgtgccagcagcaggggatccaggtcctcgttgtcgtgacgcccatcagccaggcggagcttttgaagtttgacggtatagacgccgtttacacgaatcttatgacctattttgcagaccgtggcgtcacgatgctggattttaacctctaccatggcaagcagacgttgtttcccgacgagacggcttacagtgacaatacacacatgtcccccgccggggcggccgatttttccgcccttctggcaaagaccatcgcacaatggcgcgccgggcaggacgtgaccggcgatttctacccctcctacgccgccgcgcaagcggcgtagccgctattcgggtggggaagatgcacaggcagtattgccgcccgggcggtttgacaaatgattattacccaggtggggaagatgtgccgattcgcacttcagcgcattttgcgactgcctcgctgggccgccccaggcacgttgggctgtgtttgacgctgtgcccggcgcatgcgcctgccgctttgcacctaagtgacgaaaaaagccaggaaaagggggagatcaccccttgacaaacgccaaaatctgcgctataataaccaagctttcggggtgtggcgaagtttggtatcgcgcttggttcgggaccaagaggcct

SEQ ID NO: 249 - DNA, 19008 bp, Unknown
  16S sequences of unknown bacteria
gcccataaatacttcgtgcttccgcatttccgcttctattataacatcgcttacgcaatgtttgaatagggcgcggaaatgctcataaatacttcgtgcttctgcatttccgcttctattatagcatatcttcgtcctgattttcaagcgtttggctatgtaatgttacccgcctcggggcgttttccgcttcgacggggagttttttcccgttttcgcgtttcccgaaagttttttcccgtcttttgcggacttttttgccgcgcccgcttttgcgttctttttcttcgttcccgatgcggaaacgctttttccgccctccgaacgcactacacgctttctcggcttcgcgcgcgccttgcgcgttttttccgttcccgtcgccgcggcgggtttgttttttttctccgcctttaccgcggccgtttcgataagcgctccttccgtcccctttttttcttccgtttcggggaaaagctttcgaatgacaaaggacattccctccgccaatttacgataggtcaaacggtagcagtcgatatccctgccgaaaggatcgggaatttcgtagcccgcaagctcggaaaaggaatagacgttattttcgatctctgcaaagcccgcctctcgcaagagcttccatctcagctccatcaagagatcccgctgagaatccgtcatgcagatcagcgcgtacgccgtttgcagcatctctttttccagaagacgggaattaaaattttccagcgacagaccgttttccgaaagcaccgacgcggaacagggattgatattgccctttttcgccgcttctattcccgcggaaagaacgccgacgccttgaattttcaatcgttttatctccgaacgaaatatcgcctccgccataggcgaacgacaggtattgcccgtacaaacgaagatgacttgtctttcttccatgcctcttttcctcgattcaaacgttgcggattttttccttatccatggggaatatccgcggaagcgcacgcctttttcaatctgttcatcacgcccgccatgacgccgcccttttcggtcggctccacggcgatgagaacgtccgccgtcttttccgcctctcttaaaagctcgtacagattcgccgccatttcccccgccgtttttcccaaatcgagcgcccgcacgccgcgcgcggacagccttttggcaagaacgtcctcgcagagaatcgccgcgcggtttcccgcttcgctttcgcggcggtatgccgcatacgcttcttccgccccctcgcagggaaagagcagcgttctgcaccgcggggaataatgcttatacatcattccgggactttttgccctatccccgggtttcagttcgggcgcgtacacgccgcactcgccgacgacggaagcgatcatctcccgcgtcaccaatcccgggcgcagaatcacgggtatctcccccgtgacgtcgcacacggtgctctcgattccgcccgtcgcttttcccccgtccaaaatcaaggggattttgccttcgaaatcgtccaaaacgtgccttgccgtcgtgggactgacgtgccgggaaagattagcgctgggcgccaccacgggaatatccacttccctcaaaaacgcctgcgcgccttcgtgggaaggaacgcgcaccgccagcgtatccaagccgcaggaaacgaaggaactgactttccccgccgagggatagacgagagtcaaaggtcccgggagaaaggctctgcgaagcgcctgcgcatacggcggatcgtaatcgacgatcttttttaaatcgtattccgcgtgcacgtgggcgatgaggggattgtcgttaggcctgccctttatttcgaaaatgcgccgcaccgcctcgtcgtcgaaggcgctgccgccgagtccgtacaccgtttccgtggggattgccacgacgccgccgccgaaaataatttcctttgcctccgcaagcgactgcggcgatattttttctatgcgagtaatcataaaaccttctctaagcggccgtccgttttatcggacgccccatactttatccgtcgcgtttttttgctcccttttcgaggcgtcattcgaagggcaattcgtcgtcatcgccgttcggctcagccctgggcggcagattttcgcccccgaacgcttccgcggcgggttcttcgtcgtcgaaattacggggcgcgcgggaatattcgggcggctcgtcgtcccgcccctgctcgtccacgtccacgaatttggtgctctccccgatgaatttcagctgcacgcgcccttgggagccgtttctgtgcttggcgatgatgagctccgccgcgcccttgacgatcttgcccgacgccatttcttcggcggtcgccgtcgcttcggggcggttgatgaacatgacgatatccgcgtcctgttcgatggcgcccgattcacggaggtcggaaagctgcggttctttggattggattcggcgaagctgtgacagagcgatgacgggcacgttgagttccttcgccataattttgagatcccgcgtgatggaagcgacttcctgctgcctgttttccgagccggccatattggaatccccgctcgtcatcaactgtatatagtcgatcatgatcatatccacgccgcccgcgaccgtctttaatcgacggcatttggagaggatttccgcaggcgtgacgcgcgaggaatcgtcgatgtagatctgactttttttcaatttatcgctggcgagcatcaattttttccactccgccgcggaaagctgccccgaaagcccttttgccatactcacattggcgtaggcgcaaaggagtctttgcacgatttggagccggggcatttcgagggaaaacacggcgcacaccttatccttataaagggccgcgtgttccacgagattcatggcgagcgaggtctttcccatacccgggcgcgcagccaaaacgatgaggtcggacggttgcaggccgttggtcatctgatccagacgtttaaagcccgtttcgatgccgcggaaaacagtggggtcggattgaatggactcgaatttttgcagcacctgctgcacgatgtccccctcctgcattcccgccagagaggagcggtccgcctgtttggaaatgtcgtacaccgatttttccgcaaaagagatagcgtccctgctttccgcgcccgtcatacagttttcgatgatcttgcgggacgcgcgtatcaggcgcctgttagtgctgtcgcggttgacgatgtcgtaataggatttgtaatttgccgccgagggggtgatctgcgcgagttcggtgagataggcgatgccgcccgccttttcgaggtttccttccccgtccagctcgtcggaaagcgtgacgaggtcgatgggctgacgccccgcaaagaccttttgcatcgcatgaatgatgaatttatgcgattcctgataaaagtcgtcctcggtgagtttttccaccagatccgccgcgatgtcgttgtcgatgagaaggcaccccaaaagagccatttccgcgtcgcggttatagggcattgtattgatttccgccatattctttccttttcgtccgaagcgtccgaagcgttcggacgaatctttccgttcgtgtttttaaagcccccgccgcgcgctcttttgaacgggagttcccccccccttattcttttccaaaaagattctcgggaaaaataaagggagagtttttcgtcttttatacggcgcggctcctttcggacgccgcgccgcaaagcgttcgccgttttacaccgtcaacgattcaaactcgttgagcgtatccgcaaattccttcatcgccgtttcgaaaggcgccttcgtcgtcaagtccacgcccgcctttttgagaatggaaacggggtcggtggaatttccgcccgagaggaattcgaaataatccttcaccgcgccctcgccctcggagagaatccgcttgacgatggaaatcgcggagataatgcccgtcgaatatttgtagacgtagaaagaacgatagaaatgcggaatacgcgcccactcgtaagaaatttccgtatcgtgtacgaccgcttcgccgtaatagtccttattcaactgataatacgcttcgcaaaggttctctttcgtaagcggttcgcccgcttccgctttggcgtgcgcaagctgttcgaactcggcaaactgcgtctgacggaacagcgtggtgcgcatcatgtcgatataataattgagcagatattttttaagctgtttgtcctcggaggtcttgtaaaggtacttcatcagcaatacttcgttgacggtgctggcgatctccgcgaggaaaatggtgtattccgacttcgcatacggctgccccgccgtcgatttataggtgtgaatggaatgccccatttcgtgcgcgatcgtgaagatctcgttagtcgtttcctgataattcaaaagcacgtacggatgggtgtcgtaaacgcccgtggaatacgcgccgttgcgctttccttccgtttcgtacacgtctatccatctctcctccttgccgcggcgaaggagcgactgatagtccttgccgaggggcgcgagccccttgacgacgatttcgtacgcttcctcaaagggcactttgatgtcggcgtcggaaacgagggggatatgaatgtcgtacatatgctgttcgtcaaagcccagaatcttctttctcaccgccatgtatctatgcagaacgggcagagcgccgtgtaccgattcgacaagattgttgtagacgacgggcgaaacgtcctccccgtccatcgccatctccaaacaggtgtcgtactttctcgccgtcttgtagaaaatgtcctttttcacgttgccgtagtaggtctgcgtgatcgcgtcgatcaagtcgatgtacgccttatagtagtccttgaaccaagtttcgcgctcttttctgttccccgcatggagtacgaggccgtacagactgtgactcatctgcacttcttcgccgttgaaagtccccttcggcagattgaggtcggcgttgtcgagcatggtaaacacggtatggaaaccgcccatgacgtcggaggcgagcgccaggagtttttcctctccctcgctcaaaacgtgcgctttggactgctctatcttttcgagcgtatagtcgtaagcggcaaagtcggggtcggcgatatacgctttgagtttttcgtcgtcgagcgcggtgagttcgggctccacgaacgccatttccgccatcagtttggaaacgagcgtgctcatcatcgccgtataagaggtgtatttggaaaccctgatgtcctcgtcgtgtttcatgctggcataaagatacaacttttcgaggcggcgggaaagggtgtcgcgcaacttgaaaaatccgagaagtttctctttgtcgccgagttttccctgataggaggaaagcccgctgttttcaaacgccttctcgaagtctttgtattccttttcccaagcctcgtcggaagggaagatgggagaaaggtcccaggtgtattttgtttctacgtcttttctttccatgatagttatttactccttgcttttttataattttttatacttagatttacttttactgaagccggtatgcgttccaaaataagctctaacgctgtgtcgacgtcttctactctctccaagcaagtcttgcttctaatccaagtccaatcaccttttttcttaaaaacgatggttccctttccgttccaatggcgtattaatttgattctctcaatatcggaaaacgaaaaaaaggctcttttacacaaggaaatgaatatccaaacgaaatgatcggttatctcataacgcctcggcttacgcactctggtaataattatacctattaacgtagcgctcaatggagaaattacacacaactttataacgatatccagagctaaaccatatctgtacaaaacaacgcctataagtgcaaaacaaaaacacagcactgcacagaaaaaaaccaatctttacatcatttcttttcgtttttcgacatattgccaaagcactttttccttaacctgcatatctaacaaatcagtcataaattttttatcctctctttactaatctctatgcatgacatcgcccaaaacagtgtcttttaatcctgccgtcattataccacacattctcccgttgtcaagcttcgactgccaacttttttacaaacgcaaaaaaatcgtacccgcgacagacaggcggcgttttatgttttcggacgtcagtttttaaagctatgaatgggtgcggggagattgccgccgcgcaggataaatttcgagctatccgtattgtgaacgggcaggatgggcgcgcgccccaaaagtcctccgaagctgacctgttctcccacccctttattcggcgcgggaatgatgcgcaccgccgtcgtcttgttgttgatcatgccgatcgccgcttcgtccgcgatcatcgccgcgatcgtcgtcgcgggcgtatcgccgggaatcgcgatcatatccagcccgacgctgcacacgcaggtcatcgcttccagcttatcgaggttgatttctcctttttccgccgcctctatcatgccgatgtcctcggaaacgggaataaacgccccggaaagtccgccgacgcgcgaggacgccatgacgcccccctttttcaccgcgtcgttcaaaagcgccagcgccgccgtcgtgccgtgtccgcccacgcattcgagtcccagctcctccaaaatctgcgccaccgaatctccgcgggcgggcgtgggcgcgagggataaatcgacgatgccgaattccgcgtttaaacgcttcgccgcttcacgggcgatcagctgccccgcgcgggtgatcttgaacgccgtacgcttgatcatctccgccgcttccgtcaaatccgcgtcgggaatctgctccaaggcgtgcttgacgacgcccggccccgaaacgcccacgttgatcacgcagtccgcctcccccacgccgtggaacgcgcccgccataaacggattatcctccaccgcattgcagaaagccaccagcttcgccgcgccgataccgtccttttcggcggtcagtttcgccgcttccttgaaggtttcgcccatcagtttcaccgcttccatattgattcccgaacgggtggagcctacgttgacggaggaacaaagccgctccgtagacgagagcacttcggggatcgtgcggataaacgcgcgctcgtaatcggcggtcgatttatgtacgagcgcggaatatccgccgagaaaatcgatgccgagcgtctttgccgcgtcgtcgagggccttgccgatcaggggcgccttttcgggaaacgccgcgcaaagaagactgacaggcgtcacggacaccctcttattgacgatgggaatgccgtattcgcccgacagatcggacgcggtcccgacgatcttttccgcgcggcggcagacgaggtcgtatactttttgcgccgtttgctcggcggtgtcccgcacacaggaaaaaagggaaattcccatcgtgatcgtgcggatgtcgagatgttccttttccaccatgtcgatggtttccaaaacgtcgaattgcgtaaacatattcttctctccgccttaaatattgtgcatcgcgttgaaaatatcttcgtgctgcatatagatggacatcccgatcttctttcccatctccgaacattccttcgacaactcggcaagcgcctgcgtcgactcggatatgtccacaatcatgatcatggcgaaatattcgccgagaatcgtctgggaaatatcctcgatattggcgttcttttccgccaaaaacgcgctgaccttggcgatgatgcccttgctgtcctttcccgtaaccgtcataaccgctctcattctttctatctcctttttccgtggtatcttactctcgttccgtcttttcgagccctcaaagcgctccgcccgtcgggatctttatggatacatcgatatggacaaattcccgtatccgcgttccaaaagcgcggagccatgaaaggcgctctctatttcgcgtccccgggattttgcgtttcctttgtccgcgcggattcttccgccctttcaggcgccgccgaaacgtcctcttttacgtgtgcgtcccgactttcctgcgcccggtccgcctcccgcgcctttgaagcctcctccgtttcggcaacttcctccgcggcggagatctcttcgtcgacggcttccgattcttctgcttcttcctcttcttctacgagcgcgcccctctcgataatttcgtactgcacgatgaaattactttgcagaatatactttacgaggtcgccctttttgaggtcgggcaggggtttttcgttgtcaaaatacgcttcgcgttccatccattcgcttttctttttgttccacgttttgaaaatacacgccgtggcgtccacgtagtccttttgcagatccttggattcaaagccgacgaaataattttcctctacgttcttcaacccctcggacagatagtacatcatcttgtaatagcggcggatgcggtgaaacttgatgcccatgaaagggaacacgaacagcacgtacagcgcggaggcgacgtaaacgcacgccttgggcagcgactgcatcggatccgcatagggcagagaaatataatagagcagccacgcgacgcaaaacgccgcgtagccaacggtcacgcccaaaaacgtataaaatatcttttttttctgggcgatgaccttattgaagtcattgtcattgtaaacggtcgtcatctgttctcctttttggcggaaggttatttttattttttggccgcggtttccgcgcgccgcttttttgaacaacttttttcttgtcgatacgtcttcgatacgttcctcaaaagccgcggagggttcattccgaaagcacttttttacagttcatgtactcgcacatgaactcgtccaaacgttcttccttcgtcggcggttttttttgaaacgaaccgacgagcaaacagccgagcgcaaacagggcgacgggaaccaaaaatacgacgaaaagcagagcaaatcctatccattcgagccatccgctgcgcccgcctttcgtatatccgtcgggatcgtagacgattttgccgcgaatcgagcaccctgccgcggtcttttctacgacggaacaataccaatatcccgcatggtcgcccctttcgagtccgagccaaacttctttatttccgtcttcccgcagaatttcccgatagaggagttctcctttttccgcagcgtattcctttacctgacgcgggatacgcaaaataaattcttcgggcggcaaatcgctcaaaaacgaaaacccggtctgcctcggactatttttcttcatggagcgcccctcctgaaagtcagtcgtgaatgaacagcacgccgagagtgtttctgccgcagtgccccgtgatgaccgagcccgcgaccgtttccacgacttcgtcaaaatcaaactcgctttgcaccatttccctggcgagttccacaagttcggcgtcggcgctggaatgggtgatgaagcagcgggttttgtcgtagacgggatacgcggctttgagttcctctatgtaggacttgatgcacaccgtcatttttccgcgatattttttcttgacgccgagctgcccgtctttcatgtctatcatgggatgaatcttcaaaatattggcgccgtacatttccattttcgaacatctcccgcccttatagagatattccagccgatcgggcacaaacgaggtgttcacgcgagcgcgcagcgcgtttaccgtttcttcgatctccgccgcgctcttgcccgcgtcccttaaatccaccgccttcatcacgagcagtccctgccccgaagagagcgccaggctgtccacgacgcgcaccttgccgtcaaattctctggacgccgcaagcgcgcaggaataagaagcggacgctttggaagaaatggtaaaatggatgacttcgtcgccgtttgccgtaagaagggaaaagagctcccgaaaatcctctatgccgggcgcgctcgttttgggaagcatcccggtcttctccacgaaagcgaaaatgtccgcgggcgcaatgtccacgccgtctttaaacgtttccgtgtcgagtatgactttgagcggcatgaggcgaatcccatgttttggcgccaattcgcccaaatcgcaggtactatccgaggtaatctgaatcattttacgttctcctttgatttcactataatcttttgtattctttgcggctccgcgccccgtattttcgcaaaaaacgccgcgaaaccgaggtttttctataagttctctccttttccgttacgtgttatccacgcgcattccgggaatatatttgaggacgctcttatactttatcgcccactcgggcacgacgccgtaaatgtcgtccaccgtgtagagtctgtccgtaaaatgcgaaagtccgtccttatagcggctgtcgcggctgttggtgcggttgtcgcccagaaaaaagatttcgttttcgcccacttcgtagagagaaaagtcgtaatgttcgtcgcccgcgtaattgccgtgaggatcgtcgtagggcacaaattcctccgtgcccgcatagcggatgtagatctggctgtcttcacagtacagcgcgtccccttcgagcgcgatgagtcgtttgatcagaaactgcgttcccgtaaagcggtactcccgcacgtccaatacgatgacgtccccgcgctttgcgtccgcgccgtatttcatcagcagttcgtcccccgtgtggagggtgggagccatcgattccccgtccacgtacacgccgccgaacgtacttgtccagtacattctgaatcccagcgccgcgatgacgatgacgatgagaatgctgtaaaaccataccgaggaacgccgcgccttgtagcggtatctgtattcgtacaggcctccgtccctcaaatctttttcgtccatagttccttacttgtttcctttctccccgaggggagctttcgcgcgttttttaagttcgtcccgggtgagattgatcgtcctgccgcaggtaagacagcggagcttaacgtccgcgcccgcgcgcacgatcacccattccctgccgccgcaggggtgcgcttttttcatcaagacgacttcgttcatctcatacatggtatcccccttttaaagccagaggatattcgtcacggcgtattcgttctcctcgtcctcgcagtcgaacaggagcgcctgcccctcggaaaaactctttaacggagcgcctacggcctcgtttttaaactcgttcgcctttaaaatcatgcgcttccatttgccgcccccctttacgctcaccatgcagacaaaccgttccatgcggttttcctcgtcggcgatgtcgatgcccaccttgatctccgcgtcccgcctggcataaatgtcgaattccagaacggcgttttcttcggggacatagcgcggagagcttatcttatacgtttctatcccgcccacggagtaggcgcccttgatgccgccgtatccctccaccagtttgggcacggcgtcgcattcgagaaagatgcccgcgacggaataatcctcgtaggccgcgacgctgaaacagtccacgtcctcgcccgaatagatgacccggcttttcaccgcgtcggcgtccggagaagcaaattttttcgccgcgattttggatgcgaccttgaagccgttgatatatttcgcataggcgtacacgaacgccgccgcggcgccgcgatagtgcgtgagcgcgcaggaaatttttttgtttttgatctccttgccgtccgccttaaacacgcactgccattcccggaaagtcgatttcgtccgctcgcccgattccgcgtaatagatgcccgcctcgtcgagaatgccgccctcgtcgaattccacttccgccgaaagcgcgccgtcctcgctctttaaggaaatattcagcggcttggggatatagatctcccgccctttcaaatttctttcgaggaacaaatccatatccacgagagcgttaggtccgatgcaggagccgctgtccgcggaataggcgatggcgctgccgtcggggaagcctatcctcgaataagtgtcgtacgccctgtcgtagtcgaacgcatcgtcgcgcagcgcgcacagcatcaggacgggacatttgacgaagggagcgtaggactgcgattcgatgcccgcgatgtagcgatgccgctcatcgctcatattgctctcggcgttatccgcgaatttgccgatgtttcggtacgcacgccaccccgccgcgttgatggggacgccgcatctgacgtcgggagaaagcatcgttttccacgcgatctccccgcccgtgcggatgcccaccactccgatccccgaaatatcctcccgctgtttgagatattccacggaatagagagcgacgtagatccattcgaaccagcaggtttcgtccgccgaggtttcgacggtatcgagtcccttacattgtctgtaattggcataagcgatcgattgcggatacaccgtgtgcggggcggcgctcccgtccgtttcgccgctgtaatcgggcatgagcaccgcgtaccccttgtcgataaaataatacaaaagctcctgatccagctctttccccgcatcgggcagcagcagcaccgcgggaaacttctcccccgaagcgggcttgccgaacttagcgaaaacgcgcacgctgccgtcctcggtcttatgtcccgcgtaggtgacgttccaaaaacgcatccccgcttccttgtcctcctcgtatccccattcgctgggttgcagaggattgctcatatcaaattttttccacaacgatacggcacttaaaatcatttttcagtccttccttccttcctttctctctcgcctttcctgctttccgcctttcggccgctttaatacgcttccacccttatcgaggacccgcagcggtccgtcgcccccgtcacgaggattttattgtctatccgatgtttcatttcctcgacgtgcgaaatcagaccgatggaaaaatgcttgcttctgagcttttcgagtacgtccatcacggtgtccaccaatttctcgtccaaggtgccgaagccctcgtccaaaaagaaaaactcgatggggcgcagggactttgcgcaaatggcgccgctgagcgcgagcgccagcgacagggacaccaaaaaggtttccccgcccgaaagcgtcttgacgctgcgcagggtcccgccgttgagattgtcccccgccttgaattcgtcgccgtatttgagaaaatacctgccgcccgtcagggataacagcgttttgctggcggaaatgcagatgtcctgcaaatattccgaggcgataaattccatgaattttccgcgcgccgtcaggtttttcagtttttcccaaagctcccgctcccgcagcttcgccttatactccttttccagttccctgtacttttcctgcaaagcgccgaggcgctcgatctccttttcccccaccgcgatctcgcgaagcagggaatccttttcgagggacagacggcgtttttcggattccagcagaacgaggctttccgccgaaaagccgtcgaacttctccgcggggatctccgcgagtttgcgcccgactacattgtattcgtcgaagaaagcgtcgcattcctctttggcgcgttttccgtcgccgatctccaaagcaagggagcgggcggccgttacgttttccaagccgttttctttgaggagcgtttcgatttcctcgcgcgtttccttctcccgcaacgcgtgggtttccgcaaacgccttttgcttttctctctccgcggacagcgcggacactttttcctcgtaagaacggatattgtcctccgccctctttttcgccgcgcggagcgtttctatgtgccgcgtcacttcttcgggagtgcccaggtctttggcgaacgcgattttctgcctcgccagctccgcgcgttcccgatagtgtttcccgtcctcgacgatgcgcgccttttcccgctcgttctcttcgtaagccttttttctcttttcgagcgcttcccgctgcgctttcagttcccttctcctttcttcgattcttttaaattccagctgcgccgccgcgacgtcgaaagacctttcgccgcccgccgcgagggtatatttcaacacgagcgtttccacgtccgtttccgtttcgggatatttcgcctccaaccctttgaggtcctctctgaattcgccgtaagattccgtcaaaaggacgtccttgaaatgatgctttaaaaactcggtgaacgattcgctttcccccaaggccgtgagcgccccgtcgtttgccgcggcgagggcgtcaaagtcctcctcgggcactttatttttgatggcgcggtacttttccgtgcattctttgagcctggcttccgcttcccgacaggcggcgatatcctcttccgctgcctgcaatttgcccaaaaccaccgctaagtcctgtatctcgctttctaacccgctctcttccagctgacgtcttttcacttccagatcccgctgcgcgccctttaacgacatctccgctttttccgtcgccgcaagagcaagatctttcgcccgcacgcatttttcgagcgtttccgatttttccctgacggcggctgccgcggggaacacatcgagctttctccgcctttccgcgtaataggcgagccgggcttccgcgcgctgtttttccagacagagtttctcgtattcccgtttctcttccgcgagcttttgcgcggcggtcagccgcgtttccgtttcggacagcgcggcttccgtccgggattttttttcaaaggcgatgcgaagcttctcgctttccgcctcgatccgctccggggtgccgtccgcgttctcctgcattttcgcctgaatgagcgccgcgtcgcccgccgacctttcgcagcggaggcggatgcccgccgacagcttttcgccgtatttttcgagatcgaagagtcgggaaacaagttgcaggcgttcggaaggcttcgccttcaccaaacccgcaaattcgccctgcggaagcgcgatgcattttttgaaatcgtcgaagcccagcccgatgatttcctccacccgcttatccacttcgaggaccccctcggcgaccccttggagcttttcctccccgtcgtattcgtaaagccacgccttggcgacgttgtttttgcggcggcgttcccgctggacgcggtagacgcggcgtttgccttcgcaggtgatctcaaaatcgtaaacgacgtatgccttatcgcatttatagttgatgctgtccgtacccgaggaacgctctatcttcccgtaaagcgcgaaatgaatgcagtcgagaatggtgctcttgccgctgcccgtatcgccgaaaatgccgaacagaccgccgtctaaaagctttctgaaatctatttgcgctttttccgaaaagctgttgatgccgcaaaattcgagataaacgggcttcattcttcctcctttggaaccctcctccgagctttttgtcaaagttctttggacgcggcgttccgggtatttttatagtacgccattatgtatatgtgctttttcggagattccgatacctgccgaatcatttttccaactccccaagcaccgacaaaaagagagctttcagctcgtcttgcggcgcttcgtcgtactgtgcccgataaaattcctcgaacagccgcgcgtcggaaaaaccctttctcgacgcaaattccagcgtgcccgcctcccgcacctcggtgagcagggataccagattgccgtgcgcggacagggacgcgctttccgccgacgtcaggggagaagacaaatgcagccgcacctccgcaaggctgtcgggataaagttcgagcagttcctccgcccgcgaggggcagtccgcttccaggcgaacgagcttttttcccgatttgagaggcacgtcgtgcagggattctacgccgccgcacgtcagatcgaacaccttgactcccttttcgccgcccgtttcgtcgaaggaatattgcaggggagagccgcaataataacaatgtccctttcccatgtgctgctttttatgcagatgtccgagcgcgatatagtcgctcccgggcaacacgtccaagggcaccgcccgcgcgccgccgaggtctatttcccgttcgctctccgacgtgaccccgcccgccacgaaaatatgggacaaaaagacggaaggcaggcgctcggtattccccgactccccttcgtcgatccattttttcatgcgctcggaaaagggcagatcggatttttcctctttaaaacgcgcctcgttcggatagggcagggcattgacgaacaccttttcgccgcgttcgttcccgaatacggcgaagccggcgcccgaggagagcggacggactttgcgcatagaatgtaaggggagcggttttctcgaattccccacgacataaatgccgagctcctccgaaaggggcgccgaagcggacaggcgcacgccgtcgtcgtgattgccgctgatgaggagcaccgcgcggtccgcccccgccatcgccttgatcttcgaaaaaaacaaatcctccgcttccgcgctcggcatatacgtatcgaagatatcgcccgcgacgagcacgagttccacgccctcgccgtcgcatatccgcacgatttcgtccagaacgtccgactgttcatcgaggcgttccctgcccatcaggcgtttgccgatatgccaatcggaagtatgcaggattctcattttcgactcctcccgggaacggcgaaatttcggaaaatttcacgaaaaagcgctccgaaatgccttgcttttactttttaaaaaggctataatggacttacccgcctctgacggcagggtacttatactgtttcattatacaacatttcttttgagaatgcaaggaaacttaaaagaaacaaaaaaatttttccaaataaacacacggggcaaagatatgtcattttgttcgttttccaaagaattcaacgagaactcctatacggcggtggaaaatcagtttttcaccaagtatatgcccgacgcggacggattcgccgtgaaagtctatctctacggactgtatctttgccagaacgccgattccgatttcaatatcttctccatggcggaagttctcaaaacccctaaggaaaagatcgaggaagcgttcgttttctgggaggattacgacctcgtggagatcctttcccgagatcctttcgcagtctgctatctgcccgtgcgctccgccgtcggaaggcccaaaaagatacgctacgagcagtacggagatttcaacaaggaattgcagcgcaaaatgcagcaggtgggaaaattcgtttcctataacgactccatcaaatatatgcattttctcgacgaaaacaatatccaacctcaggcgtttctcctcatcgcggaatactgcatcaacaaacagggagaaagcgtttccccctcctatatctttaacaaggcgagaaaattcatccgcaacggctggctcacctacgaacaggtggaacgggagctgagcagttacaacgcgcacgagggcgacctcatcgccgtattcagcgcgctttccgtctttaaaaagcccgaagaatccgactacgctctctacgaaaaatggacggaaacgctcggtttcgagcgaagcgccgttttggaggctgcgaagcgcctcaaaagaggaaacacggacagcctcgacattctgctcaccgaactgtccgagcacggaaaaaccgcggcggacgaggtgaaaaattatctttccgaacgggatatgctcgcttcgctcaccttccgtattgggagaaagctgggcgtcaaggtcagcaatcccgcgccctatatcgacgaatatacggaaaaatggtacaactgcggttttgaagaaagctctctctcggacatcgccctcttctgcctgcgcacagaccgcaatgatttcaacagcatgaacgagctgatcagacagctctttacggcgggcgtcgtttccgccgagagcgtggaagaatatttgaaagtcaaaaacgacgagcttaaactgttcacgcgcattcagggcttttgcgggaatctcaaaaagagcacggcaaatctttcgctcatcgaaacctggcattcctggaatctgtcggacgagatgatcttggaggcggccaagcgctcggcgggaagcggtaatcccattccctacatgaacaaaattttatccgactggaaacattcgggcatcgcgcagccttctcagattcccgaaaaggcgcccgcggcggcgaggcagacttataccagcgccgtcgtcgaggcggtcaatcagcgggcggaccgggaaaggcactacgcgctgctgcgcgagagagcgcagtctttggcggacaaatacgccgcaaaggcgaatgcgaatccgagattcaaagaaatcgccgcggagctggcgcgaatggagatcgcgcaggcgaaggcggaggtgttcgagcctcagacgctgcccgccctgttaaagaaaaaagaagcgctacaaaaggaacggaaggagatcttaaaaacgctcggaatcacggaaaagcagcttttgccgcagtataaatgcaagaaatgttcggatacgggatttttgcccagcggcgccgcctgcgactgctataaggcggaaggcgagaacagtacgggcgcaaaggaaacagccggctgaaaaatcaagattttacgaagaaatttgaaaaaacgggtcaaaaacacttgcgtttttttgtgaaatcatgtaatataaaaaggcttccgaaacgggaagccgaatagatgcagagatgtctgagtggtttaaggagcacgattggaaatcgtgtgtaggtct

SEQ ID NO: 250 - DNA, 32759 bp, Unknown
  16S sequences of unknown bacteria
cccatacgcaaacagtgccgcttaggatgcttcgatagaatttgatatttttgcagcgtaaaaggccagcgtggattcaaatccacgctggcttttattgcgagccatgaggcccgtcgccgaatggcggtctttcctaatacaagtaacatgaagctgcaccagaccggcgagccgtggcacctgtcgtgtcacggcgataaaaccccggccaagtcgcatgtctcccctatgcccctacgcgcagcgcgcagtccggggtgcagggggtcaccccctgcctcagcccctggcgcgtttccagacggaggggacaaaggcgataatgatggggaaaatttccaggcggcccagcagcatgtcaaaggagagaaaaagcttggaaaaattgctgtaggcggaaaagttactcatggggcctaccacgtcgagaccggggccgatgttgttcagacaggatagaacggcggtcaggttcgtttccagtgtaaaattgtccagcgagatcaggcaaacggacgtgatcgcaatcaggcaataggcgctgagaaaagcaaaggtgttctgaatggtctccggcggtacgacctcgccgtccatgtagacgtgcttgaccgtgttgggatgcagcatccgccgtacctgccggttcatgctcttgagcagcagaagcacccgggaacacttcatgccgccgcccgtggagccggcgcaggcaccgatgatcatcaaaaccaccagcagcgtccggctcagctggggccatagctcaaaatctgccgtggcatagcccgtggtggtcataatgctgaccacctgaaaacagctgtgccgcagcgcatcccacgtctgtcccggaaaagacggcagaatattcgtaaagatcagcagactgaacagcacgatgatgatcacatacatccgcagttcttcgttgtgcagcgcctttttaacggagcgctgcagcagcaggtagtaaatgccgaagttcacgccgaacagcgccataaaaatggtgacgacccattgaatgtagggcgagtagctgacaaggccgtcgttgcggacggcaaagccgccggtgcccgccgtgccgaaggtcagcgttacggcctcgaagggcgtgacaccacccagcagcatcagtacgatctgtacggcggtcatgccgatgtagatcatgtaaacgatctgcgcgctgtgaaaggtctgtggcaccagcttgttcacctgcggcccgggggattcggcgcgcatgatgtgcatactgtcgccggaaccggcagtaaagcgggtaatggccagcaggaacaccagcacgcccataccgcccagccagtgagtgaagctgcgccagtaaagcagccccttgggcagcgcttccacatccgtcagaatactggcgccggtggtggtaaagccggagaccgtttcaaaaacacaatccacatagttgggaatggccccggagatccagaaaggcagcgcgcccagcagggagatcaggaaccacgtcatggccaccactacaaagccgtcccgggcatacatggtctgccgccggggcggaaagggcaggggcagacagctgagcagagccataacggccatggtgatcagcagcccccatacggcgccggtctcgcccaagatcaggctgatcaccagcgcaggcagcataaacagcgccacaaaccggagcacaatggcgatcagccgggcagtcatgcggtaattcattatttttgtcccccgccaaaaatatcattcagcgcgttaaagctccgatcggacttggtgacgatcaccacggtatcatccacggcgaaatagtcgctgccactgggaaccagcaccttgtcccgccggctaatcagcgccaccagcagattgggcttcaggggcatgtccttcagcgctacgcccagataccgggtgctttgggtgacgcgaaattccagtgcctccacccgttcatccaccagacggtgcagcgtcaaaacgccctcgccctgtcggttctgcatggcgcgcacataacggagaatgttggtgctggtcagctgcaggggcgtgaccacacactcggcctcgttggcgggcagcagggcgcagtattcgccccggttgatcttagtgaccaccttgggcacccggcgggaattggcgtacatggcgatgaccatgttctgctcgtccatgttggtcagagggacgactgcgtccgtttcctcgatgccctcggtcagaagggtgttgatggacgtgccgtcggcgttgatgacctctgtcttgggcagatcggcgctaagctcgtcgcagcgatccggctttgtctccagcagcttgacgtgaatgccggcgtccgccagcatccgggccagataaacggccgtccggctgccgccgatcagcatgaccgagcggattttctgggtctccatgcccatccacttcaccatctgcaagagggactgcaccgtggaggtgacatagatatgatccccgacctccagacggaaggagccgtcgggaatatagacttccttgttgcgctccactgcgcagaccagtacccgcaccttcaaagaggtgtacaggtcactgagaaccatgccgtccagcttgccgcccgcgcgcaccggcagcgccacgatctcggcgcggcccttggcgaaaggctcccgtttcaggaaagacgggtattgcagcagaccgaaaatttccttggcggtggtgcgttccgggttcaccgtcatacttaatcccagttcttcccgcaaaagataggtttcctcggcgtaaaccgggttgcgaatgcgggcgatggtgtgggggcagcccagctttcgggcgaccatgcagcacagcaggttggtctcatccgcactggtcacggcgatcatcaggtcgcacttgcccacctcggcggcctgctgcaccttgacgctggcaccgtttccttccagcaccatcacgtccagccgctcctccacctgcaccagcgcatccttgcggttgtcgattaccagcaggtcatgcccttcccggctcaattcccgagtcagggtaaagccgaccttgccctcgccaatcactacgattctcatagtctactccttcgcaaataaccccatcgtaagtctgcatgaagcagcaatcatcatagcactttgcccgcaagattgcaacgggcgcgaaaggttccccctccgcgcccatcgattctttgcagttcgtcaacgaaaggttccgcttttggggttcagcagcgcatacacataggtgtccttccactggagaagaccctgttcgtccgtccagaaatacacgttttgacgaagatgcgcttcccgcgccatgcccagccgttccagcagccgccatgacgcttcgttccgtggatcgcactccgcgtagatgcgatgcgtgccctgccggaaggcttcgccgatcaaagcctgacagccttccctggcgtagcccttcccccaatactcgcgggccagtacataccccagctccagcgactgaaactcccggcggcccagatagatattgccgatataaattccgtctgtcttccgttccatcgcccaaaattccccgtgatccagccgggaagccaacgtttgcccggcttcctcccggctcatgggacggtaaggctcgtagcggacgacttccgggtcggaaacacaggcatagaagccgtccagatcgtcctcccggtaggggcgaaggatcagccgccccgtttccagccgggtcatatccgttcccccgccgcttcttccgccagcttggctgcgccccacagcgcgtcatgtgcgggcggaacgacctgcgccacggtctgtaaagcctcctcggccagcgtgcggtaaatgccctcgtgatccagcaggccgcccagcaacgccagccgaggcttctccatattcaggcggcgggccagcgcctccacaattcctcgaagttcctgtgcgccccggcgaaggatagccaatgcggcttcgtcgccctgctcggcacattccaccgtgactcggctcagcgcggcgactcctgccttgccccggttctggtagtatacatagttcaggatatccccggtgttcttgccgccaatgaaatgcagcacgctgtctcgcaaaagcgccgcgtccatccgtccatccagtgcccgcacagcggcggacagcgcgtcccggcccagcgcatagccgctgccctcatcgtcgatcagatggccgaagccacctacccgggccgtttcgcccgcttcgttcaccccgaagccgatggagcccgtgcccgcgatcaggatgcagccggggccgtccaccgcgccccgcagggcgatctcggaatcgctgcgcagcagcagcttccccgcaaatccggtcggtttcagctcctcccggatgatctgttccagttcgccgcaggaaacgcccgcaccgcccacgcagatggcgcggcattcctccagactgccccagtcggcgaacatctcccgcagcagtttccgaaaggcctcctcgccgatggcggaaatattgaaaggcccgtatttgcggcgttcgctctgcccgtcccggtgaatttccaccttggtgctggtgccgccgccgtcgatcccgataaacatccgttattccctactttcattggtggtttgctgcctacgcgcagcttgacaagtccgcttctccgggctacactgaatgcaaaatcatccttcccaaaggaggatcttccatggaacatccgattctgaagcttcttcaaaaaccgtcccgcatcgtgctgggcttcatgtccggcaccagtgcggacggcgtggacgcggccctctgccgcatcacgggctacggcctgaccacgcaggtggaacagctgggctttaccttcgtgcccttttcgcaggaagtccgggacgagatcctccgccttgccagcggtgagaccgcctatgcggcggacttctgccgcatcaactttctgctggggcagctgtactgtgaggcaggtgaagccgcctgccaggaggccggcatccccaaggagcaaattgacctgatcggcaatcacggccagaccctctggcatattcccgtggaggaagaatatctgggccgccgccagcgcagcaccctgcagctgggcgaagacgcgttgctggcggaatgcttcggctgcccggtggtgggcgatttccgtgtccgggacatggcggcgggcggattgggcgcgccgctggtgccttacaccgagttcctgctgtaccgccgtcccgacgaatgggtagccctgcaaaacatcggcggcatcggcaacgtgaccgtgcttccggcgaactgtacgctggatcaggtctttgcctttgataccggccccggcaacatggtcatcgacgcggtgatctcccggctgacgaacggccgcatgacctacgacgacggcggagccatggcggcgcagggaaagcttcaccccgaactgctgcgctggatgctggacgacccctatctttcgaaaaagccgcccaagaccacgggccgggagctgtacggccccgtttacgtagaccggctgatggaaaaagccgggacgctgaacgtcgccccggccgatctgctgcataccgtcacccggtttaccgccgagaccattgcctacgggctgcgccgtttcagtcctcagatgccccaaaggctgatcgtgggcggcggtggcagtctgaatcgctgcctgatggagcagcttcgtcaggtgctgccggaatgccgcgtcatgaccaacgaggatctggggctgaacagcagcgccaaggaggcggtggccttcgccgtgctggccaacgaaaccatcttcgccagctgcaacaatgcgccctccgccaccggtgcccgtcaccccgttgtgatgggaaagatcagtctttaaggcgcagcgcctcggccacgcggccatcagcacggttaagcagtgcccgggcttcatcggcagtctttccgcacaaaagcatcacaatggccgtcttgcagtgataatcgcagctttccagcgcctgcacggcctttccctccggctcgcctgtcgcttcgcacacgatcgtgacgcagcggcggacgagcttttcgttggtgggcttcacatccaccatcaggttgccgtacaccttgcccagccggatcatcgcgccggtggacagcatattcaagatcatcttctgggccgtgccgctcttcatgcgggtagagccggtgaccacctccgggcccggcgtgggggcgatgccaatatccgccgcttcatccacctgagagccggggcagcagctgacgccgatgaccggcgcgcccagctttttggcgtattccatcgcgcccagcacatagggggtgcggccgctggctgcaatgcccaccagcacgtccttttcggagaaccgaatgcccttcagatcctctgcgcccagctcccggtcgtcctccgcgccttccacggccttataaatggcgggcattccgccggcgatcaggccctgcaccatttccggctccgtagagtaggtgggcggacactccaccgcgtccagaatgcccagacggcccgaagtgccgcagcccacatagatcagccgtccgccctgccggagcctttcggcgattgcgtccaccgccttggcgatctggggacagacagcctccacggcttcggcgaccttgtggtcctcgctgttgatgagtttcaccatctccagtgtgctcagctcgtcaatatgcgtggtgcgggggttgcgctgttccgttgcgatcttgcgtaaatctaccatatttctatctcctatctgtttcaaatcaggatggttcagcccttgactgcgccgatggtcacgccctccaaaaagtacttctgcagagcgaagaacaggatgaacatgggcagcgcggacagcgtcgccccggccatcatgggcgcaaacagggtctcattggcaaacttgaaggtcttcagacccacctgaatggtgaacatggagtccttgctggtaacgaggaagggccagaagaaagtattccacgtggacatgaaggtgttgatggccatgaccgccagcacggtcttggacaggggcatgacgatcttcacgaaaatgccggggtggctgcatccgtccagcttggcgctttccagaaggggcgtggggatggacgtgaaaaactgcttggccagaaacacgttgtaggagctcacgatgcccggcaggatcaacgccgcataggtattggacatcttgaactgcttcaccaccagaatatacagcggcacctgcgtcacctgataggggatcatcatggccaccaggatcataccaaaaagccatttacttcccttaaaagggatcttggcaaaggcatagcccgccatggaggcaaaaatcacgttgccgatcaccgtactgagggaaatgatgaagctgttgaggatccaacgtttggcgtacacattgaagttgaagaacgcccggtaggaatccagcgaccagctggaggggaaaatgctgcgcatattacccgccgtggcaatagcggggccgaaggaagaagtaatcatgtaaaagatgggaaacagcgccagcgcggccagaaaggtcaaaagcagcgcgatcagcgcgttgcgcaggtgcttgacccaaggatgatttcggtgctcggaatacagacccatagcagacatgcttttcttcctcctttcttaatattccacgtccacgcccatcatcttgaactgagccagcgagataatggcgatgacgatggcaagcaggatcgcctgtgcgcaggcgaggccgtacttggagtattcgaacgcatttttgtagatcagaaggccgatcatggtggtgctgttatccgggccgccgccggtcatcatgaaggcgttcataaacacctggaaggaaccgatcacgcccgtgaccagcagaaacagcgtggtaggcttcaccagcgggaacacgatgtagcgtaccttctgcataaaggtagcgccgtccagctcggccgcctcgaaatagctgttgtcaatgcccaaaagggccgcgatatagatgatgatattgctgccctgcccggacatcagtgccatgaacatcagcgagatcatggacgtcttgctggaggaaagccagttctgggtgggcaggcgcaggaaggtgaagacctgattcatcagccccgtaggagaggaatcgtagatccacagccacaccaccgacagcgccacaccggaggcgatgcccggcagatagtacatggacttgaagacgctctgtgtctttttggaaaagggcaggatcataatggaaatggcgaaggccatcagcaggctcaaaggcactacgaccaccgtgtattccagcgtgttcagcaccgttttataaaacagcgagctggaaaaggtgtcctgataattcttcaggccgatgaattccgagccgaagggtttgtatttcagaaagctggtctccacggcgctgatcaccgggtagagcgtgaacacgccgaaagcgatcatggaaacgaggataaacgcgtatccccacaggtcatcgtccgtcagccggaagcggcgcttgcgttgtaccccggtttgcgatttcatcatggtgtgcctccaaacagttcaaaaggatccaagggaaagagaatacccgccccgccaaagcggggcgggcagtcagtccgtcagagaagaagcttacagctggccggaaacgcagttttcagcgccgaacacattctgggcttccttcacgatggtgtcgaacatttcctgagcggtggtctcgcccgccagcagagcctggaacttggggatgatgacctcgtccatcaggatcttggcgttggcgctctgctcggaggtgataccggcaggaggagccaccaccagaccgatggcgcgggcggcgctcttcacgttaccttcgtccagtccttcgggagacacataagcttcacggccggacttgcagacgggatccagcagcagggtctggtccacggcggcggcgcgttcgccggagcagaggtaatccaggaacaggcacacgttcttcaggtgctcatcgttggtgttgttgttacgcagggcgatcaggccgtccacggagccgaagcaggtctcggtcacgccttccatggtggggacgggcaggaacgcgtacttcacggggatggaattttcaacggcggtgccgtcgttggcttccagtgccttattgttcttgttgatgttgttttcgaacagaggcatggccttgccgaagatcatggcgttgccggtctggcacatcaccatgcgctggcccgcttccacgccgtagttgggcatatagccggacttggtcatggtctcgacggcttccagcagcttgagcatattgtcggaggtgtaggcgtacttcagatcgctggtgaaggaattggtcagaccggcagacacgccgaagatgctcaggaagtcgcccgcggtcacgccgctgttggcgaacacgaagccgaagcagttctcggtggtgccgttcttgatggcctccatgaactggtcataggtccagccctcggtctgcaccttggccacgtccacgccggcggcttccagcatgtccttgttggcgcccaacgcctgaatggtgatgtacagcggcaggccgtacacgtggccgtccaggctcatgtagtccagcgcgttctggtcgtagtccgccagacgctccgcatccatgtactggtcgatctccacgcccagacccagctccacataggtgccgatagcggaatagctgacctcggcgatgtcgggcgcttcgcccgcgttggccatggtgttcagcttgctgttatggtcgtcccaggaagtcttgatgacttccaccttgatttcgggatgctcggccatgaagtcgttggcccaggtatcaatgtcgtccagataagtgcccgttaccgggggaaccatcacggtaatggtgtcggtcgcctccgcgaaagcagaggtcatgcccagcagcatcatggccgccagcaaaagagccaggaactttttcatgtttttacctccaacgtttcagctttgtggaatgttccacatcgcctttattataacgcctgcataaacgtaagtcaatgaattttccacttttcacaaaaaaatgctgttgtctcgtggacagcagcatgaaaaagcacgaattttgaacaagttgtcttgcatcgtttcgggcgattctagcgccagttcgtcagcagccgaaggaagccttccagcagcccgggcattcccacgtcctcggcggctacggcggccagacgggccaccacccgatcgcccagcttcacccggagcacacccagcgcgtcccccgctttcagaggcgcttccacttcttcgggaagctccacttccaagccgagctgtttttcctgccccagctttatcagcatactcagacctgaacccgccgccgcgtccacctcgtcctgcattcccagatggactttcaccttctggcccagccgatcgcccttctgcagcaccgtcacccgtttgtagccgttaaagccgtaatccagcatggcccgcgcttcgttgaaccgcgtctggctggcggacgcgcccagcaccacggcgatcagcctcatgccgtttttctccgccgtgcagctcaggcagtatttggagtcatccgcgctgccggttttcagaccgtcgcagccgtcgtagaaccgcaccagccggttggtgttggtcaggtcggtgacccggccgctggggtgggtcaacgtgtccatccacaccgcgccataggtgaaatattccgggtgggtgcacatttggcaggaaagcagcgccacgtcccgggcggtggtgtgctgaccctctaccggcagacccgtgcagttgacgtacacggtgtccgtcatgccaagctcctgcgcccgctcgttcatccgggcgacgaaatccgtctcagtgcccgccagatattcggccagcgcataggcagaatcattggcgctggcgataatggtggatttgagcaactccttgagagaatagaccgctcccgcgtccagcagtgcctgagtgccgatctgcccggcagcggccctgctgaccgtcacctgatcctccagcgagaccgttccttcctccagcgcttcaaaggtcagcagcagcgtcatcagcttggtgacactggccacggggcgctgctcgtccgcattcttctcgaagatcaccgtgccagtctccgcctccaccagcatggcggaaggcgcggtgatctccaccgggaccgtttcttccatgggagccgtccgcaccgccgccgtgccgaggggcacaaggcccagcgccagcagcagcgcacacaggcgctttcctcgatgtccgatcatatcaaaaagctccttccgtttctatcctgaaaacagcatatccacggaaggagtaaaataaaccagtgtgaaaaattgggaattacagcgcttcgatcacgccatccaccaacgcccggaaggtgtgcttcacccggcggcccacttccagcacttcttcctcggtgagggccttatccagaatgcccgccgccatattggtgatgcagctcagacccagcacgtccatgccgctgtgccgcgccacgatgatctccggcacggtggacatccccaccgcgtccgcgcccagtgtgcggatcatgcgaatttcagcggggctttcatagcaggggccgttcatccagcaatacacgcccttatgcagcttgatattctgcttttccgccacctgcgcagccagctcctgcaggctgcgggtcatagcgtaggtcatgtcggggaagcgcacaccgaacgcgtccagattggggcctgtcagcggatttttgccgctgaggttgatgaaatcgctgatgaccatcagcgcgccctcgccgaagtccagattcacaccgcccgccgcgttggtaagaatgacggtcttcacgcccagcagcttcatcacgcggatgggcatggtcacctgccactgttcgtagccctcgtaggaatgaaagcgcccctgcatcatgcagacctttttgccgtgcagcgtgccgcagtgccagcggcccgcgtgccccggcgcggtggataccgggaagccgggaatatccttgtaggcgatgctcttggcgttttccaggctttccacatagtcgcccagaccgctgcccagcaccacgccgatctccgcccggccgcaggcggcttcgatcgtgtcggcggcagtttgcagagtcttcatatattcttcaggggtcattttcatttctcctttcattttggggaaggggacggcgaaacgctgcccctccgtcaaggccgttattcctgaccagccgttttactcacagcttttccagaaagctgacggcgttgaaacgctcgggaacgcccagatattccgccaccgtagcggccatatcggcgtaagtggcccgggtgcccagatcggtcagccccttcatgcccttgtgccagaccagaatcggcacatattcgcgggtatgatcggtgccggtataggtggggtcgcagccgtggtcggcggtcaggatcagcaggtcgtcatccgtcatcttcgcctgaatttccggcagacggctgtcgaaatactccaatccctcggcatagcccttcacgtcccggcggtggccgtacacggagtcaaagtccaccagattgacaaagatcagcccggaagcgtccttatccatggccttgagggtcgcgtccacacaggcgggattgccggcggcatggtcgctctcggccagaccccggtgacagaaaatatcctcgatcttgcccacgcccatggtgaatacaccgtgagctttcaatacgtccagcagtgtttccccggtgggttccagcgagaaatcccggcggcggggcgtgcgggtgaagtggcccttgcctgtgccggtgaaggggcgcgcaatgacccggcccacggcatggtcgcccaccagcatttcccgggcaatgcggcagatgcggtacagctcttccacggggatcacgtcctcatggcaggcgatctgaaacacgctgtcgccggaggtatacacgatagggtagccggtgcgcatatgttcttcgcccagttcgtccagaatggcggtgccgctggcgggataattgcccagtgtcttgcggccgatgcggcgttcaaactcgtccattacgtccttggggaagccgttgggataggtagggaacgccttgtccagcttcaggcccatcatttcccagtggccggtggtggtatccttacctgcggagacctcgatagcccggccgaacgcgcccgccatttcctccggcacgggatagcccagcccttcgatccggccaaggcccattttttccatataaggcaggtcaggatgcgcctgttcccagatatggcccagcgtattcgcccccacgtcgccgtacttgtccgcgtccggcagtgcgcctgcgccgacgctgtccagaacgatcataatcacgcgcttcattgcctgttcctttctgacggctaaagccgtctcaaacattgttttcgggttttcacccgtttttgtccctttgattatactgttgaagaaaagtccacgtcaagccccgctgctgcgggcagccaccatgggcgcttctcccggcttcgcctcccccagcagggcgcgatagcgctcgtccagcagcgccgggtcaaagcccgttaaaaacagcagatgttttttcggcatgggatgcagacagaaccagttcgggcattgatggatcagccgctgccagagtgtcacctccgaaaagccccgcttgagttcgtcgtccacctgcgttagattcaccgtcaggcggcagagaggtttcagcagttcggccggaaccatcacaaaggacaggtcgggaatggcgttgaccgtggccagatgaatgcgcccgtccatcatcggcgtgaaatccggctcggcctgcgggcagatgggatgcttgagcgtatccatattcacccacgcgacgctgtcgaagtccgggtgctgttcggcggtcttgagcagcagcagcggcttggagcgctgaagccactgttcttgcgtcatgcccttaggcagatagctgcggggcaaaaggctgttatccgggcagcttctggcgttggggtacaggctgcgaagcgttcgttcctgcgtgccgccggtatagaggtacaacggcagcgcttccagcgccatcaggaaacggaagcgcagcagatagttcatgatgggcttgcgccgctggagaaggtcgatgaaggccgtcaccagaagcggctggtggatgcgacggcttttgggcagaaagcgctgcttctgttttttccacaaaagagcggctggcagctgctgggcatacgtttcctcccgggtaaacagcccccactgcgtccgcaggtcggagcgccgatcctccggcggcccttcccggaaaccggccagctgctcgaaacgggccagcgtagtgccgggcagaacttcccgcagaggccgccgcagcagggcgggcggttcctcccgcaagggccagagcaccggcctgtccagcacatacacgggaatggccgacgcataggccgcgaaggacagcgtttccggccgcaggtccatccggcgaagtgtttccgtccttgcgaaaatcagcccggggcacaccaccatcgtagggggcggcgcggcgctttccaccagcggaagcccccgggcgatcttcgcgccttccgcctcgaaccgttcggacagacccggcagataggcttggggcggataggctccgtccgctgcgccgatcatgccggtcagcagcgcctcccggcggactgttttggcgaagcgccgcaagagctcctgatcccatttggggccgaagtcatattccccggtcagcagcagcgtatggctggcgctatcctccagcgccccggcgaagccttcccgctcgccgtaaaaatgcacctgagcctgcagccccatccgaggccacacgtcccaaaattccttttccagtctacgggacaaagaaaaccgcagccccgcaggcacttctgccgcccgcacggcgcggctcacggtcagcgccgccagttccgcgtcgggtattttccccaaagccaccagaatgctggatatgggcatgggttcatctctcctgtaatggatttcaggctttctccacgtacttttcgatcagccgcagcgtattctccacgcccttcacatggctgcgctcgtagccgtgggaggcatacacgccagcgccaatcagggcgtagcggatgtcccgtccggagcgaagcgccgcgcccgcgtcggagccgtagaaggggtacacatccacggcgtagtccagctgatgcttctggcacaggtcgatcagctcgccggtcatggcatagtcataggggccggaagaatccttggcgcagatggacacctgctgctcggtgcagctgaggccctcgcccacgcagcccatatccaccaccagcagatcctccgtatcctccgggattccggcggacgcgccgtggcccacttcctcatagacggagaagaaaagggaggttttccgttcgggctgcacctcgccctcggcaacggcccgggccagctccagcagtattcccgcgctgagcttatcatccagaaagcggctgcggatatagccggagggcgttacccgcgcccggggatccaagcaaataatgtcgccgttctggatgcccagcgccagcacgtcttctttactctggacgttttcgtccagcaggatctccagcgtcttgatatcgcgcttgccctcttccagctcgcggttcacgtgaacggaggcgttctgcatttccaccacgccggtatactgacggccgtcccgggtgacgacggtcacattttccgtctccacggcctgacaggaggggcctcccagcagagcaaagcccagtcggccattggctttgatctcccgcaccatcaggcccagcgtatctacatgagcagccagtgtcagcgggtggccctcgccgcccagcgtacacaccacgcagcccttgcgggtacgggtgggggcgaagcccatttccgtcagctgattcagcagccagtccgttacattcgccgtatagccggtagggctggcgatcgccagcaggttcatcgcctgatcgacggcgttttgtgtattcatattcaagaactctccttttaatatggggtgatttcaaggggtcagcaaacagaagggtgcatgaagaccccatgtttcttttcgggatgaagggtggaaaatcctgccagggtgggatgaacctgtgacccgaagggcataaacggcccggtgcgattacggggccgaaggggtgcaggggatgagcaggaaggcccctgcttacggcgttatatgttaactttgtctgaaatagtttccctgccggggcatgacgcgccgactacggcgcgaacggtggggctgccgccccgaagggggtagtactttctttcgaagtgaaagaaagtaccaaagaaagccagcggcacggcgactccagaggcggcccgccccgctgcgcgttattcgcaaatatcggcgttccgggcactgccgtgcccggctcttgtatttgctcaggcctgccagtcgctaactgcctacggcagttgtgcccactgggcacgcgctccctctcggcccaagcttcggcctgcgggagcccctttggggctgtcctcgagcacggggtgtccggtgtcgcatagctccctgccggtcgctctgctcgcctcccaccctccctgcgggtcgctttgggctgcgcccaaggccccactggggccacgcttcccttcgggacagttcgctgcgctcacccgccgggaaaaagccctttattgcccatttttgaaagagggagttcgcaatgtcgcgcgcagcacagttggactgccaacatttacgttcgtgcgcgctcgtgctcactcttatcctctttcaaaaagggcaaggctttttcccttcgctgcctatcgccgctctgctcccccgcaggtggcggttagcaaactcaaaagaatgtcagttgggatgcttcggcgtgccttgaatatttctcaaacaaaaaggccagcgcaggttcaaatccgcgctggcctttcagcaagccatgaggcctgtcgccgaatggcggccttttctattcagctgacggagagccacactgaaccggcgagccatggcgcctgttgcgccacggcggtaaaacccaggccaagccgcatgtcgttctacccccctgcgcgtcaaagacgcgcagagaagggtgcagggcatagccctgcctcgtggatgcggccgtcgtcttgaagaagaatgcggttgccggtaaggggctcgccgtcgagcgtgggggcggagcatgttttggaaatgtggaaacggtaggtggcgctgtaatagcgataggcgatgtgaatggaatcccatgcttcgggaaggacggggcgaaagtagagaacgctgccttccttgtggaacccaagcagttcttccaataagatgaactggtaccatgctgcgctggcggtgtaccaagtccgcccgccgcgccccagctgggaggggtgcgcggaaacatctccggccatcacgtatggctccgcccggtattgatccgccgcttggcggtcaaagccgcgatataccggcagaagccgcagggccagctcccacgcatggctcgactgacccaagcggccataagcgcccatggcccaacaggcggcgctggcggattgatcgccgttttctcgattacccggtatgaaagtgggccggttttcctcttcgaagggcggcgtaaagagcttgagcagccccgcgtccggttcgtagagcagctgccagacactctccatggcaagctgacaacgctcctgggaaagaaagcagaaaaccgcccagacttggggccgcaggtcaatgcggcattcgcggttggaggacgcgccgatcttgtcaccatcgcggtcgtaggctcgtagataccacgctccatcccaaccgtatcgttccagagacgctaatagctcgtcacggcgttcggagagacggtgggcacttttttcatctgcataagggagaaaacagcggatgacctcgcataggaacatacccagccagatgctttccgtattcgccgcatccgtaccgtcgcttaacaaaggaaaaccatgttcgcccagccgtatctggtcgatggcccggagacagtgttgccataagggttcgatcatttcggaaacttctggcgtgaaacaatgctcctgctcgccttcctccggcggttcgtcccgcagatagggaacgctctcctgcagaatggccgtgtcgccggtggctctgacgtaggcggcggtgacaaaaggcaaaaacagcggagcatccgaagcgggaacgcgcacaccgcagcggggcggatgccaccagatttgtacgtcgcctccctcaaattgatggactgcgcagcgaagcagcagttcccgcacgacctccgggctggtgtaaaggagagcaagcgcgtcctgcaactgatcctgaaaaacacaggccccgctggacggttcgaagccagctcgcatcaaaagccgggaggcaatcacctgataaggtagccagcggttcagcatcaggcacagcgcttcgtccggcagatcgaaacgcagcccgcctaggcggcgctcccagcgttggcggcagtggtgcagacgcagggtagcgccatccgcccgaaaggcggcaacggctgcttccaaacgggaacggcttcggaaaaatcccagcgccgaaacgatggttttactttcgcccggtttgagcacgacggaaaagcagagtaccgccgtatttccaccatcgttgggcaaggggccggactgcgccagcgcccaaggtacatcgccccagagcccttcgaaaacaccggcgctcatacaggcggcgtagtccggctccgggtctaatccgattaggcagccgaagcctcgcagatcgggaatggccagcaggaaaccgtctgttccccgctccatggtgcatagctgcgcggaacgagcctcgcccggctgaaaaacgcaggtgtggaaaaaactcaacgttcgttcgtccgtgccgtcattgcgcagatacaaagtccttactccgaaaggggcttccagatcagtgaagcagcttaaccggcattgaatcccatacccggcggattcgtataccgtttctccgggccgatgggtgacgcggcaggaaagcccggctcccaagggccagcgggtgatcgaccagatcagcccgcgttcttcgtcccgcagaaagaaattttcctgcccgcgggggcaaacactgtcgctgatgtgccgggtcagccgcccccgcaggctgcttccggcataggagaagatcagcccgctttcgcccgccagcgtgccgaattcctgagaacaaagcagattgcaccagggtgcgggcgtttgtctgcccggcggcaaaagaatttgataatctccttcgcccggcgtgaaaccgccgtattcgttgaaaaatcgaagtttttccccggcggacagggcggtcttgctttcatccggctggcagaagaagccgggacgtttgcgcagggaaaagcacattcgttccagctgatcatcaatagaaccttcgctggaatgcagcaccagccgcgcctcggcccgcagcagccggacttgttcctcggacagatgctcccgttccagaaagtggactcctccggtctttcccagcagttcgtggctgtggcatttgcggcacaattcgcccagcgtctgagtcagcgccggggattctgacgaagcagggctgcaaagcagcgccagatcaaatttcagcccgttcatgcgaaacagggcgtgcgcccgcagcagcaagtccgccatattcaccgaagcccggtcagcgcattccagcatcaacaggggaaagccaccgcccagacgcagcgtccgcagcttttcccgtggcagctcattccgggaggaatagcggaactgcatgggctgacctgtgtagcaaaggcagcccgccaaacggaaaatgctgttttgctccaatggcgacagccccagataccgtgcggacaccagcgcacgggttttggcaaaatcgaagcggcgcagaatattgccgggacggtcgtaacgttccaaaaaggaagaaaccttctccttttgtccgggacaatgggtgatgaaagtcagcgtgacgcgccctttggcggacagcacgaaggaagcccgcagactgagacaggggtcgatctcgtccccgatcctgtccttccacttgaaaatcggcgtttccaatgcatggggcgcacggacgcttcttccacgtcccaaaaaggcggcgcggtcggtctgcacctgaaacgcctcgaagggcacgtcggcgcacagatgatgccacagacggacgggcggttcattgtcccctgtgggacggcgaagagccgcaacaccggtttgccccattttttccgtatggaggaaaatgttctgattcatttcatcctcctgcggcggacagagcgccggttccagatagctggcaatttccagcgcccggtctgcgtcttcctgattttccaaggtcagatgatgcagaaacgctccgtccaacggattgacgaacagacgcagagtggttttgatttggaaaaattcgttggaaaagacggcctgcgccgtttcaaatcgaatgctttcggaaacagaaggaatacacagatcccggaaggagccgctttgaccatcccgcaggtacagccggggtccggagggcagggtgcagtcctcgtgaaaacgggtcagcatccgtccatttttggccagatacccgccgccctgcgcatcgacgaaccaggtggagcctccgccgcccagcacgtgtgcgtcgatgggaaagcagagcgcacggccctcccgcgaggcaacggcggaaacttccgccgccgctcgcgctttacgccgcaggggacgaagaaccgctccccgaagtctgccgggcttttcctgcaagagcagccggtaagcctgtacgcggggcaggtcgctgaacagccgcgcaatatactggtcgcacagcacgttgcacagcgtagcgaggatcatcccctgatggctgctcatgtggctgcggacgatttggaatccatgctgtttttcggaaaaatcggctgcttcgaagaagcccatggggccttccatgcccatgttttgcagccgaagcaggttttgaaagccgcgccgcagatccaacggcagggccagaatcgacgcatagggcgcaacaacattgttcggcgggtcggaacgctgcgccagcggcggaaggccgaaggccttgtattgataataaagctccgtgtcaaaggtatgacaaccgcttttgctgaccccgtaaacgccgcccggccggtgcacctgctgctgccgcagggcggctttcagagcggaggtcagcagcgtgcccggaattggcggctgaaacagcaggggcgtcatgtactcggacaaggaaccgttacgggagagtaaactttgtccccggcgtatgcgcacagggatacggcccagccggtaccagtggcgcagagggacctgttcggtcatgacggcgtaaaaactgagcagccgcgcttcactggccaacaggtcatgatggctgcggctttcgttcggttggtctgggcgaacctcgacccagaaaagctccgcttcttcatcaaacaggacagaaaaatccatacccttggccaacgcgtccgcccgggcggggagatcgtgaagcgtttccggcaaaatgggcagcagtgcccgaagcccctgtgcacaggcggtcagacacaccgccagctgaccgctgtccgccgaggaaacaaagggtggtggcagcggttccaaagtgcgggtatcgtaccagctgtacaggtgcccctgccattttggcagcatttccagcgtggagagggtctcgccaattcgacgggccgcttccgcagctgggagcagacgcagtttttccgctgccagcagggagatcagatacagcccgatactggtgggcgaggtgcggtgagaaatgcctttgttgggttcgatctgcacattgtcggcgggcagaccgtgggcttcgtcggtgacggcggtctcaaagtacagcatggttccggctgccaagcgggtcagcacctcccgcatatactccgtgggccggggcgatacgtctcgcggtgcttccagcagaaacagcaggaagggcagcgccgcccagcagagagcggcaatcagccccggcagaaagaaaccgtgcagaaaaacggaaaacgccgccatgccgccggaagccagcatacataagataaaatagagcatgggcggcttgtcggaaggtttttgaagctgggcggcgctgccccattgaagcaaattctgtcgggagacgaacagccggtatagcgttcgcccgatcgcgtccagctccatggcggcgttcagcggcaataccatcaaccgggtcacaaacgccgctagggaaacgccgcttaggggaaacagccccggcagatcaggcaccagcagcaccgcccagaaaagcccggcggtcccctgcgccgccagacagaacagcagcagtactcgcagggcgttttccagagaacagagcagcttcagcacgatcttccagcggctcaggccatttagtgcctttcgcggcgcgctgcgtcccggcggaaagacgggcagcacgtaggggagaagctgccagttgccacgggttcgcctgcgcagccgggtaagaaacccatgcagcgtttggggctggctttcataaagagcgatatcgggggcataggcacagcccgccagctgcccttccagcagggcggggttcagcaccgcgccggggagaattttcccttccgtggcgtgcaaaaacggagatggttccaagatacccttgccctgattcgtgacgctgcccagcgcacagccgaagaaacaggcttcagcatcacctgaatcgcccagcatgaatgaaaggcggctttccaccgtgtccgctgcgatttccattcgaggttgaagaacgccgacgccccgccagccgtgagggccgatacagcgccgctgcagaggatgcagcatggctcctaccatccgaagcgccgcacccggcggcagaaaggtatcgctgtccagcgtaatgacatagcgataccggcccttcagtgtttccggcggcagggaggcataggcgaaacggtcttcaatgggctcgccttgaatcagtttgagcagagtctccagactgccccgcttgcgctctcggcccatatgcaggtgatcgggcatatggtagacccgttcccgctgcaaatagaaaaactcatgccctgtgctttcccgaagggcctgaaccgcgctggcggcggtagagatgatctcgccgtcgtcgctcatggagccggtcaggctatcccgataatcgcccagcaacagaaagtgcagattggggtcgggattggcgcagtggaggacggacagcttcttcaccatggagagagcatgagcgggattgagcagcaggatggggcaaaccaccagcgtgcgctgttcgtcggccagccgttccaactgcattcggggaaccatatgcggctcggcccggcgttgataaacccggaagaaaagctgccgccccgtttcccagaaaatcagcgcaaagggcagccacagccacccggataaacggagaaatcctgccagagcaagcagaagcgcaaacagaagtccagacagtacgaaaaagaaaatcttcccgtgcaaacggaaaaataaccgcagaggaagaaaacgcctttcggggttaagccgcagagtcagttcttccaacccttcatccgccagatagtatcctacatgggaaaggggcgaaccttcggcggaggatgccagctccagcgcggcttcgcagacttcttgcgcggaaacctttgcttcccggccgatgccggcagccagccgccggtagtaagcccggcttttctgatccatttggggatagacttcatcctcgcagagcagccggtgcagatcactccattcctccagaagacggttccatggggccttttccactgcgtgaagggatgcaatggcattgccgcaccaacgggccgcatcgacttgccgttcgtgctcctgttccgccgccgcttccgcagaacgctcctgcccgctcagctggttttccaaccaaagcagctgctcattataatctccctgccgccagcgggagaccagtcgttccagaaaactggcgttttgactgtgacgccgaaacagcgccatggcgctacgttcccggcccttttccaacaggcggcacagacggtcggcctgacggcgcgccgactgttcctgaacgcaggaataggacagctcgtttagcaaaagcagaagcgacaggcgaagcgactgcggaagaacggtcaattcctcctcgctgaagggctgaaccttctgccacgcagtcagcgcgtccgtcagggtggaaagccgcagttccccagctgtatgggccaaaaattcccgggaaaaacaggcaatccggcattctccgtccgggaaggccggaagccgaacgccctttagcgcggcttgcaaagcggcggcttcctcctgcaaatagcggccgttctcacagaagcagcgggacgcgggcagcagctcatcctccggcagcctgtccagaaatcggaggtttttttccagggcacttcgttcggaagcgggcagcaaaagccgaacgcgcctgcggcttggtttctgctctgccagagcggccattccggcggacagcgtttcttctgaaaacgattcctgacgggggaaaaacggcttttttcgagtactgagaaagaaaacaaacagcagcgcaaggcccgctgcggcgacccaccattgcatttttcagacctccctgccattaccagccctgccgaagggcacggtttgccgtccatagtgtgcgccgaggaaaaggcttccatgcggcaaaaacccagatgcgccattgacaaatgcaaaaaagcccctacaataaaatgtagatttgcatttcttcaatttcatttttactggcgcgggaaggcagtcttcgaagcgatcctgattttgttttcattcatcttaaaaaggatgtggcgttatgcggttggaaacggaacggctggttttacgggaactgacaaacgacgacttcgcggcatggtatgcgatcctttcggatgcggaaaccatgaagcactatcccgcgccctttgatgaagaaaaggtgcggcagtggcttgagtggaatctggaaaactaccagaactacggtttcggcctgtgggcggtcattctgaaggaagaaaaccgcctgatcggcgactgcggcatggccatgcagtgcgttcacggaaaaatgctgccggagatcggctatcacattcatcggggttaccagcgccggggctatgcttccgaagcggcgagccgctgtctgcagtatgcctttgaggacttgcagctcccggaagtctattcctatatgaagtacgataacaaggcttcctgcggcgtagccaaaaagaacgggatgcgcctggtggagacctacccggacgagttgaatacctttacccgggtgtatgctattacccgggaggaatggctggccgcacacgtttccccgtaaaatgaataggatgaagcagcttcccaaaccagcatggaaggcatgaaggaaaggagggtttgcatgatccagcgttccctttggaaacgtcccgctctgcaaaccagcgaggctgtgcttcttccggccctgcccagaatgaaggcggcagagccggtctattccgacgggtatcttcacgtccgtcctacagaagaccccttccgcccggtggaggaaacgccccggacggcattgagcacctacgtccggccccggggcagcatggcgggccgaagcgtccttcgggccgtcggtattggcgcggatccctatctgcgtcgaaaaacggaaagcggatggccgggccggcggacggggcgcttttcccgatggtaagccgaaaagagacaggacaacgcctgtctcttttccatttgtcgaattttaacgaacgaacagctgggtcacgtagacatatccctggctgtcggagcatacgccgataccgaccttcgtccactgactaccaagaatgttggtgcggtgtccggtgctggacataaacgcggcctgcgccttcgccacggtggcgtggtgggcgatattctccccgacggaggtgaaggcatagccgtggtttcgaagcatctccgccgcgctgcccagtgtgggggaagtgtgggcaaagtaatggttcgcgttcatgtcctgactcttcagccgggccagcgcgcaaagggacggatccagcgtcagtgcagagcgaccgttggccgcacggtcctgattgagcaaaagaaatgcattttcctcttgcgcagtgatggaacccgtagtataatcattgcccgtggaaggagagggcgttgcaatcactggatttctcgtgggttccggcgtttccgccacggtaggaacaggctgttgcgtgggcctcttcgtaggaacagaagtgggagcgggtgtttccgtgggcgcggcggtcgcttcgggcgtttgaaccggcgagatcacgggcgcttgcgtcggtgcggcggtaggcgcaggttcctgcgtcaacacaggctcctgaatgggacagcgggtcggctcgctgggaatgaccggcggctgaacggtcgcggcaggcttcggggtgctgacaggttccgacgtggcggtcgggcagacggtctgccggggtgtgcaatccgtttcctgacggtagggccagccggaaaaaccgaattgtgaagcgggcgtgccgtctgcgaaagcggcaaaggccatggccgtacaaagaccggccgctgccaaagctgtgaacattttggttttcatagtctacctcccatatacggtgatttacgccaaaagcgtaataaaatcgtaatatatttgtcatttagatgcaatataaatggaagcttatttccatggaaatggctggcaggatattctggcagggtcaaggccctgatttgatggagggaaaaatcacatgaaactggtcaaatgcccacggtgcgatctgaattatatccgggaggatgaaaaatactgcaaggtatgccttcgcgagatgaagggcgagcctaccaatgacgatatggaactttgctccgtatgcaacgcggcccccgcgctgcccggcaaggacgtttgcctgagctgcctgaaggaaatgcagtccggcggcggccgcgaagaagtggaggacgctcccgtttccgtggacgagtccaccattggactcaattccgtcagcaccatggacgagatcattccggaaattgaagaggatatccccgccaacgagtacggcgatattcagaatgagctttcgctggaaagcgtcattgaagacgaaaacgaggatgacgacgaggacaaggacgacgacgaccgctgagtttggcggcctgtaaagtgaggcatccatggcaatctatgcaattggcgatctccatctgccgggacatcaggaaaaacccatgaatgtctttggcgatcattgggatcgccattttgacgtgattcgggaaaattggctttccatggtcgcacccgaggatgtggtgctgatccccggcgacatcagctgggccatgcagctcagcgaggcccgggacgatctgatgcagatcgccgcgctgcccggtcggaagctgctcttgcggggcaatcacgactactggtggaattccatcagcaaggtgcgcgcccttttgccggaaaatatgtacgccattcagaacgacgcgctggcgctggacggggtggtctactgcggtacccgcggctggaacattcccggcgaggggcagcccgccgacccgcaggatgtgaagatcttccagcgggaactgctgcggctggaaatgtctttgcagcaggcggaaaagctggcgtgcggaagtctgccggtggtggtgatgatgcactacccgccgctgtataaagatttgctttctacgccctttacggagatcctggaacgccatggggtgcgcacggttgtattcggccacctgcatggagccgggatcaaggtgggctttgaagggctgcttcgcggggtggagtaccatctggtcagctgcgacgcgcttcatttttctttgcggcggatcgaaaaggtcttcccacaggaactaaagtaaatctaaaattttagaccatattttgaaataaaaatgtaataattaaaacaaaacatttgttccctaaagtttggaaagattgccttggcaaactttccaaactttttatttttttgctttgaaaacgttcgaacaatcgttcgcaaaaaagatgggatttcttgccgaaaaaagcgtcaaagccttgcggggcacagctttgagccgttgcaattttcaggggagtggcgcataatggtttcaggtgccagaaagtggaacaaaatgccacgcagaggaacggagggtggagcgcatggacgagacgcatggggcggcagagcaaacgcaaagcgcctccagccttcccaaaaactacactttcttcggcagctacgaccattcgctggatcccaagggtcgcattatcatccccaccgcctatcgcaagcccttgggcgaagtatttaccatcagcattaccagggacggcgaaggaatcgccctttatcccgacccggtgttcgatgaacttctggcggagctctaccgcctcaatcagcgcaaacccgctgtacaaaagtatcaggcctatctggccaagatgagctatcgcggcatggaggcggacggtcagggccgtctgcttctgccgctgaagctgcgccagatggtactgggcgacgcccgcgatgtggagatcagcggtgcgctggatcacatccgcattgtggaccgcaagacggccgacgacgaggatctcttcttccgggagcaccgggaggccctgctggacgaaatcggcaatatgatggaagaataaaggttttccgtaacgaatacggaaaggagaagcaaccatggaacaatatgtgtacacttacgacagctttgcccagcgcggcgcggaacagtatgtgcccaccgagcgttttcaggtgaaaagcagcgtatatctgcccgccagcgatatcgacctgagaacgggccggcttcagccggatcgtcagcgccgtcgccgcacacaggccctgatgctggaaaaagagcggctggatgcggaggatcagaccctcagcgagtctctccgccgggaatacagcaaaagcggtgtacgcatttccgtacgggcgctggtactgatcgtagcggcggtgctgtttttctgcggcattctgctgctgtcccagcagggcatgattgcggagcggcagaaggccatcaaccgtctggaacgctccatcaaggattatcgtgcccaaaacgccagtctggaggaagagatcgctcaggcctccgacgcatccaccatctgctacgctgcggcccgcgacctgaacatgatccccgcagaagcggcggaagccgtctatctggtggctgtggacacccgtcccgccgctgtgaccgcttccactgaaacggaggaaagtgtcaatacaagcgtggcgaacgaagccgacgttcccgccggaacgatccacgtctctgcggattccggcaactaacgccgaaaaaacagactgctcgtcgaaagggttctatccgcctaaaaggcaacatacatcccattagcaccgaaaccgtaaaatgggggaagtatcatgcctgcggagctgcacattcggaaaagagttctgacccttctggtcctgctgatttttcttttcggcgttctcgtgtgccggatcgcctatctgaccaccgcacgctccgccgaactgaccagccggggcgtgcgccagtggacgcgggaaggaacggtctatgcccgccggggcaatattctggataccaacggtcaaacgctggtgatgagcgccacggcctatatcgtcagtgtggaacccggaaaggtacaggacgtgcaggcatttgcccgggccatcagcccgattttgggcctttccgaggaaaaagtggcggaaaaggcctctcagcgaggaaaatcctccgtaacgctcaaacggcaggtctcccgggaaacggcagaccagctgcgtcaactaaagcaaagtaaggatgcggagaccgctgcggccgcatccgcacttttgtttgacgaggatgtccgtcgcgtctacctgcggggcgcgtttctgacccagactttgggcttggtgaacgtggacggcgtgggccagtccgggctggaacagcagtacgaaacgctgcttcgaggcgaagcgggccgcagtatgcgcagtgtggacggcaaagcccgccctatctacgacagcggcaatctctacattgagccgcaggatggcagcaccattcgtctgaccatcgacgcgaccattcaggaaatcgtggaaaaggccatgcgggagtgctacgaggtcaacaaggcacaggccgttcacgcccttgtgatggacgtgtataccggcgcagtgctggccatgtgttccaagccggattacgaccccaacgacccgccccgggaacagctggacgcgctgcaaagcctgatgcgcatccgcctgatctccgattcctacgagcccggctccaccttcaagattttgacggctgccgctgcgctggacagcggcgtgaccacgccggaggacggcttctactgctccggcaagatcaaggtggatggggacaccatcaagtgctggggcagtccccacaaggccgagaccatggcgcaggccctgcagaacagctgcaacccggtctttgtggaactggccctgcgcatgggggcccagcggttttaccaatacctgcacgcttttggcctggggtcaaaaacgaatattgacttgcagggggaggaaagtggtatactaatacccgtgaattccgtcaagaatgtggatctggcgcggatcggcttcggccaaagtgtggcggtaacgcccattcagctgctgaccgccgcctgctccgttctcaacggcggacggctcatgcgaccctatctgctgaaagaagccgtctccccggacggaaccgtcctctaccgcacctcgcccaaggtggtctccacgcccatttcggaggaaacctccctgaccatgcgcaagctgctggaggatgtggtggccgtcggcggcgcgaagaacgcccgcattcccggctaccgcatcggcggcaagacgggtacggcgcaggtgtacaaggacggccgcatcgtgcggaacgttcacattggctcgtttctgggctttgccccggcagacgacccgcgcatcgcccttctggtcatcgtggacgaggccgataccccggtggactacggcggaaccaccgccgcgccttttgctagacaaatcctcgaggatgtgttaccttatttaggttatcagcccgacgagggggaggatagcgagccggtgcaggtgccggacgtgacgggccagcctttgtgggaagcccggcgaacgctttcctccatgggactgaaggtgctggacgacggcggcagcggcagcgtcaccgcccagatgcccagcgccggcgccacgcttcgcaacggcgggcagatgatgctctacacctacgacgaggctttgccggagacggaaacgctggtatgcgtgcctgacgtttcgggcaagtctattgcatccgccgcttcgctgcttcgacagcgcggcctggagatggagatcgatggaagcggcttcgcggtttcgcaggagcccgccgcgggaagctttctcgcgccggattccgtcgtgctggttcattttgagttaccgaatccataaggatgggggagtaccaatgctactgaaggatctgctggtggacgtacccggagttttggaaacgaaggggaatatggaagtccgcatagacgccctgatcaccgacagccgggagaagacctccggcggtctgttcttctgcatcagcggcgcgcgctttgacgctcacactttcgtgggtcaggcggagaaaaacggctgcgtcgcctttgtggtggagcgcattctggatgcggacgtgcctcaggtaaaggtggaaaacgtccgttccgccatggcctatatcgccgcggccttctacggccaccctgaaaaagaaatccgtatggtgggcgtgtgcggcaccaagggcaagaccaccaccagctacctgatgaaggccattttggaaaaggcgggcttcaagaccggcctgatcggcaccaccggcaatatgatcggcgaaa

SEQ ID NO: 251 - DNA, 2482 bp, Unknown
  16S sequences of unknown bacteria
tacacggcgacaggggcgactattgctataagggcttccgccacagcctttgccacggttgggcgtcgggcgccgtgccctttcttgccgagtgtgtcgcgggaatcgaaattgccgagccgggctgtaaaaaaatcagaatctccccgaaaatgtgcggccttgattttattgatgtgtcctatcccacccctctcggcattttaaaggccgaaataaaacggtcggatgacgggttctcggttgaatattcggcgcccgagggcatgacggtggaaattgcctgagcgttttaaaagttccttttaaaagcaaaaaaatcttgactttttccgtttcttgtgataacatgatttgtatgcaggtgaatttcactttaacgcctgctccttgctccgaaattcggagccaaaagtccaaaaggaggtgctgacaaatgtccaaatacgaggtaatgatggtattttccgtcaagaacggagaggataccgccaacgcattgcttgagaaattcaaggcaatgatcgaaaagaacggcacaattgacagcgtcgatgtatggggtaaacgcagacttgcataccttatcgacgatgagcccgaaggcttctatgctgtcgtgaagttcacttccgaacccgccttcccggccgagcttgaccgtgtgttcaagatcaccgacggcgtgcttcgcaccatgatcaccaacatcgactaaggaggggaaattatgcttaattccgtaattatgatgggcaggctcaccgacaatcccgagcttcgccagactccctccggccgttcggtttgctccttcaccattgccgtcgaccgtgctttcaaaagccaaaacggcgagcgtcagactgatttttttgacgttgtggcatggggttccaccgctgattttgtctcgaaatatttcgttaagggacagcttgtggcggttcagggccgcatggagacccgttcctatgaggaccgaaacggcgtgcgccgcaaggcgttcaatatagtcgccgaaaatgtccattttgccgagcccaagagagattcctatgccggcggcggccagaccgctcccgcttatgacaatcagtctcagggcgcgtccgcctttgaaaacaacggccgtgacgatttccgcgaaattgacgacggtgacgacgatctcccgttttgatttacgggagccaattttataaagtaaggactgaaacagaaatggaaaacgagaatgtcgtagagaccgtggctgccgaagctaccgagactgccgccgctcccgccgaaaataagcgtcccgagcgccccgagcgtcccgaacgccccgaacgccccatgcgcggaaaccgcaagggccgcagaaaagtttgcagcttctgcgtggacaaggtcgagaccatagattataaggacgttgcaaagctccgcaagtatacttccgagcgtgcaaagattcttccccgccgtgtgaccggcacctgtgcccgtcaccagagagctctgaccaccgctatcaagcgcgcacgtcacgttgctcttctgccttatatcagcgactgatttgaagcttataaagcccgttttcctttggcgaaacgggctttttttagacttggcggtgaaaaaatgaaggaaaatacctgttgctttaccgggcaccgagccattgacggcggcgaccttgagccgttgaccgaacagctcgaccgtcagatagagctgcattatatgtgcggagtgaccgacttttgcgccggcggggccctcggctttgacaccctcgccgcaaaaagggtcttaaaattccgcgaaagccaccccgacgttaatttgcggctttttttgccctgccccgagcaggccgcccgttggtcgagagaaaatacagagacctacgagcaaatcaaagaaagcgcaaacgaggtgaaatatgcctgcgggcactacacagacttttgcatgggaaagcgcaatcaaatgcttgtaaatgcgtcgtcggtctgccttgcctatcttaaaaccaaggcgggaggcacggcatacaccgttcgctttgcaaaaagcaggggagtcaaggtcataaatttggccgacgagctgagccccttcccgaaatttgaaaatcttaaatttgacatttaaccctttcacggccgtgaaggggattttttttgcggttgaaacatattcttgccgatgccttgtgcattttaaacaaaaataaataacattaaatttaatattgattttttgttgcaaatatgtcataattaagaaaaagcaaaaccgcaggccgattggaggtttgcaaaatgcttttaggaggagaaggtatgaaaaacaaaaaaatatctgcaaaattaacggcgctgtttttgtccttttgcgtgctttttgcggcttttccggcggcgggatttttcgcctcggccgaaagcccccgcagggattggctggaagtcacctgtgagcgggc

SEQ ID NO: 252 - DNA, 32714 bp, Unknown
  16S sequences of unknown bacteria
cgttgcagggcggccagacggtcgaaggtgggatcgtccagacattcccggatgcgggccagctccaccccgagggcgcggtaatagagaatgtcctgcagtcggtctacttcggccgggccgtaatagcggtaaccgctttccgctgtccggctgggtttcagcaggccgatctggtcgtaccagcgcagggtgcgggtggtcaccccggacagatgcgacaattcatggatggaatattccattgcagatccctccttggaaccagtgtagcagttgacgtaacgactgagtcaagggatagtttgctctgtttcagaaaaatgccgcgcaggatagcgctgcggcgcggttcctgcgcggaaaacggtgcatcgtgggcagacgcggaaaggagtccgtgcgctcttttccgtacgaagcgattcatgaaggcgatgctgaggagatatcctgcttcagcccttggctgagccttacgccttttcggcagagacccactgttcccatacgtcggggcgatagccgacggtgcagtatttcccattgcgcacaatgggggtgcggaacagctcgggatactccagcagcttttcttcctgcgcctccggggtgacgtagggcagatacagctcttcataggcccggcactgagtgtcgatcagggcttcaaacccaagcttctgttttacggcgcggtattctccagcggacatgccgtagcgcggcaggtcgatgtattggtatttgatccggcgctctttgaaccagcgctcggcttttttgctgtcaaaagactttttgtttccgaaaatttggatgttcataagcatacctctgtgatacaatagtaatagaaagatttgagaaatgtgggaaatggaggacgttgaaatggaagagcgggaaaagattgcgcgtttgcaggagatggtggatcagagtcacagtatcgtcttttttggcggagcaggagtcagtacagagagcggtatcccggattttcgcagcaccgatggattgtaccatcagcaatatgcttatcctccggaaactattttgagccatacgttttatgagcgaaagtcggaggagtttttccgtttttaccgggacaagctcctgcgtctggatgctcagcccaatgcagcccacaagaagcttgcggagttggaacaggccggaaagctgcgggctgtgatcacgcagaacatcgacgggctgcaccagaaagcagggagcaagcgggtctatgagctgcatggaagcgtcctgcgcaattactgtgaggcgtgcggcaaattttatgacgccgagtatatgctccgcagtgacggcgtaccccgctgcagctgcggcggccggatcaaaccggatgtggtgctctatgaagagggactggacagcgacacggtgtccggtgctgtgcgggctattgcggaagcagatatgctcattgtgggcggcacgtcgctggtggtctatcctgcggcgggactcatcgaatactatcgggggcatcgcctggtagtcatcaataaaacagcgctcagcaccgcggcagatctttcctttcttagctccatcggacaggtgctctctcaaatcaaagtgtaacataaacccggcgcaatgccaagagtggacagcgagcgattggaacggctgcctacagggagaacaaatgccagtggggaggatttcccactggcatttgctgtgttcaaagaataccggcgagagccatcttgaaagctcccagtgcctgcgtataactttgggcattttttccaagtttctgcggatcgtaatcacacatgctgaaaaggccagcatagtttgcgacgatcttttccagattctgttgcaggaaaggcatgggcggctggcgccagtgaatttcgtaatgaccgttgacgacccgtttttccatcagggcctgcagtccgtagactagggggacaatataaccgtccggactcagtgtttcaatttctctggcggaaaaaggggttgtgatttgttttcgtttctcattcagggatcgtacagcggtaatgtgcccatagcttccccctgcggcattgtacagcttgggaaacatctcatagatataatcgtaaagagcgggcagttccacggcaatgcggaatgccgatgaaacctctgcattacacagttcgtgcttgtagccgtctccggtttctgcggtaacgttgggcgaactcatcagtttttcaaactgtttcaggcatccgcccttattgcggtatatattctgagccagcacaggttcgatcaccctgccgttgtgatccttaaccgggctgatcaggctcaggggaatccagaccagagcgatgatgtcctgcgtcttgatttcaccgccgtcatttgttttccaggcaatgcgctggctgaccgtgggatttgcctgatccatctgctcttttaatgcgtcgaaataaccgcgctggtttgctttgtcggagacttggagctgaacattgttgtttcgggcggcgcagatttccagaaggtcgtttttgaacgattccacacaggcagaatcagccggggtgcgcggcaccaacagctctaccgggataaaaaagcgcagggcagaactctgcgcatctgtatcgctgcccttcagatacgactccacaagaaggcggtttgcactccaaagcgccttgaattcgttccaggtctttgggccttttggaaaggttgtgccggcatattccatggcgttttgcagaatgtacagcccgatggcgagggtattgtgcccgccgtccagaattccctcaatggcgggattttccggcgtaattttgacgcggttgcgttccagtcgttcatattgcgacgcggccaacagaatacccttggttttgaatgggaaaacggtgggatcggtttcgatggactcctgaatggcggcggtgacagggccggtttttgaggagcggggattcgcttccaagtccagaacatcgatgatcgggacaaggtatttggccatggtcaagccgacaattttggtaatgtctccaacagtctgctctgcggagaaatcgaatttgatgatgacgctttctttctttttcagcatagttattctcctttcggcggggggagaagtcctgaaaaaaggaccaacaaatgttggtccttgaaatgcaatcttcctgatcatgcagtatttccagaacctatccaggtgcttttttgtttccacccactatccagtgggcaactaaagtttagcagagcagactttttttgtcaagattcgatttttccaaaagaaattgccgcgccagagcagcggggcaggccggggcagcgtatccaggccaaaggagatgccgggtgaattctgcaaaatataagatttggttcacagatcgttcaccaattacggtgacggtttgttatactgtagaaaatgcttgagaaagtgcgggagaggacagctatggaggaaaaacgaagaaaaggatacaggaatggactgtgggccgtggtatttcttgctgtgctggcggcgcttgtcttttttttgtatcataccggctttttcgcttcggtgcgttctctggacgatatgcgggaatatattgcccgcttttctccgtattcctatggcgtttattttctggtgcagcttctgtcggtggtggcagcgccgatccccagcaatgtaacgagtttggctggggcggcggtttttggcacgctggtggctttcttgctcacttatgctgccgtggcattggggtccttgctggtgtttcagctgacccgcaggctgggccgcccctttgccgagcgttttgtgagccgcggcaacatggataaataccgagatatgatcgaacgaaaacaagatgtcttttttgccatggcgtttctgctgcccggttttcccgatgatatcctgtgctttctggcagggcttacgacgatgccgctcaagcggttcttccttttggtgctgctgtgccggccgtgggggctgctggtgtcctgtgcggtaggcggcaatgcgctggcgctcccaacttggcttctggtgctcctgtgtgccgccggcgcagcgctgttcctgattgccatgaaatacggcgaccgatgggagagcgctcttttgaaaaagctgaaaaaataaccccgtctccggtgtcaaaattgcaccggagatggggttttcccatatttgaaacaggatagcagtttttacaggcaattatttccgcagccagcaggcaggggtgagcagcaccaaaatggggaagatttccaagcgcccgatcagcatcaatgctgtgatggtgagcttgctcagaatggacagagctgcaaagttgctggtaggtcccagcgtacccataccgggaccgatgttgctgaggccggtcagtgcagcggagaaagcttcggaaaagccaagttgatcgaaggacaaaatcaaggtaccgacaatgagcaggaatacataggagtagaaaaaaacgcatacggcggaaagggtgtcttcatccacgcgtttcccgcccagcgtgatcgcgcggacctgacggggatgaatcacccgatgtacggagcggcacatcattttgtgcagcagaagaagacgcacaggtttgacgccgccggccgtagaaccggcacatccgcccatcagcataagcagcaggagaatgccctgggctgccgtgggccacagagtataatcttccatggcaaagccggtggaggtgatcgtggtgaccacttgaaacacgacatctgtgaccagggaaaatgaggcggaagagccgccctggaataggagaacgagaacaatacccaccgatgcacccagaacggtgccgccgtacagacgaagctcttcgttttttcgcactgcaccgaagtcgcggcggactatgcagaacagcagcgcgaaactgacaccggagaggaacatgaaaagaatcgcgatccagttgacggccagggaatcgtaataagccaaactggcatttttggtggaaaatccgccggtagacacagtacacatagcgtggcagaggctgtcgaaccaactcatgccggccatgcgcaggcacagggtttctgcaccgatcaggatcagataaatccggtacaggatcttggcgctttctcctattttgggcaccagcttacttttgatcgggccgggactttcggctttcatcaaaaacgcgctgccggtgccaaggcggggcaaaagggccagcatcagcacaaggattcccataccgccgaggaactgggtcaggctgcgccagaataaaatacttttggggagcgcttccacgtcgcggatgactgatgcgccggtggtggtcaggccggaggctgtttcaaacagagcgtcggcaaagttgggcagcgccccgcccagccagtaggggagcgcgcagaaaaaggacaagcatagccagcagcctgccacaatggcgaagccgtcccgtaaatgcaggcgatcgtttgtcgccatagggcggcgagccagagggatacccaacagcagccccagcgcgatggaaatcagaaaggcgggggtgaagccgtcctgctctgccagggaaagcagaagggagggcagcatgcacactgctgcagcacacagcacggtgccgatgattttggaaaggaatcgtagattcatggaatggcctcgtactcagtttttcaaaatatcattcagatcatccaggaacagcgaacgggcaaccacaatgacgcggtcgttttccaggatcatatcgttgccgttggggatgatggcttcttcgccgcggacaatagcagcgatcagcaggccttttttcagccggaggtctttcagtgcagtattcaaaaagcgggtagcatgggtggcggtgaactctaccgcttccatctgcccgtccagcaatttataaagccgctccacagcgctgccttcggagttggagaaggaacggacataactcgagataatattggaggtcaaatctttggggctgatgatgctgtccaaccccacatccttggctaggccgatgtaattggggcgggtcattttggctgccacgttgggaacacctgcatggatagcgttcagggccatcagaagattgtcctcatcgcggtcggtcagggacacgaaggcgtccgattggaaaatgctctcgctttgcagcacttcgttgtcggtgccatcgccgtggatgatctgggcgttgggcagcagttcggataaacgctcacatttatcgcggttcttttcgataatgcgcacatgcatgtcggatttggccagttgccagcttaaatatgtggcgatgcggctgccgccgaggattgccacggttttgatgcgagtcataggccgacccatcagctgaaatgtgcgccgaagctccaggggattgccgatcagatagccggtatcgtcggtctgcggtatgaaattaccgtcaggaatgatgatttcctgtccacgctgtacggcgcagatcaatgtgcggtttggatgcaggcggttgaattcgtgcagcggcataccagtgattgcatcgtcctgctcaatggaaaaaccgaccatttccacctcaccccgggcgaaggtgtctacgccggtggcagaggggtagcggaaaatacgggaaatttccatggctgcggcctgctcggggttaatgatcatgtccaggccgatctcccgctgcagcagtggggcgtcggcagaatattccgggtcgcggatgcgggcaatggtgtgtccggcacccagttttttggccagcaggcaacagacgatgttcacttcgtcgtagttggtgacggcgattaccagatcggcttggcccgcgccggcttccatcagcgtgcggatggaagcgccgtttcccgccacgcacataacgtccagattgctgtctgcccgctgcagcgcagtgccgtgctggtcgaccacaatgaggtcgtgattggcaaggctcagctgctcggccagggtatagcctactttgccgtttccgataataatgattttcatattatgtgcctcgcatttcttcctttggcaggggcggtttccagctgccgtattttttgcgggtttcgttcatgatctggttgaatatagcacccatgatcagaacggtggacgtgagatacagccagagcatcagtacaacgatggcgctgatcgagccgtaaatcacggaatacacggaaatattgccagtgaagtgggaaaaaatattggagaggatcatccaggcggcgaatgcgccgaacaggccagggcatacttcataaaagcgcgggtgccgtttgtcgcagccgttcagataaaacacatataatacaaggagcatcagcacggccagtaccagcccacggaagcggcgccacaggggggtgaacagggggggaagggaaaaggtggccgtcaggaaatccagcacgctgttgctcagggacatgaacaaaacgctgaatacaatggccagcatcaaaaacacggcatacagcagcaaatgaagctggttgtgcaggaagccgcggggggtgggacgtttccccatgcccttgcggatggctgtgatcagggaattggtggcgcgcatgggaaaccacaggcaggcgaacaggatggccagcatcatcggccccaactggatgctggatacatggcgaagataagcggccaccaccgacgcggcttcggaaggcaaaaagtcatacaggctggcgatgatcggatattgattcagatgggcatagcccagcagcatactgaaaaaaagcatcagcggaaacatactaaatagcagataataagctaaagaagcgctttcgcggcccacgtcgtcctggaaataccgacggacacaggcccgagcataatatttaaaaatatagcttccccggttccgttttctgcccttcggcatatgatttgacatgctttccccccgtttcttttcctgcggcaacattttcacattaagaaatttagtatagcacaaaacctcataaatggcaaaccgcaaatcagtcggtgcgtatttgagagatgaacctgcgcggcagcaaaagtgccgcagtatagaaggatagtatttcccgctgcgtattttggcatgtaagggcaatacgcgcggggattttgcacgggagaggtttgcctgatttgtggagatacgggagagcggctccggcggtctggggcgattgaaataaaaaaagaaagacacagctgaagccgtgtctttctttttggtgcgcgaggcgggagttgaacccgcacgtgcgtaatgcacactagaacctgaatctagcgagtctgccaattccaccactcgcgcgtatcgattttgttttgtgcgcttcatttgagcacttcgatagtatacctgcagaaaggaaatttgtcaacactttttatcgaaaaattttatcgaattttatcgaaatctggtaggaaagcctggacacgctttggcgaaggccacctcttgcctgggcgtggaaaattgcatataatattgtcttaaagaatactgcggtgcggaggacatgccatgaaaatgatcgtatatgctgtcgaggcggcggagcggccgctgttggagcgatatggcaaacagtttggctgggagctgacgctgctggccgcaaagccggaacaaaataatgcggcgcaggcggaagggatggacgtggtgaacgtgctctcgtctacctatatcacgccaaagctgctggatgcctaccgcgccggcggcgtaaagatggtagtcagccgcacggtgggggtggagcatatcgatgtggcttatgccaacgccgtcggcatcgctgtgggcaatgcaccatactctcccgctagcgtagcggattacgccattatgatgatgctgatggtgctgcgccacatcaagcccatgctgctgcgctatgccgggcaggattacacggcgcggggttatctcggccgcgagctgccaaacctgacggtggggatcgtgggcctggggcgcatcggcgagacggtggcgcgtcatctgcagggattcgggtgccgtattttgggctggaaccgcacgcccagagcggatctttccgatcttgtggaagcggtggagctggacgagctgctttcgcgcagcgatatcgtgtcgctgcacctgacggcctgtccggaaacggagcattttatcgacgtggcggcgatcgaaaaaatgaaagacggcgcggtgctcatcaatacggcccgcggccctctggtgaataacagcgcgctgattgatgcgctggagagcggaaaactttccggcgccggactggatgtcttcgatggcgaccggctgatttattaccgggatttcaaaaatcagctgatcgcacagcggcagatggctatcctcaacgccatgcccaatgtgctgatgcttccgcatatggcctactacaccgaccaggcggtggaggatatggtgcgcaattcactggacggcgcggcgcgctatttgaacggagaggaggatccctggctgatcggggaaaaggtatgacacagcagcagatgaagcaacgcgggatgctgtacatcttcgcatcatattataaaccgcactggaagctttttgcactggacatggcctgtgccttggtgatttgtgtgattgatctgatctttccgctggtttcgcgcatgtccatgcagcagctcctgccagcgcaggcctaccgcgctttttttgtggtgatggcgcttatggcggcggcctatgtgctcaaaggcggcatgtattttatcgtgacctactgggggcatcttctgggtgtgcatattgaggcggatatccgtgccgatctcttttctcatatgcagcggctgtcgttctcattttatgacaagaaccgtacagggcagctgatgagccgcgtcacgggagatctgtttgaaatttccgaactggcgcaccacgggccggaggattttttcatttctaccgtcacgatcgtcggggcgttctgtgtgatgcttaccatccgctgggagctggcgctgatcgtgtttgccgtgattcccttgtttgtgctctttaccgccattcagcgcaaacgcatggcggaggcgtcccgggaggtgaaagtgaagctggcgggcatcaacggcgaggtggagtcctcgatttccggcatgcgcaccgccaaagcctttgccaacgaaacggcggaaatccgcaaatttgaggtgtccaatgacgcattccgcggcgccaagcggggctattacagggcaatggccatctaccagtccggcatggagtttgccatggggattttgtcggtgctggtcattgcagccggcggtgtgtttatcatgcggggcggtatggactatatcgatctgattacgttttctctgtatgtgactacgtttattacgcccatccgcaagctctccaactttgtcgagcagtttatgcagggcatggcgggctttaaacgctttgtggagctgatgcggacggacccggcggtggaggatgcgccgggggccaaagaattgaccgatgtcaaaggacaaattgacctggacgacgtgacgttccggtatgatgcggcgggaccggcggtgctctcccatgtgtcgctgcacgttgccccgggggaaacggtggcggtagtcgggccgtcgggcggcggaaaatccacgctgtgtcagctgatcccgcggttttacgatgtgagcgggggcgcggtgcgcatcgacgggcaggatgtccgcacgctgtgccagagcagcctgcgccggaatatcggcatcgtgcagcaggacgtgttcctctttgccggtacaatctatgagaacatcgcctatgggcggcccggcgctacgcgggaagagattgaggaggcagcccggaaggcggagatctacgacgatattcagtccatgcccaacgggtttgacacctatgtgggcgagcggggcgtcatgctctccggcgggcagaaacagcgcatctccattgcccgcatctttttgaaaaacccgcctgtgctgatcctggatgaggccaccagcgcgctggatgcggtgactgaggcggctatccagcgttcctttgacgcactgagcaaaggccggactactcttatcattgcccaccgtctgtccactatccgtagcgcagggcgcatcctggtagtgaatgaggcgcggattctggaggagggaacccatgccgagctgatggatcggggcggcgcttatgcggcgctctatcaggcgcagcaaatggcgggaaggccgcgaagctgaggtgcgcttgcctttgagcggaaagaacggaaaacagtctaaaagcctctgcgctccttctgaaaggagcgcagaggcttttaggtatgttcgtagcgctgtatggaagtggggaaatccggagggaaaacggtgaaccataggtgtcctgattttgtatgccgctgcggtcgctctaagtcacaatggatccacagggcggcaggagatttgctttcccataggaagcgcgaaataatacgttccgttctgggaaagcatatcgcggggatacagctgcgtggtatctgcatatctgctgtccagcaggatgtgtactttcgtgatttggggatctgtgagtatgccgaacagattggggacggtgagacttttgagccgggaaaaaacgccgctgtccagactggacggcggcgtttgtgttacggttttggcagatcctgctgcggcagatcggtcatgctgtgcaggctgacgcccaacgtagacagattgtgcagcagtgcggaggtggccgggggcaggatgcctgcggcgcccaaagcgatcagggaaccgttgaacccaataacgaaacggtaattggcgtcaatgcggcgcatcagttcctgagacagggcacgcagctgtaccagttcgtacaggctgtgggcggacagtgtgatatctgcgatttcgcaggcaatggcagctccgtcgccgatggcgattcccacatctgccgcagacagggcgggggagtcgttgatgccgtcacccagcatgatcacagtgcttccggcggccttggcttcgcgcacatagcgggctttgtcctctggcaggacctcggcatggtattcatccacgctgacttccgcagcgatggcggcggcagtgcgttcgctgtcgccggtgagcatcacggccttgcggaatccttgacggcgcagtgcgctcagcacatcccgtgcttcggcgcgcagtggatcggcaatgcagatcaccgcagccaacgctccgccgatggcgaggtacaagtgactgtattgttccggcagcgttttaaataatatctggtcctctgcaggtaccgtacaaccctcatcttcaaaaacaaagtgggcgctgccgatgatgacgcgttctgtgccaaccttgctggcaatgccgtgagccaccagatactccacttccgaatgcatttcctcgtgctgcaggttccgttcccgcgcggcctgtactacggcgttggccatggagtgggggaaatgttcctccagacaggcggccagccgcagcatctcatcggcgctgtggccgccgaaggagatcacttgggctaccttgggcgcggcataggtcagggtgccggttttgtcaaatacaatggtgtcggcgcgggccatgacttccagatactttcctcccttgacggttacatgggaagtgccagcttggcgcatggccgacagcacggtcagcggcatggctaacttcagcgcacaggagaaatccaccatcagcaccgacagggcgcggctggtgtttcgggttagcagatacaccagagcgctgcccaacagtgtgtagggaaccagtttgtcggccagattggcggcacggtgctctgcagcggatttgagctgctcggactgctcgatcatggagacaatcttgtcataccggcctgcgccggactgctgtgtgaccagcagcgtacacgaaccttcttccaccacggtgccggcgtaaaccgacgcgccggggcgcttggcaacgggaacggattcgccggtcagggaagcctgattgaccatgacttcgccctcggccacggttccgtccagagggatcaggtttcccatgcgaaggcacaccagatcgccggggcggacctgattcagcggaaccagaacctcgtcgccgggcgttttcagccagacgcggtctacgttcagcgacatgcagcgggccagatcgtccacggattttttgtgggtccattcctccagcagctcacccagccgcagcaggaacatcacggaatcggccgtggagaaatccatgcgcagaatggagacggcgatggaaagcccgtccagcagctccacatggagctgcccgcgcagcaggcagcgcagaccacggaatacatagggaacagcggtttttatagtccacaggatgcgcagcggctgagggaaaaagaccatgcggatgagcttaaagcataccagatccaccagtttttcctgatagagccggctgatggcgcggccgctgtgcacgttggacagggtttcgacgtcttctgcatcgtaccggaagcggctgatggcctgcagcagatcggcacgtgtcccgctgtaacggatcacggcgcagcaggttcgctcatggacgacggcctgctgtacgccattaaggcgctgcagccaggcctccagcaggtcggcctgcgctaagctcatgtgtttttgatcgatacgaattcggatacgcccccggcactcgtgggcgatgacatatttcatgctttggcgccggcttcttctgcagcgtcttccacaacttcgtcctgtgcggtacgctgttcgtttagttctttggcttcggccaggatatcgccagcattttcctgcacggcggccactgtgtccataacggtttctttcatgcgcagcgcagcggcggtggtgtgcgtgtaaatttttttagcgtccttgctggagagcagtttgatgccggcggagccgaacagtacgccgcctgcgaacagggccagatttttgtagcaattcatagtaagtacctcctgttgtctgatgtaatttttatttgtgctgatggcctgtaatcaggcacatggccatacagagcacagcggcccaggcccaaaatgcatggtacttcacactttctcaccccctttccatcgccaatgcagattttgtgcattttgttagatatagctaaccgaaaggcgcaattttcttgttagttattgctaaccacctactgaaagaaaaccgcctgctggcggtttcgcttcactatgtcacaatatagcattttttaccacggtcgtcaattcgaatcaaaggagctgcggaaaaattttccgcagctccgcacaggcaatttcggtatagattgtttagaacaggggaacgaccgcgccgccgtaggtttcttccatgtaggtccggacttcatcgctgcacagagcggtgtacagagcctggatagcgtcatcgttttcgtggccttccttaacgaccagcacgttggcataagcggtgccggcttcgccttcgctgtcctcaatggccagcgcatcggcaacattcaggccagcgtcaatggcgtagttgccgttgatgacggccatgtccacatcctgcaagcgcaccggcagctggttggcttccagttccacgatatcgaggttcttgggattttccacaatatcggctttggttgcattgatgccggcgccctccttcagggtgatcaggccctcctgctgcagcaggagcagagcgcgggcttcgttggtggtgtcgttgggaacagcgatctgcgcaccgtccgtcaggtcagcgaccgtgctggctttgccggcgtacagaccgagaggctcatagtggacgttgccgacgctcaccagatgcgtgccgtcgctttcgttgaacccgttcatgtaggtgatgtgctggaagtaattggcgtcgagggagccgtcctctaccgcagtgttcggcgtgacgtagtcattgaacactgtgatttccaaattgatattctgctcggccaggataggcttcacaacctcaaggatttcagcgtggggtgcaggtgtggcgccgatcttaatggtgacggcttctgtgttgttgtcgtcgctgccggcgctgggggtctcgttggcattgctgccgcaggcagacagcaggcccagggacagagcagatgccagagcaactgcggtgaacttcttcagtttcataataaaatctccttcgtttttgaaatctatgatccggccgaaggccgaattgaatatgggggagaacgtcaatcctgagacttcgcggaatggtctttgcgtgttttctttatggaagtcaggcggcgatccagtgagatcgaaaaatgcgtgccgatggtttgaaaaatctgaaccagaataaccagtacgattacagatacccacaggacaataaacatgcgacgctgatagcccaggttcaaggccatggaacccaatccgccgccgccaatggcgccggccatggcgccatagctgagaatggtgatgaaagcggtagtaaagccggtgatcagagaaggcaggctttccggaagcataactttccagatgatctggaacggcgagcagcccatggcctgagccgcttccacaacgcctttgtcaatctcgcgcagcgaagcttccaccaagcgcgccacaaagggaaaggctgcaacgatcaggggaatgatggtggcaaccgtgccgatgctggtgccgagcactacgcgggagagtgggatgaccagaaccatcagaatcaggaacggcacactgcgcagcaggttgatgatcacattaagtacgttcattagaggtttgggaagggggagaatgccgtttttctctcccaccacgacaagaacgcccagggggaggccaatgatgtaagcgaacagggtggaaagaacggttacatagattgtttcccagatggcaaacagcaggccatcctccgtcaggagcagaaggcgctgcacctctggattctgcagaagatcagacagcatagtccggcacctcctctacactcacaccgttacggctgcggatataagacagcgcccggctgtaatcgacgctgctgtcgggcagccccaggagcatgtagccgaaagcatggccgttgacgtttttggtttctgcgccgagaatattggctttgacgccgcagtcaatcgccagtgaagcgatcagcggttcgtaagaagtgccgccgttgaacacgacgcggagcacccggttggacttcaactgtgccggagctacatcgctgttagggaataccaggcgctttgcggtttcggttttgggattggcgaaaatgtccttcacgctgccttcttccaccaccgcaccgtgatccagaatcgccacatgggagcagatctcttcgattacgctcatttggtgggtgatgatgatggcggtgatccccaggcgtttgttgatgtcagaaatcaactgcaaaatcgcgtgggttgtgttggggtccagagcggaggtggcttcatcgcacagcagtaccttgggattggtagccaaggcgcgggcgatggccacgcgctgcttctgtccgccggagagctgcgccggataagcgttggctttgtccggaagccctaccagttccagcagttccatggcgcgtttggcggcgtccgttttgcgcacaccggaaatctccatggggaaacatacattcttcaggcaggtgcgctgcatgagcaggttgaactgctgaaaaatcatggtaatgctgcggcgctgggcgcgcagctgtgcttcgttcatggtgcacagattctgcccgttgatgaatacctcgccctccgtgggacgctcgagcatattgatgcagcgcaccagagtggattttccggcgccgctcatgccgataatgccgtagatctcaccgtcggggatctgcagattcacatctttcagggcttgaaaatcgccgtcattggtttggaatactttagatatgtgttttagttcgaccacaaatcgagcctccttttctttcgcttcatacatggaaagaaagaggtcacattcgttcgcggcctggtgagcgctgggtgcgaatacccataatgtcccactccttttctgttctgccgacacgactggcccgcagtggattggatttgccaacgtaaaagaacgactggcatatcgattccctattctatgccaaaataatttccttgtcaatgtaacagcggtgtaaattgcctgaaaagttgcgtttggactgttgactttaatgataaaaagtgttacagtatggtgtattaaagagaacggcttttgttatatgccagaaaacatatgtaaaaaataggttgttgtgagtatacatgcaggaagcagcaatgtcaagttcaaatttggaaaggggtaaagcagtatggttgttgtgatgaaaagcactgccacacaggaggacatcgaaggcgtaaaaaaggaaatggaaacctatgggctgaacatgatggtcagccatggtgatgactataccattctgggagccgaaggcaatgctgccgcggtggatcaggaaaagatttctttgctcagcggtgtggaacgggtcatgcgggtgtcagagccgtataagatggccaaccggaaataccatccgcagaatacgcaaatcgatgtgggcggcgtaaaaatcggcggcaaaagacttggagtcattgccggcccctgcagcgtggagggcgaggaacagattgcgggcatcgctcgagcagttaaggcttccggtgcctgcgctctgcggggcggggcctataaaccccgcacgtccccgtatgcttttcagggacttaagcagaacggcatcaaacttctggagcacgcccgtgcagccaccggtatgccgattgtcacagagattatgtccacggacaatatcgaaatgtttgaaatgtgtgtggatgtaatccaggtaggcgcccgtaatatgcagaactttgacctgctcaaacagttgggcaaaacgaccaagccgattctgctcaagcgcggcctggccaataccgttgaagaatggctgatgagcgcggaatatattatggctgcaggcaatcctaacgttatcctctgtgaacgcggcatccgcacctatgagacatatacccgcaatacgctggacctaagcgcggtgctggcagtcaaacagcagtctcacctgccggtgatcgtagatccctcccatgcaacaggaaaggcgtggatggtgccggcaatggccaaggcggccattgccgccggagctgacggactgatcattgaagtgcataacgacccgccccatgcgctgtgcgatggtgcccagtctatccttccctcggattttgatacgctgatgcaggaactgcggcccctggcgcagtgtttgggccgagagctctgatggcgcagaaaaagacggccctggtggtggggcttggactaatcggcggcagtgtcgctatggcgctgcggggctttgaaaattaccgggtggtgggaacggattgcagttcccaaacccgctcctatgccgcggctcatggtgtgtgcgacgaagtggcagaacgggtggaagatgtgctgggacaggcagatgtggtgttatttgccatgcggcctcatggtattgcacagcagattgaggctttccgggattcgttcaagcccggtgcgcttgtcactgatgtgggcggtattaagggggcgatcatggaagcggcacagtgcctgccggacacagtggatttcatcggctgtcatcccatggcgggcaaagagacctctggtgtagagaacgcggaaaaagagctgtttcataacgcgcattttattctgacgcctgggccgcgcagtacgcaggaacatgtggatttactccagcggatgggaaagtatatgggctttcgggatgtcgtgattactacgccggaagaacatgatgccatcattgcctataccagtcagctgatgcatatcatcgccgtggccacctgcgacgatgaagatctgttccgctgcaagggctttgagggcggttctttccggggctgcacccgggtggcggcgctggatgtgccgctgtggacagagctgttcaccatgaacgctccggcgctgtgccgttgtatccgcatgctggaggataacttgcgtgcgtatcgagaagtgctggagcggggcgaccgggagcagctggtggaaaagttgaccgcctctgcccggcgaaagcgaaagatgaatctggaatgaagaaaaacgcccccggagggcagggaaaagccctgtctgacgggggcgttctgtgtctgctgtgcaagaaaatttacaatttatcggttgtattggagataaaaacgcgttacaataaaaaaccaattaaaacagtacaatgattttaaatccgaaagaaaaggggagggaaccatggcaaacgcgacaaaacatgcgctggccggagctctgctggagttgttgaatacaacgactttagataatatcacggtcaaagacattgtggaacgcgcgcaggtcagccgtcaaacattttactatcactttggtgatgtgtatcagctgctggactgggcgtttcagcgtgcgatccgggaactgggtgaaatgcctgaggaaaactggcgtgaccgcctgctgatggccgtggagtttttgcgtgcaaaccgggctttggccatgaatgtctaccattcccttggcatggagcatctggcacgggggctggaggctgctgtccgcgaccttttgggcgcggcgccgaaggatgccatgaagtggttgccggcagacccggaggatcaggaatttttactttcctttttcagctacggtgtgatgggaattattatacgttggcttgatgacggcatgcctgagaaattggatcatatgatcaatgagatctatgcactgatgcatcatggagaggacaccccgctgctgccggagccggggtactctggcgggatgaaagaggatggatgggagaagttataatgataaaaaaagaattggagagggatgaagcttttgcgtgggaggtgctggacacagcgccctatgcagtgctggctatggccgatggaaagggagaaccctattgtgtgccgatgtctccagcgcgggatggacgtacagtttatctgcactgcgcccgtgtaggggaaaagctgtctcttttgaaacacaaccccaaagtggcgctgacagcggtatcgtattataaggcggtttctgctgaatataccatgagttatgcctcggcggtgctgcgcggccaggcctccattgtggaggatgatgcggagcggatccgggccctgcgctgcatcagcgaaaaatactctggcgcagacatggataaatttgacgctatggtggaaaaatatgcaaaggctgcccatgtcatccgcatcgatgtggagcagatcacaggcaaagaagcccggaacggctgaagaccgtggaaaggaattcgtgcgatgaaactgaaaacgagaaaggaaatggatgctgcttaccaatgggatctcagtcccatctttcccgatcaggcggcttgggagaaagcatatgctgctgcggcgcaggctgtagatgctgtaggtgcactggccggtacgctgggcgcctcgtctgcgcagatgaaagctggcctggacactatttatgaaacgctgcaggcggtggaacgcgtatacttgtacgcgtccctcctgaaaaacagcgacaacggcgatgcagagtatcagcgcatggaaggcatggcgatgaatctgtatgtggccatgagcacaaaatgtgcctttgtggatccggagatcctggcgcttccggaggaaacgctgcgcgcttatatggaggatcctgcgctggcatcctatcgccatattctggaagataccaaccgcgcccgggcgcatacgctggatgaacagggcgagcggcttctcgccatgctctccgacgctgccggaacaccggacaattgctttaccatgcttgaaagtgtggatatggagttccctgtgatccgcagcgaacagggagaagaggtgcgcctgactcacggaaattatgcacttttccgcgttagtgccgatcaaagggtgcgcaaggaagccttcgaagcgtaccatggcacatttcagaattatctgaatactattgccgccctgtatgccggcagcgtcaagctggacgattactacaccagggccagaggctatgacagcgcctgcgctcgggcgctgtttgccagcaatgtgccgctttcggtatacgatagcctggtggaagcggtacacggggggcttggcactatgaagcagtatctccagctgcgcaaaaaggtgttgggactatccgagttgaatatgtacgatctctattgtcctatggtagaaaatatcgacctgcacctgacgtttgaagaggccagggaactggtctttgctgccacggcgcctttgggcgaggagtatcatgcgttgctgcagcgcgcgtttgacgagcgctggatcgacgtatatgaaaacaagggcaagaccacaggcgcattttcctgcggcgtctatggcgtgcacccctatgtgctgatgaattttgccggtacgctggaagacgcttttacgctggcccacgaactgggccacagcatgcactcttatttttcggatcacgctcaggattttgccaaccatgattaccgtattttggtggcggaggtggcctccacggtcaatgaggtgttgctgaccaaatatctgctgaaaacggagcaggatccccgtcgccgggcatatatcctgaatcattttctggaagggttccgcacgaccgtgtaccgtcaaaccctgtttgctgaatttgagcgcaaggcccatgagctgtatcagcagggtgagccgctgacggcggaggtactgaacaggctttaccgggagctgaacgatctctattacgaaggtgcggtgaacaatccgctgcaggacgtggaatgggcgcgtattccccatttttacacagcgttttatgtgtaccagtatgccaccggtttttgctcggctgtagccatcgccaaccggattctggaaaccggagatgcatcggattatctgaaattcctggccaccggcggcagcatgtatcccatcgacgagctgaagattgccggcgtggatctgaccagtcccgaaaccgtaggcagtgcgctgcaggtatttcaggaaagtctggacgaattgaagagtgtattggagaccctcgactgaacaagagaacaacaggagccggaaagctgcttgctttccggctcctgttgtttctgtgcgcggttccgggcgggaatcatgctcccggttcttctcggatttcggcggctttttgagcctccctttccgcgcggttctgtttccacagctcttcggaaggatgcttccaatgggctgcatactgatcacatttggcacacaaatgctccaccgattcgggcgactgcagatccgtggagtgtgcgccggaagcgtttaccatggcacgcagtttttccgggttctccaacatcgggcaggggcgcagcatattctcgttgaaaggctggccgtcatggtatgccatcatcatgggggactgcagcgcctgcagcaacgtcttttcgcgaatattggaatcagaatagtgtacaaaaacgcagggatccacatcgccgttagcgttgatgtgcagatagcgccggccgccggcgatgcagccatccacaaactcggcatcattctggaaatccatggcgaacagaggcttctcggcacggtatttgcggatgcggcggtaagtttcgatacgctgctccggagtgggcagcagggcgggggaggcatcgttgcccacgggcatatagtggaaataccagatgaaatatacgcccagttcgatcagcttgtcgaaaaacgcctcggaagtaatggaatcgaagttggcactggtgtaacacgccgaaatgccgtaaagcagtttcttgcggcgcagcagtccgatagcgtcgatgactttctgatatactcccgtaccgcggcggctgtcggtggcgtcttcaaacccttccagcgagatggccggcacaaagtttttcacccgcagcatttcatcggcaaaagcttcgtcgatcagtgtggcgttggtaaagcacaaaaatacgcagtcgctgtgcttctcgcacaggcggataatgtcctttttgcgcaccagcggttcgccgccggtatagatgtacatatagatgcccagcgctttgccctgctgaataatattgtcgatttcatcgaaggtcagattcagcttattgccgtattctgcggcccagcagccggtgcagtgcaaattgcaggctgaagtgggatccagaagaatcgtccagggaatgttgcagccatatttttggcgcatttcctcctgcttgggccagcccatcagggcggcattgatgaagaaattggctgccatggcctgcatgacaccctcatccaagtcggtaaacagacgacggacaaatggatagtaagggtgtgcaggattggagatggcttcacggatcagcttacgctggctgacaaattcacctttggcaaatttatcggcccaatccatcaggcgcagcatgtttttctccggatccttgtggagatagcggatcagctgctccacgccgaagcgtttcagtgttgtggaaaagtccattttataccgtcctctttctatcgtaatctgtccaagttcggattacttccatgatatgcaggatgtggtaaaaatacaatagacagagtgggacagatgaccaaaaaccggacacaggagcggaagtgtaaaggagaaaatgagagcgtgtttgtgtataaattttgtgcaaaaataaacggcgccgaagcgccgtctatttttgcagaagatggaaagaagttatgcgcgcgaaaaaggcggtcaaccctgcatggtctgcacaaacgtgccgtagcgcgctatgcgctcttcggcgtcttcccgtgtggcaccggaggcgaggatatacactttgatcttcggctcggtacccgaaggacgcacgataaaagatgtaccgtccgacaactcaaaacggagcacattggagccggacaattccatagtgctcctttcgccggtggaaagatcaattacgctgccgtccctgtagtctttgaactgcgttaccgcggttccggcaatttcggtatagggattggcccgcagcgaagccatcaggtcggccatttttgcaagaccgtccaagccgggcatcaccaaattgtgggtcttttcggcaaagtagccgtacttctcatacagagcgcccagtgcgtcgaacagtgtcatattctggctggcataccagcaggccatttccacgatcagcatggaagcggtaacggcgtccttgtcgcgtatgtaatttccgatcatgtaaccgtaagactcttcaaaagagaaaatggcgtgatacgagtgcgcctgctcaaattgggcaatcttttcggccatgaatttgaatcctgtgaaagtgtcaaagcaggacacgccgtttttttcggcgatagcgcgcaccatttcgctggacacaatgctcttaagtacggcggggcactctggcatggttcctgcgcgttgtttggcgccgatcaggtaatcgcacagcagtgcgccggtctggttgccggtaaaggggacatagtcgcctgtgtcgctgcgcaccatgatgcccacacggtcggcgtcgggatcggtgccaacaatcaatgtagcaccgttctgcttggccagttccacagcgagataaaacccttccgggttttccggattgggacttttcactgtggggaaattcccgtcgatcaccatctgctgttcttcgcagaggatgtgtttcaagcccaggcggcgcagggccaagggaaccagtttgtggccgcagccgtgaaagggggtaaaaacgatcttgaaatcgttggccattttgctcaccatggccggatcattggccatggccatcacattgcgcataaaacgctcgtcgcactcgtctcccatgacggtgatcataccgctgaccacagcctcgtcgtagggaacggatcggatgtccttgaaaatatcaattttcgtcagctgttcggcaatggcatcggcatgctggggcggcagttgggcgccgtcttcccaatagaccttgtaaccgttgtattccttgggattgtggctggcggtgatgttgataccggcctggcagtggtattcccgaacggcaaagctcagctcaggcgtagggcgcagggcatcaaaaatgcgcacgcggatgccgttgcccaccataacttcggcagcggtgcgggcaaaatccatgctgtggatgcggcagtccatgcagatggcgacgccgcgctctttggcttcctcgccctcggcggcgataacattggcaaagccctgggtggcatggcgcacgacataggtattcatgtgatgcagtccaaccttcatggtgccgcgcagtccggcagtgccgaattccagcgggccgtaaaaacgggactcaatctctttgggatcatcctggatcgcgagaagctcggcatgctcctccgcagtcaaaacatcgctgttgagccatttttcatactctgccatatagttgcttgccatatcgtttccttcctctcatttgatatcaagtccgccccaagccggtgcggaatgtccatacacaggcgcgaaccgctccttcgccagacagtaccggggccatggcggcagtacgctcagggagacggttctgcttcgacagcgctttctgcttcggcctccgcatcagcggaggattcgagcagggcttttgcgtctgcggccatggaggcgggaacgtaaagcgctgcgccgtaggcggatgtgccgatgatcagtttgcccagagaaccttcattattatacgttttgaaagcggggataccataggcgatcagcatattcacggcaaaatccgcttcattgttgaaatccggaacgtgggtgagaaatacggccttgtcccgtgcgccggtttcgtccgtgggccacatggcttccagctttgcgccttcctccgcgctgctgccccaggtgagttctggttggtcggttttatgttccattgtcgttacctcgcaacattcatgtgaaaattatttgtggtatttggaaccttccaggatctggaaggaacggtagagctgttcgagcagcataacgcgggccaggtggtggggaaaggtcatcggtgacatggacagctgcgcccaagcctctgctttgagggaagggtgcaggccaaaggaaccgccaatgacaaaaacgagatgctttgcgctgctgttgctccaggcggcgatcaggcgagccatctcttcgctggagcgcatgcggccttcaatgcagagcgccactacgctggcgccgggcgggagcttggcacggatggcatcggcctcccgggccagcgccgcgtcaatctgagcctgggacggggaatcgggcagccgttcttccttcagctcgactatatggagtttacaactccgggaaagtcgtttgcagtattcttcgcaggcctcgctgtaaaatttttctttcagttttcccacacatacgagcgtgacgttgtacatagctgtgctcctttacaggatatgaacgggactgggctcgctgcggggcgccacagccagtgacacggaagtgcacccatttcgatccagcgcctgccgcacggtgttcaacgccatagccggcgtgttgttttcgtggcttaaatgggccaacaggacgtcttttacgccgtttttggcggcggacacggcaaattgggcggcatcgtcattggacaaatggcccgagcggccgagaatgcgttctttgaggtagtatggataggctccgctgcgcagggtttccacatcatgattggattccagaaccagtgtggaaacgccgcagagcacatcggcggcacaggcggttacatagccggtatccgtcagaatccccacggcgccgtcggcgctgtcgagccgatagcagacgctgtcaccggcatcgtgggatgtggaaaaggaggagatacggaatgcgcccacacagaagctgtcgccggaggtgaacgggcacagcagcggcgaaataccggcaaagcggttgcgcaggtcgaaggccgtgccgttgctggcatagatggacggagcataatgtttgagaagcgtggttaaagcgctgacatggtcgctgtggctgtgagtgatcagcaaggcgctcagatcggctatggacaggcccagcgccttcagggctgtattgatgcgccgcacggagataccggcatcaatgaggatatgtgtgctaccggcactgacaagggtcgcgttgcctgaggagccgctggccaaggtgcataatgttgtcaaagggattccttccttttatgtatatggaattggattacgcggggcgcaaacaaaaacgcccaagggagcgccccggctcccgccggtccttccgtgggcgttttcaggctgctcagccaacgcggataacgctgcccgtgtcgtcggatacttcctcgacgcggatgtttgcacccagcgcgcgcaatttgccgacaatatcctcatagccgcgctcaatatagttgacgcaactgacttccgtggtaccgtgagcggccagggccacgattaccatagctgcgccggcgcgcaggtcacaggcctggatgggagcgctgtcgaagtggtcaatgccttccaccacggcgacttttccgtccacctgaatgtgagcacccaggcgcttgagttcgtcgacatagcggtagcggttgtcccacacgctttcggtgaccacgctggtaccttgcgccaggcacagtacggccacgatttgaggctgcatatccgtggggaaaccgggatagggcagtgttttcacattggtgcgtttcagtgcgccggtgcggcgcaccagaagattatcgtcctgttcttcgatttccacgcccatctcaatcagcttggcgctgatgcagtccaaatgcttgggaataatatttttgatcagcacttcaccgccggtggccgccacggcggccatataggtgccggcttcgatctggtctgggatgatggagtaagaaccgccccgcagctgtggcacgccgcgcactttgatcacgtcggtgccggcgccgcggatatcagcgcccatggagttgagaaagttggccagatccacaatatgaggttccttggctgcgttttcgattacggtattgccatcggctagaacagcggccagcataacgttcatggtggcgccgacgctaactacgtcaagataaacctgagcgccgtggagatggccttcggtggcccgggcatggataaagccgccttcgacttccacttctgcgcccatggcggcaaagcctttgatatgctggtcaataggacgcacgccgaaattgcagccgccgggcatggtgacttcggcccggccgaaacggcccagcaacgcgccgatcatataataggaagcgcggatgcggcgggccagttcatagggagtgcgggtggaacggatgtgctcgcagttgatttccacagcgtgagcgttgacggaacgcacctcggcgcccaaatcagtcagaatatcaaagatcagcgaaacatcactgatttgtggaatgttttcgatccggcaggtaccattgacgagcagtgcagcgggcaggatggccacggcggcattttttgcgccgctaatgggaacctcgccgtacagaggcttgccgccatcaataatatatttcttcaaagaaagacacctctctaaatttcaatgttcgttcagcgaaccgggacggcatagattctgccatccgttttatcgaaagaaatgtgcaaaaagcacgattccataaaaatccacgtatagtataccattttttgcggcaaaagcaataataagatccagaaaaaatacagatctgggaaaaatctgatattccggaaaagaagtgccttttattttgctacagagacatggccggtaacggcatcgacatagtaccgatacgtattggtatcgatgcagtaaaccggtgagaggagcaggggaaccgacgccgtactctgcagaacatagccggaagagatctcgcttatagtattgcagattctgcccgcttcattacaataatcgatcaaataaataacagaggaacatttgccgatggcctgcgcgtcgccaatggtgctgccggaggcgggaataaagaatccgctggcggaacagagcagtccgtcctgcagcacgaactccatggcggcgctgtacaccgggaggttatccacatagggcgtggcggtgatgacggtgcgctcccccacggtttccgctgcggtaaaggcgtattgtgccgggcagtattttttcacaaacgcctccggtttttccacctgcagctccggggcggcgatggtcagctgaaaagcgccgttggaacggaagacggcgctgccgccggtgaatgtgtactgctgtgtgccgccgccggcatcctgctgcttcaccagcgtgccgagcagtgcggcagtgaaagcctgttcttcttccatattgcgctcataggaatacgtgaaagcagtatcctgtccctgcagcagttcaggatcaatggatacgttgctgttttgcagaaaaaggacggtctggtcgatcagattctgtgccgaacggtgctgcgcatagccgcgggaagcgacgagcagcagcaggaaaacattgagcagcagcagtatcacgaggatgatgtttttcagccggtaagtttccataagcggcaagcctcacaaagtcaatgttatttttgcagccaggtgggggagagtgtgtcattgccgtcgtcccagtaaccggccagcagttcggcggggccgtcgctgcgcaccgcggcagcggcctggagcgtgggcagcagggctgtgcttttttcggaggatgtataactgcgcagatgaacggtgaaagatgtgatcacgccttcttccacggtgacctgtgccgtattatcgtccggatggaaaatggggaagccgccaagcatgtagccgaactggatctcggcgttcccgttttggtcggcttgggcagagagaagatacaaacgcgcgtcgccgatacggtctgctgtgatggcgctgatgcactcccatgctgcgtcagtgcattcctgcagcgtaggggcttcgccggagtgctttggccggagtacagccgcatcggcttcggtgccgctgtaatatacagtgccgtctggttcgaagcgtatcgtacgcaggccttgtttgattaccagagtgccgtcgctttccgtgtagcgggaattggagtgtacgttgaattccagctgcatcagaatctggtcgcactctgcgctcgacaggacgctggcgacggacagttcgggaagagtctgccgcgcctggctgatcagcgtgtagggagccagagcctggtaggattcgccgctgagaaatgcgaattccgcgctctcaccgctgtggcgttcggctgcactgctcagcgtttccgcagtcacagtggtgctccagcagtagtatgcgtcgtgctccggatcccagccgtacagagttacgcttccatcctgcaggctggacagcagcagcgcgcgcgccggggtctgcggtgcgttcgcgctgccgccgatccaggcgtccaggagcgacagcggcagtgtggtggtgaaatcataatagatgctgttgttttccagtgcccgctggaactctttttcgtccacggttctgccgtcgctggcggaaccgagagcttcggtcagcagtgggccaaggtcttcaaatacgtttcccccggtagtttcgccggtccaagcttggcagactccgccggtgcgcacggcgatgcgaaccgggagctgggcgctggtttgagaagcattggtgttttcggtgctgtaaacgctgctggtgaaaagacggttgaacgtatccggcccgatcagctctgtacgggagagaagaaacagcgcagaaagcaccagacagacaatcagtacgttttggatgcggttctgcacatggcggtcagctggtctcatcatgaggcgcctcctgtacgtcctggcagatgggaagagtgatgcggaaagtggtgccggggccgtcgcgatccacaagggaaagggtgccgctgtgctgggccacgatttccgcggcgatggacaaccccaggccggtgccgccggactcgcgggaacgggccttgtccacgcggtagaagcgctcaaacacatgggcacggtctttggcagggatgccgatcccgttgtcgctgacttccagccaggcttcctcgccttccgtaccgccgcgcagctcgatgcggccgccgtcgggagtgtatttaatggcgttgcccacgatattcatcagcacctgggtcagccggccccggtcacccatgattacgggcagagactggtaactgcgcaccagtgtgtggcggtggtttcgggcggccatctcaacggcgttgcacacgccgtctaccgcatcactcagcgggaagcgggtcatattcatttccatgtggccgtaatcgaatttagacagcgttagcaggtcctgcacgatatgggccatgcggtcggtttcgctgatgattacgtccaggaatccgttggctgtttcaggcgggacgtcggaagcgtcgtggagggtttcggcataactgcgcacattggtcaggggagtgcgcagttcgtgggatacattggcaacgaattcgcggcgaatttcctgatccctgcgctgctgcgtcacgtcgtgcagcacggccagcacgccgccttcggtgtcgttggaaaagggcgtcaggtggacctcaagggtggtgtctgcaacggtgtattcgcagtcttcataaaacggactgtgcagggccagcacatagtcaaagtccacctggggctggaacaggtcgtcatagcgcagcgcggacatatctttctggcggagcatctgttcagctgcggggttgaactgcatgatggaacggtcgtgggaaaaggccaccacgccgtcggtcatgtgcagaaacagagtgtccagtttattgcgctcgcttttgacttcgttgatcgtggtctgcagtgtttcggacatttcgttgaaagtggtggtcagaataccaatttcatcgctggattccacggcgatgcggcttccgaaatcgccggcggcgatgtgctcggcgctgctggtgagtctttcaatgggcagcgtcatggttttgctcagtaggaaggaaagtagcaccgcgatcagaagcccgaacagcagcgactgcaggatgatcatgaacagt

SEQ ID NO: 253 - DNA, 12691 bp, Unknown
  16S sequences of unknown bacteria
attgcgatcataatagtcatcactcttatcattgttatgcttgcatcggggattatctacgctttcagcacttcggctcctcagggtgcagaagaacccaaagccgacgtaaccgacgaaagcaataccgaaaccgaaagtgttaccgataccgcagcgcccgaagagcctccggaaacagaaaggaagatagaaatagtcaataacctttccgccgatattcccggggttactgaagagcagaatcgtcacggactcgtcaaagcggggacggtagccgaaatggttcaaagcgttaaagcctccggcatgaaagttgaagatattcaaagcatctatccgcggaatgatatgctgagttattttggcgtgttcggttacggggagattgacggaaatctcagtgtttcatccctataccgaataaacataaaatttcccatagaatttatgaagcagatcgacgaagacaatctgtatgtcgtttataaagtctacggtcgggatgacatgattttatatacctatgttttcttcaaaaggtttgccgaagaatgcaatgaaacgtctgaatcatggtggcgcagaggaaacatattttacttggtgaaaccccttgagtacagcgattttgcggacattcgcataggctcgactaacaccgatgtccatgccgtcgatcctgtagtctacccgggactgtaccccgatgattatccgaaggaacccttcaaatcttaccacctgatgaaggacggagtactgacgataacatactctttcgagcccgatgcagacctccctctcgtctccgcaatggattatgacgattcattcacattcgagccacctcactgcaattacataatgaacgtcaaagttgacccgaacgactttcccgctccctcctcctccgacgttgaggtgaagtaaacgagatttgtacgcagggtgtaaatcccgcgccgggctgcaaaaacgatatatttccgcttaggcagctcaccgtagcgaaaagcagcacgttttcgcatctttgcataccgaaatttcaccgacctatccccccaaggcgcattccgtgaatttcccggaatgtgccttttctatatgttgcacattcgaaagcatcagatgttgattttcatgaaaagatgtgttaaattatgcataaccaccattcggaaaggcataaagacgaatgaaaaaacttctctccctcgcgctgtggagcgcgatcctctcggggggataatcccggtcggctctcgcgtcgtgcgcgcagagcgcggtgaagaactattcgccgaagatcatcgtttcgtcctcggaagccgaggagagtgcccggtatctcacgaaccgcccccaagcagacagtgaaaaaacaaaaacatttaagcgaaaaatccacccgcttcgcgggtggatttttattcatgcggcaggctttttcgacggcgtatccgccgtcacgtcacggtgcgccgaacggatttatcaaagccgcttcctcgataaatcccgcggtgtttttgtctgccgtcaccgtgccgtcaatccgatttttccaccgttatcgcggcacggcgcacaagtccgcctcgcgtgatcgtaacataggcgggctcgccgttttcatattttatttcaaagcatgctccgtctctgacaaacgcaagcgtatcccctttgcgcttgccgttcgctcgcgcggcgttcagccaatcacgccctcccgcacacgcgccgtcggaaagcgggatcgacgtttcgccgcaatttacgcggttctccgtgccgcggaatgtaaagacaacgccgcggagattttccggctccgttattctcacggagccatcacccctgtccacgcggagcctgtatccatcctccgaggcaaataccacgatcgccccttcgggaaacagagcctcgtcccgagacgcgccctctccttcgtttgaagcgcatgacgacgaaaaaaggagaagaagcgccgccgaacaaaatataaagaatctgaatttacgcataacaaaatccctccgatataacaagtatatcggagggatgtcccgattatgacaagcctcagcgggaaacctcggataccacggtagcttccttgttgctgtacttgaagcggtcgaccatttttgcaacgacttcaacgataattaccgtctttgagccgtccttctccgcaaagcggaagaagtagcagtcattggtcacattcggtgcgcttctgaaatcgatggtgcgctttacaccgtctgtgtactggctcttgtactgctcggtatagggagcgatgatctccgcctcgcggatctcgcggcggtagatcacctgatcgacgtcttccttcttcttgtttctcttgatcttgtcgaactctaccacggtgtggggaacctcgttcagatttgcagtgggagtgtagatctgatacttgagatcatatgcgacatgagtccatgtaagagcgaaaagtatgtagatcagaatcggggcaagtacaccgcccgcgatgaagccgacgatgcggaaaacggcgttgagtcccacaataataccgattccgactgcggcatagagaacgatgagaagtattcttacaataagattcgatcctgacgcctttttggaaacgacgtaatcgatagcgttaactgaattgttcatgacaaaaccgcgccatgtgcgcgctctcctttttgttttataagaaaagtatatcacagcggaagaaatatttcaatatcaaattaaatgaatttgatcattttctattgaaatcgacaccggcatatgatatcattcatatgtaccatacttttgaaaaccgaaaggaacatacaatgagcgtaagctttaacgaagaaaaacgaatattcaagcttgactccgccgaagcaagctacatatttgagatccacgaggacggacgtctcgtgcacctctacttcggcgcgtcgatccccgacgataacgtagattctctccgcctcagacaggtcgcgtgcgactccttctcgccctatctcggcggcggtccctacgacggcacccatgcgccgaatatgtctccgtttgagtatccgacgaccggaatgggagattaccgtctgaccgcatattcgacgaaggcggcggagggcaacctcgtttgcgatctcgtttaccgcgatcaccgcatctatgccggaaagaacggaatagaaggacttcccgcaacctatgtaaacgatgagagcgaagcggacacgcttgaggtcgatctcaccgatcccgtgaccggcgcgattgtcaccctcatctacacggctttcaataacaatgccgcaattacccgttcggtacgggtgaagaacgaaggcacaaagccgttcgcgctcgagaatgttgcatccgcctgcgtaaatctgccgctcggcgactatgacatgatcaccacgcacggacgccatgcacatgagtgcactctctcgagaacgcctctcggacacatgacccagtcgatctcgagcgtgcgcggcgcttccggacacagccacaacccctttgtcataatgccccgtcacgacacccgcgaggaatgcggcgactgctacggcttcaccttcatatacagcggaaactatctcataagcgccgacaacgactatttcgcctcgacacgcgtgacagtcggaatcaatcccgagggctttgagtggacgctcgcccccggcgaggtattcgcatcccccgaggctgtcatgatgttctccgaaaacggaatcggcggcgtcagccgttccttccaccgcctgttcagaaagaaccttgtccgcggcaagtggcgcgacatcagacgtccgctgctcatcaacagctgggaggcggcttacttcggatttgacgatgacaagcttgccgcgttcgctgagaaagcggctacgctcggcatcgagatgctcgttatggacgacggctggttcggaaagagaaacgactcaagctcgtctctcggcgactggtatgtaaacgagaacaagctgaagggcggtctctcctcgcttatcaagcgcgtgaacgccgcaggtctcaagttcggtatctggtatgagcccgaaatggtttctccggacagcgatctctaccgcgctcatcccgattggtgcatccataccgagggacgcgcacagagccttgcgcgcagtcagtacatgctcgatatgtcccgccccgaggtgcgcgacaacgtattcgagcagatgtatgcggttctttccgagaacaacatcgactatgtgaagtgggacttcaaccgcaacttcaccgaggcgtcctcgtccgctctcagcgcggatcgccagggcgaattcgcacaccgctatatgctcggaacatatgagctgttcgaccgtctgacaaaggcgttccccgatctcctcatcgagagctgctccggcggcggcggacgctttgatgcgggaatgctctactactcgccccagatatgggcaagcgacaacaccgacgctatcgaccgtctgtcgatacagttcggcacatcgatggtttaccccgcatcttccatgggcgcgcacgtttccgcggcagcgcgtactcccttcgccacacgtgcggcagttgcgctttggggaaccttcggctatgagcttgatccgctccgcctttccgaggaggactgcgatgaggtcagacgcgaggtcgaagactatcacaagtacaacgagcttatccgcaccggcgatctctaccgccatgtttatcccatggaggatcttaaccgtgcggcatggtcctttgttgccgaggacaagagcgaggtgcttctcacggtcgttaccaagagcagcccgctctgcaacgtgttcctgatccgtctctgcggactcgatcccgacgcatattaccgcgaggaaagaagcggcagagttttctcgggcgcgcttctcatgaaagcgggatacaacatgtcgtttgagaggaacaacgacggttccgccgttatgactcacttcgtccgtgtataattcacgctcttaacccgatcaattaaaaatccgccgctttcgctgttcccgatccgggaatgcggggcggcggattttctgtcggcggcgatcgccggacttcggtcattgaacgccgatcggattcgccgttttcgtcggtttcgtcggagatgcctccggatcgccgatttacgcggtcgcgctcctgctacaaggcatctccgccgcatgaatgatacggcttaccgcgatcgtctgcgcggtgctttcttcggcgatgagtgcttcgcgcgttttttcggcttgcgctttcccgcggttgctgcggacagcgccccaagcaggaccgcgccgaagtgaaacgcggcagatacggcggctgaggtctcgcttccgccgtcgatgagaagagaaacggcgaaaacaagcacggacagtcccgccgccgatatcgcgccgggaagcattccgcctccggtgaattttgcggcggcgataccggataccgccgcggcaagcgcgaacgcggcatatcccagatacacggtaagctttgacggatcgggagacgaatatgccgccagcgcgaggatcggcatgagcacagccgccgcgccgatcccgacggcagtccccttcaaaagtgcgagcgcaagtctcgatgcgtccgagccttcgttttttgcattattcataaaaaacctccgcagataatgtttgtacattatactgcggaggtttcgtttttatgagcgtgtccgttcagtcctgcgcgtcctcggcttttacgtcaaccgtgcggactgcggagcggagaatgcggatcttggtcttttcctttgtggtctcaagaacgagagtctcttccttgatcgaaacgatctttccgattatcccgccgatggttgtgatttcgtcgccgatcgagagggagtttctcatttcgttctgcgccttgtcctgcttcttctgaggacggtaaaggaagaaatagaatattgcgaccatcgcaacaagcattacaatcgttccgatgccctgcacgggatttaccgaagcgccttctccttcaagaagtgaaatataattcataaagccagaaacctttctttatttattccgtaaaaatattatatactatagctccgcgcttttcaatagcgttgtaaaaatgtttacaaacaatttgacccgacaggctatttcgacgttttcagatacgcgggcagaaactcgtcgggaataacgtcggtgatatattttttcagcgtatcgagagtaaagcttccgtagagctgcgcgccgtgcaccgagcagagcgcctgcgtgtaatcctccatgagatatacctcaacgccgcttctcacgggaagatcctgcgaatcgtgaacggtctcgtccgcgacgtaatgcgtcaccgtggggttggaaacgatgtttgtcaaatatgcaggcatattctcttctttcacaatgtcaaaggtcacgatgttgccgaccatgttcacggctttgagctgcgtcgaaatgaagtttccgagagagtaaatgacgagcgttttctttccgctctcccccgtcacccaatcaatcggctggacggtgtgcgaatgatgccctatgacggcatccgcgccgcaatccgcgataagctttgcaagccgcttctgctcggcgttcggcgcctgagtattctcatcgccccaatgcatcgaaacgaatacaagatccgcttccccgcgtgcgcgcgctattctctcccgtatcacgctgtcgtctatgagcggaacgacacacgtgcttgccgaattgaccctgtagccgttcgttccgtaggtgaatgaaagcattgcgatctttacgccgtccttttcgtaaaagcggagcttttcgtaatcggcatcgttttcgtatccgccgatctggagcacgtccttcgtcttccaatattcgatcgttttgcggtatccttcggtgagattctccatatcgagcatatggttgttcgctatgttcacgatatcgaatcccattgaaacgagcgcgtcccccgcctccggaggagaattgaagttcgggtatcccgacgccttgagtcccgtgatcggagcctcctgattcacgaacgcgatatccgccgtgccgacgagagcctccacattcgcggtgtacatcgaatcaaaataataattccctgtgtagcctcccgcggatgccatcgaagacgcttttgcggcagcctcggtgtagatcgattcgtggattatgttatcccccgcgcaggcaaaggaaaggcgaaccgttttgtccttcgggttctcctctcctccgtcggtgtccgccgacgtgaccttgctgccggctccgccggacggcgatgtctgcgtaatgtcggcacctgtatccgagcgtctgagtccgcaagaggaaaggcacatgcacgcaagcaaaatcgatacaaatttaatcctgttcaagctttatcccctccctgagtgatttcttttccgctccggaaagcttatacgccttgagcttctgctcacggaagtgtatcacaagctcgctttccggaacatccgatccgtccgaggacatgcagagcagtatgtccgaatcctcggttatgttgatgccttcgaacaccatcctgcggtatccgtacatcaggctgtgttcgtcctcggagaaaacgcagtcccatgtttcgccggtcgcgtaatttctgaggaagaaatgaggaagcttttcgagaccgagacggtcgagagtgctgtcgtttacccttgccgtcacctgcacctcgccgtactcgggaatgtagataaacgaaaaagccgaataatatccgtccgcgccgtcttccttccccgatatggtatcgtctatcctgtttgtcatgaaagcgtcctcgccgagcttttcatatgcgttcatcgcattttccgtaggcgttatttcatcaagaacgtattccgcgtttgcgattattatgcgaaaaataaaagcacctatcacggcgaaaacgagaaccgtcagcaccgcctttattattttaccgaaaagtttcatatatatccgtgcctttcttcgccgtgcggcgaatatcctgcgaaaggagtataacataaaatcacgcctcaatcaacaccttatcggtaaatttttgcgtctgtattgacatttacccggagataatatataatgtagaaactcaggatacgctgccgcgccgcatttttctccgcaaaatgacggcgcatgatcggcgccgctcccgaaaggaggcattcacatgaagcttgatattacggagatcatgaaccgaaggaaagaccggctcgatttcagctttgacttcaaattcccggattcccccgacggcgccctccttcccgccggagtaacacttgccggaccggctcaaatcgactgccgcgtaacggacgtaaacggatttatcaaagcggatttcacggtacacgctccgctgaggtgcgtatgcgtgagatgccttgaggaattcgaatacccgctcgatttttcatttgagagattcgcggagctcgacggaagcgacgatctcgactgcgatgccgacgaggttctcacggtaaaggacagcgcactctttcccgacgcggatatcgccgaggagatatcgctcgaagctccgttccgtccgctttgctcggaggactgccccggactctgcccgaaatgcggaaagaagctgcgcgacggtccgtgctcgtgcgcagcggacgaggttttcgaggatccgagaatggatgcactcaggcgtctgcgcgattccatggaggatgattgaccgttttttcgctccgaaagcggagaaataaaaaatattgagaagaaaattgaaaaaagacttgatttgatagaaaatatgttgtataataaatcgaatgtgtgattttatcgtatgattttgatatacgaaaaaccaaaggaggtatattggaatggcagtaccgaagaaaaagacttccaaagcccgtcgtgataaaagacgttccaacgtgtggaagcttaccgctcctacgatggtaagatgctctcattgcggtgagttcaatctcagccaccgtgtatgcggcaattgcggatattacaacggtaaggaaatcataaaaaaagaagaagcttaagtgaaaagaccgcaagttgtttgcggtctttggctttaatacggtcctttgccgtattcgccggaaagcaggtgatcccgtggaatatacgccgaagagcgacgggcggactgccgattatttgataatcggttttttcgccgttgcggtatgtgcatttgccgtatcgtcgtccggtatcccgttccgcggacttgtgcagatcgcggggctcgtttccctgaccgtctgtctttatcttgcgataagataccgctttacggcattcaggtacgtcgtcgccgacgacggcggtgaagaggtattcgaggtatacaggacgcagggcaggcgcagcatcgccgaatgcagaatgtcgctttcgtatctcaggcttgcagcgttctattcctcgaaccgtgaactgaaaaaggctctgcgcggctgcacgttctaccgctatacggtgtccgtcgccccgaaaagagtgtgcctcgccgtatttgacagcggcacggacaagcccgtcggcatcgttttcgagccgaacgatgctttcttcgattttctctgcgcgcgacttcccgaacgaacggtatcgggagaagattatatctgataagattttttgtttctaaggagtttttgacaaatgaagtggacttcgctgaatgacctgagggagatgtatctctcgtttttcgaatccaaaggacacctgcgtttgggcagcttttctctcgttcccgaaaacgacaaatcgctgcttctcataaatgccggaatggcccctctgaaaaagttcttcaccggtgaggaagagccgccgagacaccgtgtgacgacctgtcaaaagtgcgtccgcactctcgatatcgacaacgtcggaaagaccgcgcgccacggcacatatttcgagatgctcggcaacttctctttcggagattatttcaagaaggaagcgctcacctgggcgtgggaattcataacgaaggttctcgaaatgcccgaggaccgtctttgggcgaccatatacaccgacgacgacgaggcgtattcgatatggacgaaggatatcggaatgcccgcaaaccgcatcgtccgtctcggaaaagccgataacttctgggagcacggctcaggtccctgcggcccctgctccgagatatactttgaccgcggagaggaattcggatgccattctccggactgcaagccgggatgcgactgcgaccgctacatggaattctggaacaacgtattcacgcagttcaacaacgacggcgccggaaactacaccgagctttcgcagaagaatatcgacaccggaatggggcttgagcgcctcgcctgcatcatgcagggcgttgacaacctctttgaggtagatacggtgcgccgtatccttgacaatgtttgctcgatcgcaggcataaagtacggcgacgacgcaaaggcagacgtgtccgtgcgtgttatcacggatcacatccgttcctcgacctttctcatctccgacggcgttctcccctcaaacgaaggacgcggatatatactccgccgtctgctccgccgcgcggcgcgtcacggcaagctgctcggaataaaggattcgttcctttcctccctctgcgaaacggtcatcgccgaaaacgtttccgcttatcccgaacttgagaagaagcgcgacttcataaagaaggtcatctccatcgaggaggagcgtttcgaccaaacgatcgattccggactttccatcctttcgcagcgaatctccgccgtgaagtccgaaggcggcagcacgctttccggagaggatgcgttcaagctgtatgacaccttcggattcccgcttgatatcacgaaggatgtggctgccgaggcaggtctcggcgtagacgaagatggcttcgactctctcatgaaatcccagaaggagagagcgcgcgccgcaagaaacggggcgggcggttgggacaatgccacgggcagtgttctttccgggatggcaaagacttcgtttgtcggatacgattctctcaccgctgatacgaaggtcaaagcgctgatctgcgacggcgagcttgcggatgccgtaagcgagggcgaattcggcataatacttgagccctccccgttctatgcggaatcgggcggtcaggtcggagacaccggaattgtctccggggacggcttcacccttgagatcaccgatacgaaaaaatcggacgaggtattcgtgtccacggcaaagatcgtatccggaatggtcaaggtcggagacagcgcaaaagcctctgtagacgccgcacggcgcgccgatatcaagcgcaaccacaccggcgcacacctccttcagtcagcgctccgccggattctcggagaccacgtcgagcaggcaggctcatacgttgacgcgcatcggctccgtttcgatttctcacacttccaggctctcaccgctgaagagatcgcgcagatcgaaaagctcgtgaacgagcacatcctactcgccgaggaggtgacctcggtcgaaaccgacatcgaatccgcaaaggcagcgggcgcaatggcgctgttcggcgaaaaatacggaaagaccgtccgcatggtccgtgccggagatttctcgcttgagctttgcggcggtacgcactgctcgaacaccggtgagatcggacttatgaagatcatctccgaatcgtccgtcgcggcgggtgtccgccgtatagaggcagtcaccggatacggcgttctcggctgcatcgccgagcgtgacgctctcatttcggactgcgcatcggcgctcaaagcgcagaacgcatccgtgctcgtcgcccgcgctcacgcggtaacggcggagctttccgcggcgaaaaaggagatcgacgctttgaacgcaaagctcgccggaggcaagctcgatgagatcatcggcagcgccgaaaatctcggaggcgtgcgttttgcgtgcgccgacctcggcgagacctcgatcgattccgtccgttctctcggagacaagatcaaggagcagtaccccgacacggcggcgatatttgccgtccggttcggcggaaagctcaatcttctggcgttctgcggcaaagccgcggtgtcctcgggcgctcacgccggaaatatcgtaaaagccgcagcggcagtctgcggaggacgcggaggcggacgtcccgacagcgctcaggcaggcgcatcggacagctcgaagctcaccgaagcatttgaagaggctaaaaacattctcaccgaagccgttaaataaataaaagctattgacaaatcgtgcgctttcggatataatattaaggcaagcggatacgagaaggccccgcttgctacggagaagtactcaagaggccgaagaggcgcccctgctaagggtgtaggtcgggtaaccggcgcgagagttcaaatctctccttctccgccatataaagacaccattgaaatctgaacccttaagttcggagtcaatggtgtttttat

SEQ ID NO: 254 - DNA, 7069 bp, Unknown
  16S sequences of unknown bacteria
ttgtgcagttccatcagcttctgcttcaactcgccctcgatgcggcccagttcggcttcggcggctttgcgcttcgctgcaccttcgcgctggatattgagtacctcatccagtgtggagatcagctgttcgttggtgtgctgcagcgtttcaatatccaccacgctgcgctcggcctccttggctgtggcgatggtacccattttcagcatatcggcgttctttttcagcagttcattggtggtttctgtcacggcagcctgggcggctgtggcctggcggctgtgctccaggcccagggccagcaccatctggcttttccacagagggatggtgttgacaagggaggactgaatcttttccaccatcagtgtgtcgttattctgcagcaaacggatctggggacccatctgcacggagattacgcgggtcagttccagatcgtgcagctttttttcaaagcgctcgcacatttgcaccatatcgttgtaggcctgggcgtcctcagctttaccgcttttctccgccttttggcgcagcgcttccaaatccgtggcgcgcacttcagccagacgctttttgccggcgatgatatacatggtcagctctttataatatttgagattcagttcatacatctggtcaaacattgccacatccttcatcagggtgatctgatgattttccagattttgcgcgatcttctccacgttggtttctgctttggcatactgggccttcatcacttccagtttgctgcgggactttttgaagaagccaaacccttttttctcttcggtgccgaagcccttgagttccaccaccagctcggtcaagtcctggcccactgcgcccagatctttggtgcgcactttgctcagggcgttttccgagaatgaagaaacgcttttctgggcagcggaaccatattgcaggacaatattggagtcggtgatgtcaattttttgggaaaagtcattcacctgctttttctcatcctctgtgagcatgctgtcatccactactacaggttcggcagcgcttttttccggttccgctgcaggagcatcggtgccgtccagtgtcagtgtcggtgcttcctgcacggctgcggcagtttccggttcgctgtccaaagtcagtctgggggtcgtattgtcggccataatcgttatcctcctgttttttgtcgttttgcatctgcgttgcgttacagtttcaaagtgatattgcgctcgtcccggctgtttgcatctgcactcatctgcgccccggtcagaccttcgcgggccatcatggtttccagaacgctgatgtcggtggaaatatccagtgcctcttcgccgaaaagagaatcaagctgcttgtcgaaagcggcggcgatggtatccatcatgctgcggatgcgggtgagggatgtgtcgatgttttcgccggacacaccctgggcactcatgcggtcgtatgcgttgagcagcttgagggtggtgggcagatagtaattcatgaatttccggatatcgcttagtttatccgggtgctcttttacgtaatcgaagattttttccgaggtttgctgcagacgcacaatatcagcgctgattttttcatcttcaatattgcggtccaggcgacgcatttcctcgagagctagggcaccgtctttgagtgtcttgtccaattccgcatttccggtggaggcaggtttggacgttgaggcctcctcagcggcctgggcggcgcggtctgcattcgcgccggcctgcttggctccgctgcggcacagtcccatggccaggataaaaacggcaatggaagcggctgccgcgcagatgaagtgcgctgggcggtacaacgggaaacacagtgcatacagaagccaaaccgccgccgcggcgtaatagggggcgacgatggggcgggaagagtttgtagacatagaattcgcctctgctttctgcggctcgatggccgctgattttattatacagtgcccggtaacagcggtcaagaaatatggatgttgacgccgtctacttccacgccgtcctccacacagatcaggagatagcgcttgccgtcgatgatacgggtttccaccaggtcgctgcgttcgccattgacatggacagtgacatccggcgttttcacttcgatctgtttcgtgttcacaatattgcgggggctgaggctgacgttttcaccgaattcttcgtcatagcgctggctgaaatcctccttgcgttcagcactgacgccgcaggaatccagaatacgttccacagcggatttggtcacggtcaacggttcggggattttgctctccttgtggaaggcgatcatttcgcacaggcgctcgcggacggtttgcactgtgtccaggctgcagtcttcgctgagcgtttcgcccagcagggattgaaatgtacttttctgctccgtcggcggcatcagaatctcctgttggaacagggcctgagccagctcgggatggttttcggatgcgtcgcgggtatagtaaagggcaccgtaaagattggtgcgccggtcgtcaaaggcggggaagaggaagccagcctctggggcgccgaccagccagttggcgctcaagttgcggaacacgctctctttcccgtcgaaggtcagagcatttttgcccagcttgactgggcaaatgctgcacaggatgtaggaatacacttcctcggaggagtcttccagcacggcgtcatccttagcgcggtaaggtacgtcgtagcggtcgctggcgaggaggattaggaaattcccttcgatgctcagtgcggcaatgatcgtttcaaacagggtctgagccgctgcgtcgtctttcagctcactctggcgcagcttcatcagaagcatgtgttcagggctgcccactacctgctgagtttcaaaaacgatgttggtcaaatttttgtcgacgccgccggaaagcgtttttcgcagcagagcaataatctgctcggtctccgtctgccccagcagagccatggactggtcgaactgggcgatgatctcttttttctcgttcacatagcagccgcggatgtgggcaatgttgtgcttgtccgcccggaagcggcggcgaatttctgagatttccttctcgttcatgggatactccttcttgcaagtggaattcctgcgcgcggcggccgggagggcagcgcgcggcaattttttctattatatcacaaattggggcaggagaaaagcggagaatgtgtcgaaatgccgaagcagcagcgctgcttcggcattttggagttgttatgtattactgcatttttccagcaatgcttcccatttctgatccacccactgctgggcggcatccagcatccattcattgccgcttttgaagcagtgggcaaaacgcccctgcagtttcatgtaatcagctacaggcagcttgcggcgcggctcataggtcaggcggtactgcccgtgatccacctcgaacatgggccacacgcagctgtccaccgcagctttgaccaccgaagcgatcatttcggcgggatagcgccagccccgggggcagggagagagtacgttcaaaaacgccgcgccgggggtgtagatggctttgcgggacttctcgtgcaggtcgcgcagattgccgataaatgtggtttgagccacataggggatgccgtgggctaccatgatctcggttaaatcttttttgttctgtcctttgccctgctgcatgctgcctacaggggtggtggtggagtcggcaaagcggggcgtagcagaggaacgctggataccggtgttcatataggcctcattgtcatagcatacatagaccatgtcatggcctcgctccatggcgccggacagggactgcaatccgatgtcgtaggtgccgccgtcgccgccgaaggtgatgaacttgtaggtgtcgtcgattttacccttgcgccgcagtacgcggtaagcggcttccacgccgccgcaggtagctgcggcattttcaaaggcggtgtggatgtagctgtcctgccaagcggtataaggatacatgaaagaagaaacctccagacatcctgtggcgttggcgatcacggctttgtcttcggggttcagggcgcggagcacggcgcgcacggtaatgccgcagccgcagccggcacacagacggtggccgggggcgaagcgctcaggcttactcagttcttgtttgagattatacgccatgaagatcgcctcctctctgtcccaaatggcgatagacgggctgggcgctgcccgttttccgggcttcgcgcagggcgtcgaacacgctttcgcagtcggtcacggcaaagtcgcggccgccaagcccataaacaaaattgatcagcagggggtgcagctgcgcgtcgtacagggcgctgcgcagctcagaacccaggggaccgccgtgcgtggaaaagctttcgcatttgtccatcacggctacggcctgcacatgggccagagcttcggccagttcttcggcggggaaggggcggtatacccgtaccttgatcatcccgacccggcgcccctgagcgcgcagtacgtccacgcacacccgggcggtgccggcggaagagccgatcaggacgatggcctcttccgcgtcctccatacggtagcgctccagtaaaccgtattgccggcccgtcagagcagcaaagcgtttccccacatcgagaatcacctgttttgcgttcaccatcgcctgtgcctgtgccattttggcctccatatagtaagcgcttacaccgtaagggccgacagccagagggttctcgtgcttcaaaaggtagtgctccggcgtatactcgccaacaaaaggcttgaccgcctcatcttccagaagttcgatgttttctacagaatgggaggtgatgaagccgtcctggcataccatgatgggcaatcgtacgtctggatgctccgcaatgggcatggcctggagatagttgtcgtaggcttcctggttgttttctgcatagatctggatccagccggcatcccgggcgttcatggcgtcggagtggtcattgttgatattgatagggccggtcagtgcgcggcagacacaggccagcgtgatgggcaggcgggaggaagaggccacatgcagcagctcccacatgaaggcgaggcccgctgaggaagtagccgttacggcccgcgctccggcggcctgggcgccgatgcaggtggacagggcgctgtgttcactctccacagctacaaattcggtatccacttcgccgttggcgatgtagcgggaatagatctgcggaatctcggtggagggggtgatgggaaaggcgcccagcacatcaggattgatctggcgcatggcgtaggccacagcctcgttgccggacaggcgttcacgaatcgacacggcgcatcagtcctccttccattcgatggcggaaaaggggcatacctgcgcgcagatgccgcagcccttacagtggtcatagtcaaagtctgtccgccggccgtcgcggacggggatggagctgtccgggcagaaaggggcgcacagcacgcactgcttgcacttgtcctgcagccacttgggagtgacgacgcgccattcgccggttttggtcagggcagaggtgccgccctcgtaaatttcgcagccgggcgtcaaatccggccagagaatggtttcatgaatatcctttgcgcatttcatcccacgcgcacctccttcatggattgtttcaggcattgcaggttcttgtcaattacctgcggcttggtggagaatttgtgacggtaggcaatttccatattggacataaagcgctccggctcgatcacaccggaaactttaaccgccgcggccagcatcggggtattggggaaataacttcccagcaccgcttcggaaatgcgccgggcgtcgatggtgcaaacccttccgctgtaacctcgcagctgggaccgcagtgcctggggggattggctggagttgataatgatggcgccgctctcgcgcagtcccgcggtgacatccacgctttccagaagggtttcatccactaccaccacaaaatcgggtgtgtagataaacgaatgtacgtcgcagcgcgtatcgctgatacggttataagccgtgatgggggcgcccatgcgttcggggccgtattccgggaagccctgcacatattttcctgaagtgaaagccgcgtcagccagcagcatgcaggccgttttggccccctggccgccccgtccgtgccagcggatctccacaatatttgccatactctaaaatcccctttttccatggtttctgaaaacacttcgcgaaaggtttgcctcataacggaaaaacaaaatgaagcaaggcggtttccgggacgaatgcaccgaaagaaaacgtcgctgtttccgctcaatgtgcgcgcggcaagtatacggagcgaacaacaaaaaggctgttgtccctgtaaagggacaacagcctgagaagcaattgttcaaccacccgttaccaacgtaccagcatacgcgtttccgataacggcggaaagccggcgcggtctactgcatggtgctttcggcgcgcaactcgggagtgattttcagacgcgctctactgccgccgggctttcactctccccggctcgctttggggttcaagactgcgcttactctctccgtcttcgtttttttcatgtttctcatagtgtagcgaattggtgggcgaatggcaatgtacaatttccacaaaaaacgtgctgttttttcaaaaagacctgtttgtctctcatacaaggacagtctgcgttaattgctttcgccagtggaaatcaggttgggacgcagccagtcggaactgggacggcacaggagccgtgcatcgagataagccatgggcagagtcaggatggtgtgacccaggtagttgccggattccgttttttccaccagcagggccacgtctgcgatgttgtcgctgttcaggcacaggggaatcatcaggctcagcagattgtaggcagggtagtagatgggaactgctgttttgtagtcc

SEQ ID NO: 255 - DNA, 1843 bp, Unknown
  16S sequences of unknown bacteria
cgctcatggcacggaccgcggagattttgaaggggcagggcaagacggtcggcctcatcacgaacgaccaggcgtccgacctcgtcgacacggcgattctctccgaccgaaaaaacgaggtcagggaggtttcggggagctgcttttgctgcaactatcctggctttgccgatgcggtcgacgatttgaccgagaaaacgcactgcgacatcaccctcgccgagccggttggcagctgcaccgacctctccgctaccatcatgcagcccacgaaggataaatacgcgcaggtcatcgacctcgcgccgctcaccgtcctcgcagatcccgagcgcctgcgggcaatcctcgacggcgtgtactcgacggcttcctacatcatcacaaagcagttcgacgaggcggacatcatcctcgtgaacaaggtcgacctgctcaacgacgatgaagcggccgagctccaggcacgtgcgcaggagcattggccgcatgcgcaggtgctcgtcgccagcgtcaaggagggtactggcatcgaggaatggcttgctgcggtgcagaccgcatcgcgggccggacagaatctcgccgtcgtcgattacgacgaatacgcggccggcgaggcggcgtacggatggctgaacctgacctatgccctgggtaaggctgaggcggggtatgccgaggcggcgcaatcgctgctcgacgcgcttgttgcgggcttccaggagaaaggcgtgggagtcggccatgtgaagttcctgctgcaaggtagcgcgcatgcgtgggtgggcaatttcaccgggggcgccgagccgtcgatgcttcgcgtcgaggagcaagaaagcgaggagtactccctcacggtaaacgcgcgtgcagagatgatgccgctttccctcgagaagctcgtggtgcgcgcggtcgatgcggcagtcgacgggttcgaggtcaccgatatccgggtgcgtgtgctgattcccggtcgtccgaacccgacctatcgctacgatgaggtcatctagacggggcttccctcgctccttgcgcgagatgcgtggcactgccacgttttacgcgcagaaaacgcgaggcgcgtggcactgccactgttcccgtgcaggatgcatgagatgcgtggcactgccacggttcccgtgctcggcgcggggcgtgcccctacttggattcccagagcttgatcgacaactcgagaaacaggcggttgtcggcgctgtcgaggctcgtcttcatgatggagttgatcttatcgatgcggtagatgacgctgttgcggtgcaggaaaagcgccttggccgtctgcgacacgttgcgctcgttggccaggtaggtcttgagcgtctggaacagctcggagccgttctctcggtcgtggtcgatgagccgctcgatgtcggggtgaatgagcaggtgcttgtcgatgcccgcgtcgagcctttggcagatgtagtccatcgtgtagtcctggaacaggtacacgcgcgattcggggtcgtggctcgagcccttctggagcgcgatctgcgcctgtccgtactgcgtgtcgatgccgaggaagttgccgaactcgttgctgacgcctgccttccacccgagctcgtcgcatgcgtttgccacgtgctcgagaaactcttcgaacccacgcgtcgtcgtctcggtgacgagcacgatgtagacgtcgtaggaaaagacgctcgcgccggggaacaagtgcacgagctggtcgacttggacctgcggcgcctcctgccttccgttggatgcctcgcagcggtcgaacaccgccactgacctgtgtcaagatttcggacacggaagctcgagg

SEQ ID NO: 256 - DNA, 6046 bp, Unknown
  16S sequences of unknown bacteria
tcccggatcgcagattcctggagcctgccattcagaaggcgcccctcccggatcactgccgaggaagccacactgcgcttcagatcctgtgctgtattgccgaatccgctgccgcccgaagtggcaaacaggatgatggtctttcctgcgaaatcgtggctttccaggaatgtgttgataatcgtgggcgctgtataccaccagatcgggaagcccagcagcacggtgtcatactcctggagattcaccggatgatctgccagagcgggacgggagttcttatcccgcatttcccgggaactgcgggagtttttatcccgccagttgagatccgccgcagtatagggctctgccgggcagatctcatagaggtctgctcctgcggttctggctatcagttcagctgcgttccgggtcacgccgctggcactgaaatatgcaaccaatgtctttgccatggttcatcattctcctttcactcacgcaaaaccctgagccttttagagctcattttctcttcaatcaacagtatatcgcagtcaaaattatatgtcgaatacctattcttcattataaatcatgccttttgagcatgataaaaggtgctgtaccaaaaggctggcatcttaaacctcctccccgctatggggcagaaccattatctttaatgcctcacacgcagaatcggctaatacaagttatttacctgtgctcactgcaaaaaccaccctcccagatgcttttgggacagcaacctacgcaaagaaaaagagcctggaacgcgacatgcgtccagactcagtctggtgggaagggtggtcagtttagattggcatttgcatcgtcccgccaaaagggagggggcgtttgtgtgggaaccgcccctgcggggagcagttctctggcgtttcccgtaagcagaacgaaatactaaagtgtaatctgctgcctagtgaggagtgtcaggttgtaggcggtcagcttccaccaaaagaaaaagcacccttccgggtgctctttcttttggctaacctggtcagtttagattggatgggacgcgagctacttatttagataaaaagaaagagcctggaacgcgaattgcgtccagactcagtctggtggctatgacggtcactttagatcggcaagtgtagcctttccgcaaaaaggaagggggcgtgtgtgtggggaaccgtaggttccctaccgcacgtcgagcgaagcgccagcgagcggattaccccgccgcagcggacggcttccaaaggaagccggtctccgctccaggtcacaggagtgccgcctgagaagccggccccccctttgccgatgcaggttttcgggctgaaaagggtgtcggaacagggctttccggtccatgtgcggccttacctccgcaccgcaggcagatcagcattcgatgttgccggtcatctcccgtttgaacgcacttgtttggttcgtggacctcgttaacttccgccgagcaataaaggctcctgtactcgctgcagatcaaccgctccgagaaggtgtgcttgctggtgtaggaggaaagaccggtgggggtcatcttggtggaactttttgccgctttgcgcctcgccggttccgcctgggcagcatcgaaggttttgcggcccacggtgccggaatgatagttctcaagcgactcatgagcaactgctcagtgttcttgacggactttcggctgatgtggtcgctgataaatgccttttgcggaactgcatccacgacttacacaggcatatcgctgttgtaattatctcttcctatttcccttgttccttccgatacagcaataccccgccgccaatccccacggcgaaacagaacagaatgagcgcaagatatcgaaggatcggccctgggtccccggcaagcaagctgaccataccttggtaggcagcgtccccgccgccatatagaagcagaaacatccccgattgcccaaagcctgtaaaaacattcatccagcccagggcagtcataacaacccccaggcaaaaggcaacagtgaggatcaccgggatcgaccactttgtcaaacggaataacagctgggtcagcaagcagaacaggccgcccagtaaaaaggcgttcagatatgtcatagtggtatcctcctattggaagaaagacatgagcaaagcagccccgaatgccgccggaagtcccacgccgaaaatcaggaaagcagccgacagaccctttcgggatgcccggggaagggtatccccttctttcagtgcggcagcggtaaactcaatgatagcggcggaaaagccggtaaaaggcagcattgccccaaagccgccgaggccttccagcttttgatactgccccagaatggtggccgccccgctgagtgcagccataatcgccagcatcagggtgatagacagcccgaattccacccctgcagataacagaagttcaaaaaccagctgtgccgccacacacaacgctccgccaatcagaaaagaccaaagatagtccaccggttttcctcgcataaatgacactccttctgaaaagggcagggaggaggggttctccaacccctcctccctgccgcagcaattgttgcgttaaggctcagacccgcaggcccgctttgtagccgctatggatagcatcgtagatcttgcccaccttggagcagtcaccaacgacggtcacctgttttcccatggccttcagctcttctgccaggctgcggcagggggcaagaccgatggccaccagcacatgatctgccgggattgtcttgcgtccatggccttccactacaacgccttggtcgttgatctccaccacgcgggaggaggtcatgacctggacgccgttctctttcagcatctcgggatagaccatctgatcggaggcgctgcaatccttcatgatctgcggcagcatctccaccatggtaacatggttttccttggagaagctcagctggaccgcagtctcggtaccgataaggccgccgcccactaccacgatgttgccagagataccggcacagtcctttgccagggcttccaccgccagctggacattagcccggtcagcgccaggaaccggcagacggacaccagtggcaccggtggcgatgatgatggcatcaaagccctccagatcagcggcagtcgcctctttttccacaaccttgatgtcccgtttttccacctggacggtgagatacttcagggcgttgcggatgtctgccttaaactccggagcggacgcttcgtgaaggaacccgcccagcttccgcttttcaaacagggtgacctgatgtccccggtcaaaggccacggcagcagccttcattccggcagggccgccgcctactactgccacttttttgggggtagcggtgggacgaatggccaaggcgtcctcgaatcccagagtggggttcatggtgcagttgatggatttacccagatggttgccccggtccaaacagccctcgttgcagcggatgcacggggagatgtcctccgggtggccctccaaggccttttttgcccaataggggtcggccagcagggggcgtcccatgctgataaagtcccctttcccttctgccaggatctcctcggcgtactccggcagagtaatagaaccggtggcgaaaaccgggatggagacctcttttttgatggcctctgcagcccagacattgtggcccttggaaagctgcatgggggtcacctggtggatcatctggtgatggtcgccgccgctgacatcaatggcggcgcagcccagctcctccagtcgcttggcgtaatagatggtgtcctcaatcgtcatgccgcccggctcatagtcggtgccgctgagacggacgatcagggggaagtcctcccccacatactccttgcagcgggtaaagatctgctccagaaaacggaaacggttttcccggctgccaccgtaccaatcggtgcgctggttggtaaagggggaaaggaagttggtgatgaggtagccgtgggcgccatggatctccactacctcaaatccggcgtccttggcccgttttgcggcctttccgaacgcctcgacaatgtcatggatctcggcgatggtcagctcttccgggatggcggcctgaccgtagcgctggtacatcagcggccagggattgggggaggcggacttcatgggagggccgaggaaccgctggcgtccgcagtgctcgatctggatgcaggggaccgacccggcattcttgatgctgtcggccagccatcccaggccaacgatgtattcatcgtcacagatgcccagctggttggaggcggacttgctgtacagcctgtccacataggcgtattccacgatgatcatgcctacctcgcccttggccaggtcctcatagtagcggaccagacgttccgaaaccgagccatccatgtggctcagaccagaggtttgcggggccttgcagatgcggtttttgatctctacattgccgatcttgccgggggtgaaaagatgggggaattgattgctcatgccggtcactctcctttactgttttgggggaaatagtttccttttttgataggataccagaaagagagaaaaagggcgatattacttgatatatttttgacaattattttggtgtcatataatatcgtttttgcttggaaaatggtattgtatgatactatttttatcaggccaaaccggcagctgtttcttgctcttccattggctatcaggtataattaaaaaagagtaaaaacccgaaaccaaaggagtattgccatgattctgcgtcaagaacccccggcatccgccagctatctgttcaatgccgatatggccccttaccgtgaactgtttctccgccgctgtcctccgccaatgctgatgcctcggggaaatcaggtatgcaaaaagggcgtgacaaaggggtggatgtattacctgtcccaggggcttttgaaggtctactccagcaattcctatgggtatgaccgggtcatcgcctttttgaaggatgacaacatcttcggactggactgtttggaccccgaccagccctccgtcgtcaccatcgaatgtgtgaccgatagctgggtgatgcccctgcaaagcgagatgctcaccgacatcatgcgggaaagccccgactttgcctgtgatttggtggcctattacgccaaggtgatgcgccagctttgtttcgataccgagaaccagagcatcaacgatgccaaggtgcggcttgtaaatttcctatacctgtatgcggagtccagcggcgacgaccgcattgccatgagccagcaggatctggcggcagcggcgaattgctcccgctccagcatcgcccgcatctgcacccaactgaaggaggcaggactcatccgggtccatggccgggggttgacggttttagacagggaacgactaaaggcgttttgccgattatagtccctattgcgtcctatcgttattacaaaaagcgggaggttattatagaaaaccgtttctttctgcaatacatcttgccacatagtattgtgttgttaaaaagtttagaggttctgcgcaccggggacgtccaggagattctgggagtcgggcgcaaggaggtctaccgactgattgctgacggagcgcttccggctgtccgggcgggccggggctaccggattctcaaagccgctttggtggaatggctcggcgcggaagaaacgtgcggataagaaaaatcccggatgcgactgcatccgggattttctgggaagggcggtcagtttagatcggcaattgtagcgtttccgcaaaaaagggaggggggcgtgtgtggggggaaccgtaggttccctaccgcacgtcgagcgaagcgccagcgagcggatcaccccgccgcagcggacggcttccaaaggaagcctctctccgccaaaagaaaaagcacccttccgggtgccttttcttttggctaacctggtcagtttagattggatgggacgcgagctacttattt

SEQ ID NO: 257 - DNA, 32759 bp, Unknown
  16S sequences of unknown bacteria
cacaccgacgaaatgcgtagcattttggaggttggctctgaacagttacgatatttttttacgccatcagatacttctgcgccgcaatcgccgcgttcgctccatccgccgcagccgtaatgatctgccgcaatgccttggtccggatatcgcctgcggcaaaaatgccaggctgacttgtagcggtatcttcccctgccacaatatatcccgtctcatctgtctgtaacagttttgaaacaatttccgtctccggagtcattccgactgcgatgaacacgccgtccagatccagcatccgctcttccccggtttttacatgcttcatccacagcccctcgacatgttcctccccgacgatccgtgtgatttccgtatcccacaaaaatgtgacattttcgcagcctttcagctgatcctgcaaaatcgctgctgcccgcattgtattccgcctgtggatcacatagacatgttcacacccttttgccagataaatcgcatcctctgccgcagcatcaccgcctccgataaccgccaccgttcttcccttaaaaaatgccccgtcgcaggtcgcgcagtaggaaacgcccataccggtcagttccttttcccccggaataccaagcagacgatgctttgcacccattgcaaaaattacgcttctggcacgatatacctcgccatctgtgtaaatcgctttgatccggccttcctcctcaatatcaagatgtcttacttctatattaataaaggaaacgccaagtctgtctgcatgttcccgcatcttcatcccaagttcaaaaccaccgatcccgggaagccccggataattatccacctcatatgtgttcaacacctgaccgccgctcatgctctccttttccagaacaacaaacgacagccctgcacgttttgcataaatagctgccgtcagaccggccggtccggatcccgcgataatcaaatcataaaccatgcttttctgcctcccattttctcccgaattgattctgaagatctgctttgatggctgccatcgtccatctgtctctctacagctttcggacttactgtttcattgtgttgctgtcccacacagcagatacccgctttcatccccctgctcttacagtttctctgttctgcagcatttttatccatacggctttcatttttccggctcttttgacccggagcgtgtttgaaaaatcattctggcaatcgatacgccgcccgtctttttctcttcatctctgtatttttagaataccattttctgccatgaatggcaaccagaacaccgtttactctccgtttattttctgatcagcctgggtgcggatccgcttccaaaattcgtttatttttttgcacttttcacttgacatgtgatacttcttctgttatattgattacagtaacaattattattatcaaggagatgcagtgtatgcagagaaaatatagcagacagcgagaggcaatcaaggagtttctggccggtcgtaccgatcatcccactgccgacacggtctatacctgcctccgtgagcagtatccgaatatcagtctcggcacagtctaccggaatcttactctcctcactgaaatgggtgagatcatgaagatcaccacgggcgaaggagccgaccggtttgatgcaaatgtacagcggcatcatcacttcatctgcaccagctgtcagagcgtttacgatcttccaggcatgggaaatatcgattccgtgatggataccgcagctgccagctgcaaaggaacgatcgacacataccggatcaatttttacggaacctgcgaacattgtctgaaaacaaaaaatccctcttgaaaatatgataactatttctcaataagggcttgacaatcagacagcaacgtgttatattaaaacagtaatagttactgatatcaattaaaaattatttcagtacttttactacaccgtttcagaacgaatagctgtttttcagcttatcagaagaagaggattcttctgatacaggcagatccattcactcacctgtaaaataattactgcctgattcggttaaaataacaacaacatgacatcaaaaagaaaaggagatcattactatgaagaaatttgtatgcagcgtatgtggatatgtttatgaaggagaagcagcaccggaagtatgtccgatctgtaaagcaccggcttccaaatttgttgagcagtctgatgagaagacctgggcagctgagcatgtagttggcgtagcagctgacgttccggaagatatcaaagctgatcttcgtgcaaactttgagggcgagtgctctgaggtaggtatgtatcttgcaatggcaagagttgctcacagagaaggatatccggaaatcggcctctactgggagaaagcagcttacgaagaggctgagcatgcagcaaaattcgctgaacttctcggcgaagtcgttacttccagcaccaagaagaaccttgagcttcgtgtagaggcagagaacggcgctaccgcaggcaagaccgatcttgcaaagcgtgcaaaagcagcaaaccttgacgcgatccatgacaccgttcacgagatggcaagagacgaggctagacacggcaaagcattcgagggtctgctgaagagatactttggctaagctacgagccatgcaaaatagtaaaaataacgccctgcaagtttacttgcaagggcgtttatttttgctattttatacggcgacagccgtccatgaggaagtagccgcaggcggattccgaatggagcatggctcgttttgccaggctttcttgttttttagatgtatctggcgacagccattcttcccctcttctccactttaccaccgatagttaaacacgtagtcataatcaaatgtacacggattctttacaaaatcataatcctttctgactctgtttgccggaatcgttacagtcagtttatttacgctgtaactgctcgcccggaatccaaatttcggcatcttatagtctccgatcagattatcattactgtctctgacagcaagatacatatagtcaaagctggtaatattgtatttgtgggtatttacaaaatagccttctaccgtgatacttccatttgcattccgtcttacttttgaaatgaaataatcatccatggcattttggtaagctcccggtctcgttactactttccagttcttttcgtttgagcgaacctgaacggtaaaggttaatttcacaccatttgccgttgcaaaaatcttacagctgccaagtcctaccgccgtaacctttccattcgttacagtagctacttttttattgcttgtttcccattttacagactgcgacgcgcctgttacctttaaggtcagggaagtgcggagtgacatcgttgccttctcctgagacagcttcggcttatttactgtgacaacacagctggtctgtctggtctttccctccagtttgtaggtggctgtgatcgttgcttttccaggcgcttttgcctttaccttaccatttgcaaccgtcgcaatcttcgtgttggaactcttccatgtaacagccgttcttttcggcagatttttcagggtcagctttatgcttgcgccaatgttcagggatgcggccgctttactcatcgccggaagtgatctgacggtaagctccagctctgcccttccgccctcgttccataccatcaggaatgtttttcctgcctttttggcagttaccattccggtctgagaaatcgatgcaacagacgccttgtccgaagcaaactgtgtttttaccccgctctttccgtccgtgatcgttttataaggaagcttaaatgtagttcctgcgtatactgcctttttcttcggcacacaagaaaccgcatatctgtgtacattcagggttgccacttttttattgcctgcagcatctgtttttgttgctgtcacagtaatcggcttatacgtgttatacggcacatcgtagtttgcgcagagataaaagccattcggctcgcttttctcgtactcaagataggcaacactttcattgctcacctttattgtcacatctttatccgtatacttccagttctccggaaggttgatccggtaccagttgaccattccattgatcatctgatccgtcgttggtctgttgttgtagccgtcaataaattttacctgccgtgtcgccgcctgtgcactttccggtacgatcatcatcattccgatcagaagcactgccatcattaaaaagtgcgatgctacgttgaaacatctttttttcatctcttcttctcctttccgccctgcattgccagaggtgccacaagtatatggcaaaagcttccttgaaaacaattacctgacagcatagtaaacagtaataaggaacttttttagtcgaacgaggcattcgccgtattcaccggatgctccgctttattcacaatatctgcctcatttccagagaatacgcttcccgaaaaatcgaggacttcattgcccggcaggctgtcaatgcagaccgctgtgccattgccggtaaaggtatcattctgataagtcggacaggtaccgtaagccatgcttgtattaaatttcagcgctgtccgattattcgtaaaagtgctgtctgccgcacagacccatcctccgttccgcgcaatcgccgccgtgtcaaatccgtcaaaactgcaccctgaaatgtacacaaaacagtatgcatccactccgattccggaatctcccgcaaaacgcagcccaaacagatccgcagaatttccgttcttcccctgcaggcggaccgtcccggtaaaggcagtcatctcatcaccctctgtactgccataaataccaaaggtatggtcaccgaacataatatcgccctcataggtaacagccgggagatacagataaaccggtatatccgaagaatattcctcatcgatcgacgccagcagtgcatttaattcttccgcggtctccatcggtgcatcctccggatggtaagtgaccgcctcctgcttttcaacagtaagcctcgttccaagtgaaatcgtatctccgtttttcatcgtcagattccagacgatatcattcactccgctgtcggacagatagtggatattcgaaacgtacgccgcatttggaaaactttcttgatgaaccggttctgaataatccatctgctttgaatcttctcccggtttcgtctcaacctcgcaggactctacctcgctgacaaactcctcccatgcaagcgctccgctttcctcatccagcacgtacagctggcatggaagcgcactgtccattccttccgcgatccggtccgtccgttccttttccgcctgtccggccacgccatctccttccgaaaatgtcagcagcactttgtaagacttctcttcattcggataaatgatctgtgcaccgccttcataactgcgtggtctgtgatattgggaaaacgccatcccgacggctgccgcaagaaccgccaaaactgcgcctgtcactaccttctttttccagcgtcccggcgcttttacctcttgtttttcggtctgaaccgccgtacaatgaggacagaaagacgccttctccggaagcagctgcccgcatttcacacattttttgctcatatttttctcctttatagaacctccatcagatgaaggatatttctgtatcttttttccggatttaccatcgtacagcgctggacaatccgccccatcctcccctttgcaagctttctcgaagggtgctctcccgtcagcatgatattgagcagcaccccgaccgcataaatatcggcacgcccatccgactgggacagtccgtactgctccggtgcggcaaatccggtcgttccaagaatctgcgtatctccctgccctgtacttttgtagactctggccgcatcaaaatcgatcagtaccgcctcgtctccccgcaggatcacgttgtccggcttgacatcccggtgcaccattccacgcgaatggagtacccacaatgcgccacacagctgccttgtgacctgctttgcctgcgccgcactcaacagccctccctccaggatctctccaagcgtatcacccggtatgtattcttcaagcgcaactgtctgtccgtttttttctccgacttccatgatctgcggcagattccggcacgatacgccaagcagtttctgatacacctcaccgctcccggaaaaatgccgaaaaatataacgagtgccgcttcctctgtgacgcacaagagaaacccggccccgttcgctttccttcagaagcgcgatcgtatcgtactccctgctgaccgcttccaaaagactttcgtaaatctccatattttctacctttatccgcacagcacgtttgaacgccgccgcgaagcagattgcaaatatacgctttcctgctttgcgcacgattttttcacacgcgctatgccccgtgcatattgttttttggaattttttatagtttaatagaaataatgtggatttttctatccactttgacaagattgtaacataccaattgtaaataatcaaatttgaacatagtcgcaaagcggattgcgaatgtctgcttcaatgataccaatataccaaaactctgtcaggacgtaatatatggataagaaaaatacagacggcttacggcaggaacttatggactcaacagatctgtcgcagtttttgtccagaaatcaggaacagttcgtagataaaagcgtcgccgaattattaaatcacttatttgaaaagaaaaacatctcaaaagctgtgcttgccaagcaggccggtatgagcgagatctatcttcatcagatttttgccgggaggcggacaccttccagaaatcgtctcctctgcctgtgctacggactggaagccagcattgaagagacccaggagcttttgagactgtgcggcatggccgaactttacccgaagctgaaacgcgacgcgatcatctactacggactgctccacaaacttgatctgtttgtgatcaatgacaagctgtttgatgaaaatgaggatacgctgttttgaaatgaattcacattctttatgtaaagcgtcagctttctgtttttcacagaaaactggcgcctttatttataggaagcagccgataaaacagtaattcagtcaggttctgttcactgccctctggaaatgcatccggctgcatattcttttgtgatacgagtttttggggacgatttcgatacttatgctttattgtatccgattttttacctgccgtgcatgtctttttcattctttctttttatcaaaacaatcctatctggctgtggtgggttccccgcttcacgcagtctgcctccgcatcccgtcattcagtcaaagcggatattccagatccgcttcactgattgctcataaccgaatacagcgccatcgcatttccgggttctcactccagatacagcaccggatccaccggttctccatccttcgtcattgcaaagtacacattgctgccctctgtactgtaatatttcgtcggttcgctgacatatccaatcactgcgccggactccagcacatctccttcctttgcctgaagctctttcagaccaccgtacgtcagcttatagccgtttccaatgttcagcacaagcgttgtccccgtttcctcatcgacatacgtcgattccacgattcccttcgctgccgcaagtacctggttgccggtatcactgccgatcacaagggccggattgtatttgtactgattcagcgtcgggaaataaacgctcccgtccatactgtaatcgatcagaatcgtgcccgccgccggccagagaagtgatgctccctgtgcctcgtaggagacaccgttatccatcagcgtctgctcggagatgatgcttgcagaggcagcttccgcggcatctgtggtatcatttccattcgtgccgcctgcattttcgccatcgcttccatccgccgtacctcccgcgtttgcggccgccatagcgtctccatctgcactttcattcattccgtcgctgcctgaacccaagccgcttccatctgatccgtccgctgtgccgtctgcatttgccgtcacagaagcatccgtatttccatccgctcctgtctgaccgtcttctccgtccgccatgccatccgcatttgcggccgccaggtcatctgcgtttccatccgctccatctgccagcgcctgttcctcatcagatccttccaacatatcgccctgcatccggttgtcatgtcccgccgtcaggtcatccgccagcgcctgctctcccggcactgcctctgtctcctgctgtatttcactgcgctgcgcccgttccagcgacgcaatactgcccagtacaatgattccggtcatgcaaaagccaatcgtccagatcgtacttcgtttctcaatcaaatccttcaaacgttttccatccatatcattcacctcatccatttcccgtgaacactgacctgatgccctgcccacgtgttgtcagaacggatctcttcaacccgttttattttgcagtccggccaccagttttgagccggaggatttattttccggagttttttcgttactgctttgaaccaacctctccggtcttttcactctctcgcctaaaaacggtacccgctgatttactgataggatttccagaaacacagcacttatacacaaaaagaaaaaaagccgccgcctcgcgatttttcgcgaagcgacgaccctcttattttgtaactgttcagagccaagcaaaatttcataaaacaggcggaaaatgcttgcatttttaagcctgtttttgaaattttatttggcggatacgccacaccgacgaaatgcgtagcattttggaggttggctctgaacagttaccttattttttattttgttccatctgatgactcataaggaatcttcttccttatgaaattccctcatcctgagattttacgcctcaaaggtctccggatctaccttgatcacctcatgatccagatgccagatctcgtctacgtactgctgaatcgtacggtcggatgtgaactttccgctgcatgccatgttgagcattgccatcctagcccaacgctcttcgtcgcggtatgcttcctctacgcgcttctgagcttctgcgtaggatttgaagtctgccaggatgaagtacgtatctgcgcggtcgctgcagttcgtgttcagcagagaatcatagatctcgcggaacatttccatatctccgtttgaatactggccgttaatcagctgcatcagcacgcggcggatatcctggtcgttgttgaagtaatcagtcggattgtaaccgccctcattctcatagcggataacttcgtctgcacgcagaccgaagatgaacgcattctcctcgcctacttcctcaacgatctccacgtttgctccgtccattgtgccaagtgtcggtgcgccgttcagcatgaacttcatgtttccggtaccggatgcctctttacttgcagtagaaatctgttcagatacatctgctgctgcaaagatcagctctgcgttggatacgcgataatcctcgataaatactaccttcagctttccattaatggacttatcgttgttgaccacatctgccacgctgttgatcagcttgatagtcagctttgcacggcggtagcctgctgctgcctttgcaccgaaaatgaatgttctcgggtagaacggcatctccggatgatccttgatctggttgtacagatacataacgtgcaggatgttgagcagctgacgcttatactcatgcagacgctttacctgtacatcgaagatggatcgcggatcgacatcgattccgttgtgctccttgatgtattttgcaagacgcagcttgttctgatacttgatgttcatgaattcctgctgagccttcttgtcatcgacatagactttcatctttgcgatctgcggcagatctgtgatccactcatcgccgatgtgctctgttacccagtctgcaagcagcgggtttgcatgaagcaggaatcttctctgtgtgataccgtttgtcttgttgttgaacttctccggcatcatctcatagaaatccttcagctcctgtttctccaggatctcggtgtgcagtcttgcaacaccgtttacagagtagcctgcagcgattgccaggtgtgccatcttcacctgtccgtcgtagatgatcgccatcttgcggaccttctcctggttgcccggatatcttctctggatctcctccacaaagcggcggttaatctcttcgatgatctggtatacacgcggaagcagtctggagaacagctcgatcggccatttttccagtgcctcagccatgatcgtatggttcgtgtaagcacaggtcttagtcgttacctcccatgcctcgtcccatccaagtccttcctcatccagaaggatacgcatcagctctgcaactgctaccgtcggatgggtatcgttgagctggaaggtagccttctcataaaacttgcggatatcgctgtgtgtcttcttatatttttccactgctgcctgaacactcgcggaaatgaagaaatactgctgcttcagacgaagctccttgcctgcatagtggttgtcattcgggtaaagaacgtcaacgatattctttgcaaggttctcctgctcaaccgccttctgataatcacccttatcgaaggaatccagatggaagtccgtgatcgcctctgcatcccatacacgcagggtatttactacgttgttattgtatccaaggatcggcatatcaaacggtacggcacgtacagactgatatccttcctggataaagttgtttttcttcttctcttcatcgtactcaacgcgcacatagccgccgaattttacgatctttgcatactccggacggcgaagctcgaacggattgccatccttgagccagttatccggtacttctacctgatagccgttctcaattttctgcttgaacattccgtagcggtaacggataccgcagccgtatgcagaataaccaagggttgccagagaatccaggaagcatgctgccagacggccaagtccgccgtttccaagtgctgcatccggctcctgatcctcgatcacgttgaggtcaaagcccatctcgtcgagcgcttcctttacttccttatatgcacacagattgatcaggttgtttccgagcgcacggcccatcaggaattccatggacatataatatacggtcttcggatcatccatctcatactgcttctgggttgccagccagttgtcaatgattcgatcttttactgcatacgataccgcctggaacagctgctgctgtgttgcctcatcgatcgttttgcgatagagagttttcacgttctcctttacacgctctttgaatccttccttgtcaaatgtcttactcatcacattcttcctttccttcaaatggtagtaatcggatcctgtcatataatcctgatactgcatcagggtcggggagttactgcttctccacgccaagtgtcacggtttctccgttgatgctccactctttgctgtatccagacacgatgccgtactctaccttcacggcaagtacttcatccctgatctcagactcatattttttcagaatcgcatctatcttatcgttacccattgcggataccgttattttatccattacctcaaagccggcttccttacgcattgtctggatcttgctgaccagctcgcgcacaaggccttcctcgatcagctccggtgtcaggtttgtatcaagcactacggaaacctctccgttcgcctcacttacacagccctctgtctgagccgtctcgatcagaagatcttcctcgccgagcactacttccgtgccatctacatcaagatggatcgcaccggtcgtcttcagctcgttcatcgcagcagcgccatccagtgccggaagcatctggcggatcttgccaagcaatttgccgtatttcggtccgacagttctcatctgcggcttgaagctgtaggaaataaatccgctgacatcatctgtgaaggcaacttccttgacattcagctcatcgcggatgattgctgcaaaatactccggcagtgcttccggcgctttcacatacatctttgcaatcggctgacggttcttaatgtttgccttgttgcggcatgcacggccaaggactacgaccttcaggacctcatccatttcagactccagctttttgtcgatatgtgcttcttccactgccgggaaatcgcacagatgaatgctttccggagccttcggatctaccccgacaacgatgttgcggtaaatctcctcagtcatgaacggaatcatcggagctgcggccttgcatacagttacaagtgcggtgtacagtgtcatgtaagcatttactttatcctcttccatgccctttgcccagaaacgctcacggcttcttctgacgtaccagttgctcatgtcatccacaaactcctcgagcgctcttgcagcctccgggatacggtaattgccaagattctcatcaactgcttttaccatggaattcatcttggagagcagccacttgtccataaccggaagcttatcgtaatccagactgtaatccatcggattgaaattgtcaatgttcgcgtacagcacgaagaatgcgtacgtattccacagtgtgccaaggaacttattctgtccctcctgcactgcctttccgtggaaacggttcggcagccacggtgcgctgttgatgtagaagtaccagcggattgcatctgcaccgtaagtggaaagtgcatcaaacggatccactgcatttcccttggatttgctcatcttctgaccgttctcatcctgtacatggccaagaacaatgacgttttcaaacggtgccttgttgaacagcagtgttgagattgccatcagggagtagaaccatcctctcgtctggtctaccgcctcagagataaactgtgccgggaagtgtttctcaaagtattctttattttcaaacggatagtggtactgcgcaaacggcatcgatccggaatcgaaccagcagtcaattacctccggtacacggtgcatcttctttccgcacttcggacagcggatcgtcaccttgtcaataaatggacgatgcagctcaatctcctccgggcaatcatctgacatctcatgcagctcctgcttgcttccgatcgcatgcatatggccgcactcgcactcccagatattcagcggagtaccccagtaacggtttctggaaagaccccagtcctgtacattttccagccagtcaccgaaacgtccctttccgatgctctccggaatccagttgaccgtgttgttgttgcgcaccagatcatcgcgcacctcggtcatcttgatgaaccaggattcacgcgcataataaatcagcggcgtatcacagcgccagcagtgcggatagctgtgctcaaacttcggcgcgttgaacagaagtcctctcgcatccagatccttgatgacttccggagatacaccgttctcaccttccagatcttttcttgcgatacaggagtggcctgcccactttgtttcctttgtcatcataccgttctcatcgaccagctgcaggaacggaaggtcatattttctgccgaccttgctgtcgtcctcaccgaatgccggagcgatatggacgataccggtaccgtctgtcatcgtaacgtacgtgtcacacacaacatagtacgcttttttcttcagctgtgccgggtaaagagcctcatactctttatactccagatcttttcctttataagtctcaaggatctcgtacgtaccctcgccaagcacggtatcagccagagcctgtgccagatagtaaacgtaatcctcttctttcatttttacctttacgtacgtctcatccgggtttacgcagagcgccacgttggacggaagggtccacggtgtcgtcgtccatgccaggaagtatgcatcctcaccgactaccttgaaacgtgctgttgcagaacgctccttgacatccttatatccctgtgccacctcatggctggaaagcggggtgccgcagcgcgggcagtacggaacgatcttgtagcccttgtacagcagcttcttatcccagatcttcttcagtgcccaccactcagactcgataaacgtgtcatgatacgtaacgtacggatcatccatgtccgcccagaatccgacggtcgcggaaaaatcctcccacattcccttgtatttccagacgctctccttgcagtgctggataaacggctccacgccgtactcctcgatctgctctttaccgtcaagtccaagcatcttctctacttccagctctaccggcagaccatgtgtatcccatcctgcctttctcggaaccatttttcccttcatcgtctggtaacgcgggatcatatccttgatgacacgcgtcagcacatggccgatgtgcggctttccatttgcagtaggcgggccgtcatagaaggtataggtttctccttccttgcggttctccatactttttttgaagatatcattgtctttccagaactgctcgactgccttttcatgctctacgacattccggtttgtaagtactttatcgtacatcgtctgcctcctttatgagcgctctctatattccgttcagtatcctttatcagtatccattattatgtacacatttttttattatagctcagcagtcaagagcttgtcaatttatgatgtgctgaaaataccctcatttttcgttgcatttttcctacatttcccttatactggaaataatactgcggatcttccccagatactcgcagatacgtgtgggacaacacaaaaaggcaggtttctgccggaaagaaaagagagtgagtgtttacaaatgagtaattttttcaacatggacaatggctttttccgtacactcggaaagctggccgatctgatgatcctgaacatcctttttatcgtgtgcagcatcccaatcttcacgatcggagcctccctgaccgccatgtattacgtgactttgaagatggcggaaaatgaagatggctacatcgcccgttccttcttcaaatcgttccgccagaacttcaagcaggcgaccgtgatctggctgatcatgctcctgttcggcatcgtgcttgtgcttgatcttctgatcataaaggaggcgaccggcactgtctggaccgtattccgggtcatcatcaccgctaccggatttttgtacctcatcatgctgaactacgtattcccggtgctggcccgcttctacaacagcacaaaggccatcttcaagaactcgttcatcatggcgatcgcagattttccacgcaccttcatcatgctgatcatcacaatcggagcagtcgccgttatgttcctcaacaactatacgttctggtacggcatcctcgtctggattcttgcaggctttgccctcgtggcatttgcacattcgttcttcctcaaaaagatcttcgcaaagtatatgccgaaagaggaagaagaggaaagctcctctgacggctggtctgtcgatgaaatgccggcatccatctttgatgatccggatgcaaaggctgggaaaactgctgaagcaatcccggaaacggatgcaggaaagaaagacgaatcagaaagtacgaacgaaaaataaatgggcacagcggatattcacaatccgcttgacccggttaaaaaaccggccggtcatcttcggtggagatgaccggccggtactttttgttctatgctttattctatgctttgttcttctgtgctgctccggtactgtgcttaattgccccagactgctcggtatactctcagaaggtttgcaacctgcgcatctgttactctcgacagtgcctgctggattgctgcgtaggtctgcggtctggatgctttcagagctgccggattttcggtgtagtcccggaacgactgtgcaaagtactctgcgctgttctgaaggacatatcccttatcgtatgcggtatacctggatttctcgttctggaaggtctgctggaatgcagcagaagtatctatattacctgcaacgaatgcaaggaaatgaccaagttcatggtaaacagtctcatcggcctgtttcagagtaatcgttcgtgtctgtgcatcacacagtcccgaatacggaacacctgactggataaccacctgaaagccaagcttctggaatgcattcagcactctcttatccgctgccggtgcgatctgggttacagctactgtgccgtttgttacgggggtaatcggtctggtagtcgtcggtgctgccgtgtttgttacggtggtctttgtaatcgttgtctttacggttgtcacctgtgtgttgattttggaaccctttttatagttgtttgtgatgctcgttactattacagtattggttgtgactgttttttttgcgctctttgtctttgtcgttttcttctttgttgtcgtctttcctttctgtgtatacgtcctggatgatgccgatttcagcgaaatcttctttgtagactttgtcgtttttgtggactttgttacctgtggtgatgccagcggtgtctcatcctcctgaatctgtacaacgctgtcctcatctacataagtcaccagctccggaaccggattctgctgattgtatacataagtgcctccgccaaggacaatggctgttgccagtaccagtgcaccagcctttttcgatatctgtcgtaacgtttctttcattttctgatttttcatgtcttctacctccctgaaatccgtctgatataaactttatccaggatgtaaaaaaaccgcttgattttcttttgaaatcagcggtcaccacttacacactacctgatgaaaattcttcccgtatttaaaaggcttcattcacagaaaccgctgggaagatgcatcagtatcacagctcacgcctgtgatggaaaatgcggcaaccggctgtcatagactccggatacggaacccttagaccctttggctttgcgtctctgcttttcaacagatttgcctttatatcagattttcttaatatttacagtattatcatagttttttcgcccgcaaatgtcaaccgattctggcatgtttttcatttttgttacatttttccgtcatactttccatggtgccattctgccgatgtctgtttgtgcaaaatgcacggaaaatgcagaaaaaatgcgaggttgcggcgtttttcttttgaggcagtggcggtcaaatcgtcacagtgtttctccttccatgacctcatacggtaaaatacattcttcttccgctagcattttttcactggcatccgattcctccgttgtctctttctcctgccccgcctcgatccgctcaaacagacggttcaccgccgcctttgcgatctcatccactgcattcgaaacggtagccaggcgtgggatcacataatttaacgtatcaatattgtcaaacccaatgattccatagtcagccgggcagcgttttccaagctctttcagccgcttcataatatcaagcgcaaactcatccgctgcacagacaaaggccgtgcggttgctgtctgcaatcaaatctcccactttctccagataactccagtccagaagacagattgtctctattgcccgcttctgctcccggatcgcctcctcgattccctcccggaagccctttaagcgttcgcggtgtacgtacatgttttccttctccccggatgccatcgccgggcagacgaatacgacacgctcatacggcttctccaacgcataccggacagaagccttcatcgcttctcgctgatcgatggtcacaaatggaattccatccgcaatccggttgtcgacggatacgatcggcatgccaaggctgcccaaaaactcccgatattcctcgccctcgttcaccgaagacaggataataccgtccatgcggtaagccgcaagattcatcagctgccgacgctccagttcccggtcgttgccatgcagcgcaatgttaatgttgtagccgcggctcatggcttcccggctgatcgcactgagcattgcggaaaagtagcggttctttacatccatcacgacaacaccaatataatacgtgcgtccctttacgagaccgcgtgccagcagatctggccggtaatcatgctctcttgccacccgcaggatcatctcctttgtatccggatgaatgcgtccacctccgtaaagtgccctgtgtaccgtcgttctcgacaccccgcacagctgtgcgagatcctttgttgtaattcccactgtaatgcctcccgctgtctgaattctgtttctggatcctgattctgccggctgttcttgccggattttcttttctcattatgtttactattcagagccaggcaaaacttcacaaagcaagcataaaacgcctgcgtttttaaatcttatttggctttgaacaacagtttcattataatggaggaaatgacacaccgcaacttttttccgacactaaaatgcaaaaaaccaggaagcgcctgtcttactgctctatcctggcctttcattggtatcccttttttacttcactttcaccctcaccatctcaaatgaaagcggcagcagctcgcacgtcacctttccgtctttcaggctgacattttcgcatgtttttggcacaacacgatcatgctgaatctgattggccgcttttttatcttcatgatgcagcactgtggattcaagaatcatttctgcctcaaaaccctgcagatcaatctctgtctccgccgcttcctcactgcggttgaccaggaaaagtaccacttcccctgcattttcattccatacggccaccttatcgatcaccggaacctgtgcaaactctccgcttgcgtacgatggaccttcgctgcgctcgtccagcacgacgccccggccgtattttgccatcagtgcaaatggataatagatcggctgtacccacacatcgcctccacgctctgtcatgatgcaggcgctgatattggtcagaagggactggcaggcaatctttacgcggtcactgcagcgcaggaaattcatcatcatactcgcaaagagcagtgcatcctccatcgtgtaaatctgttcactgaatgatggtgcaatctgccacggtgcgttttcaacagccgcctgcacctctttgtccggaatctcccagacaccccactcatcaaagcagatatcgatctttttcgaactgtgccgctgtacaccgactgcatcgcagatgccgcacaccgtccgaatatagcgctccatatccatcgactgcgccagaaacgccgctgtccctttttcctgtccgccgtaatactggtgcagggaaatatagtccgcgcagccgtacgtatgctgcatcacgatcctctcccactcgccgaacgtcgcgttgctcgacagcgagctgccgcacaccgccagcttaatggacggatccagaagcttcatcgctttgcctgcctcgtaagaaaggcgtccatactcatctgccgtcttgtgaccgatctgccagtcaccgtccatctcattgccaaggcaccacgtctttatgccgtacggtgtctcctgcccgtttgcccggcgcatatcgctgtagcaggtaccgcccggaaagttgcagtattcaagcagcgaaaccgcttcttttacacctccggtgccaagattcacggcaaagatcggatcgatcccggtcttttttgcccatttcataaattcatcggtaccgacctcattcgtctcgatacttttccaggccagatccactttgcgcggccgtttttcccgtggtcctacaccgtcgcgccagtcatagtttgagacaaaattgccgcccggatagcgcacggcagtgacacccatctcctttaccgccgctctcacatcctcgcggaagccatccgcatccgccgtctgatgcgatggctcataaataccggaatagacgactcttcccatatgctccacgaacgagccgtaaatttccgggctgatttttcctttttgaaattttttatgtatgattatttttgtcttttccatgctttcccctcattttctattccggattcatgccctgtttttctgccatccggctttcttatgtcagctgttccgtttttctgctctgcacagatcagttttcatttctccgcaaaacatgccgcctgtctttgtctgtggcggaacactattttccgcctgtacctactccttcataccggacgtcgcaattccttccatgaaaaatcgctgtccaaataaaaacaggatcaaaagcggtgcaattgaaatgacggtcgctgccagcgtagggccaaatttgatcgaattgctgcctaccagcaccgccagacctgcagaaagtgtacgcatttccaccgagcttgtcaacatcatcggatacagcagatcattccagttgttcatgaaatgaaaaattccaagcgtcacaaatgccggcttggcaagcggtgcaatgatccgcgaataaatctgaaactccttcataccgtcgatgcgtgccgcctcatccagtgatttcggaatatttccaaaaaatgaggtaagcatgtaaatgccgtaggcgcttgccgcacgcggcaggatcagtccggcatacgaatttaagatgccaagattaaactcctccagatataatggaatcataatgacctgaaacggcaccatcatggtaagcaggatcagattgaaaattacttttttcccgcgaaaatgcattctggaaaatgcataggctgccatcgagtcaaaaaataagctgatgaccgttacactcccggcaaaaatcacggtattgcgcagcatccgaagcaccggaatcgcttttaccacgtaacggtactgatctgccacccattgtgccgggaagaaatgcggcggccattttatgacatccgcatccgatttaaaggaagaaaccagcagccacagaagcggcaatattacgatcagcataatcagaagcaggatcacatcaccgacccgctcaaaccaagacgttttactctttttcactcctcctcacctccctgcggaaatgcatattttctgagcacaaatgttaaaatcgcaatgatcagaaacagatagaccgccaccgacgaggcataaccaagatcaaacggagccgtctgaaaccctttattataaatgtagccaaccagcgtttccgttttgtactgcggcccgccctctgtcatgacatagatctggtcaaagacctgaagcgccgtaatcagcgtcgtgactgcacaaaatccgatcgtatcgcggattccgggaattgttacgtaccgaaacttctgcagccctcccgcaccgtcaagctcagcagcctcataaagagaattggaaacgccgagtgccgccgcggacagcaccgtcagggtatagccaaatcctttccataccgtcacaaaaatgacggttggcatcgcccaggttgtgctcgttaaaaggcctggcatctgaatcccgatcctgccaagcagatacggaagcattccataatttttgttgagcagcatcgaccacatgatgctgaccgccgtcatcgagcagacatacggcagataaaacgtcgtgcgcatcagcttgtgccatctcgtattttttgtcataaacatcacgagcagcaatgccagcagaatctgcagcggcacctccagaagcgcaaagtaaaacgtgttcagcgtcgcatttccaacgcgcacatccgaaaacatccgcagataatttttcaggccggcaaaagaaatatcattcatgtagatattgatattcatgatgctgatcgcaatcgcaccgacaagcggcacaaaaacgaatatcgtcaggataatcagggacggtgccagaaacagatacgcctgtttctggcttttcattccttttcccacagctttcttttccataatgtaaaactcctatcataagaaatcctccggacatttgcccttttcacgcctgcccggaggtatctctttttgcaattcctttttcctgatttattcttccattcgcatctgcgataaaaatggcttcctttgacttagcaatgccgcagattgcaaacatcctctttacccttgcttactgtcctgcaatcacagaatccagtacatcagatgcagcctttacactctcagccacgtcatcacctgcaaggattttttccatcatcggctgcatgacatcggtgtcgatctggctgccgatcgtcagattcagatgccagtctcttccgatctccgatgcttttgatacgcttgagagaatctcgtttgcctggatatccggatcttccagtacggagtaagaccataccgggaatccgttgcggtttgaccactcttttaaggtcgcatccgacagccagtatgccataaatttataaacggctgctctcgtcgcatcgtctgcgcccttggtcagcatgtatgcgcatccgccttccggtgagtatgcgccagcgctgccggccggaatcgctgtgataccataatttacaccgagctgtgtcagtccgttgatgttccacggaccgctcgtatacattgccagctgtcctgcttggaacattgtgtctgcatctgccgcagtcagtccctccggtgatacgccctcgttccgtgccagatcctgcagccaggtcagtgtatcgatgttttcctgggaattcagaagattctctgtgccgtccgtactgatgacatctccgccgttcgcccacaggtactcacagtaggaagcgtaatcatacggaatgccaatgccgtactgatttttggaagcatcggtgcaggcaatcgcgtctgctttcagctcctccagcgtagtcggcggtgtttccggatcaaggcctgccgcctcaaaaatatctttattatagtagagatactgcagattgtactgcatcggcacaccgtactgcacatctccaatgtaggattttgccagcacgttctcatagaaattgctcttatcaacgcctgtctcatcccagaaatcgctgatatcctcaatcagtccgttctttgcatactgctgcaaaaactcgatgccgacgagaacgaaggacgggccggtgccggtcgaaacggcagtcggcagcttggactgcagcgtcgcattatccataatatcgatctgtactgtgatattgtcggtgtttgtctcattataattgtcaatgatctcccgcagcacatctccgtcagaaccggtaaacggcgcccacacagaaagtgtgatcggatcggattcttccgcgtatccgacgattccgcctgcaagcatcgatgatgcaagtgctgctgccataagcagactgatagttttctttttcatagtgatgatcctccttttttgttgtgcggacagcttcgacccgctttttttcttcctttttatttccgtgcgtacacgtgtacatttttaaggaaaagaaaaatgcagttctgcttttatctgatatgtaaatcaatcccctgcattttcttgtgcatctttgctatgcgtacacgtgtacttcatatttgcattatacagattgcacaccattttgtcaaccctgtcctttctttacaaattaccaaattttcatttccatttttgtgtatttttgagcaggaatctgctatactgaagaaaattaattatgtttacgaagggatcttacgattacgatgaaaactatcggctttcgccgtttcggcgcagtgctcctcttcttctgctgtctttttctcggctttggctgcggaaagaaaggtggaaatgaagacagcctcaaaccgccgcaggcttatacgcccggtaagactaccgtgcttgtcccggaagcccctggcactgtgaccaccggagaggatcctctgatccttgatttttccaacgccggtcagggatattttatgggaaagctcacgcagccggatacaaaaatcaacatccagatcaccggtccggacaatgtctgctacaaatattttcttacggaagcagacagttggaccgcatttccgattacggcaggaaacggcacatatctggtactcgcctatcaggaaatttcagatggacagtatgcttctttgttcagctattcactgaatgttacattggacagcgaattctatccatttttatatccgaaccagtatgtgaattttacatctgacagcaaagccatttcccttgccgcttcactcacaaaagatgccgctgaggatcttgatgcgctggatgccatctaccagtatgtgaccactcatatcacctatgattcggataaagcagcaaccgtaggcacaggatatcttcccgacattgatgaaacgctgcgtaccggcaccggcatctgcttcgactacgctgcactcaccgcttccatgcttcgttccctgtcgatccccgcacggctcgatattggttacagcggcgacgtacgccatgcatgggtcgatgtctacattgagtcggtcggctgggtaaaacgcgccgtcgaattcaacggaaatgaatggaaaatgatcgatcccaccttcgcggccgccgccggaaatgaggataatgaagcgattgatgaatacataggtgacagctccaactacaccgtacagtatatccgttagtattatatccgttaatagatccgttagtacatcgcttcataaataactggagtcaaagcggatattcgcaatccgcttcgctacttgctcataaccgagtagctgcttcgcagcttatcaggagtggcttgtaccactcctgatacaagcaagtccctacccactgcttattgctccgcgcaattgaagcaggggacttgcttgactcggttaaataactgactcaatcacgcagaatgcagattcgatgaattattctgcggtaaagcggatattcgcagcagctttaacaaaatcaagcaaggggaaaatcggatcagaaccatccgttttgaccagaaaggattattatgaaacagctgatgacagacggcgaactctccgtcttttccggacagctcgccatgattttgcattccggcatttcgacactggaaggcattgaaattataaaagaagatgccgtctcaaaggaggccggcgaaattcttggctccatcaatgaagcactggagcaaaccggtgatcttgctgaagcatttcgcaccagcggcgtctttccggaatattttataaaaatgacagagatcggtgaacgctccggcacgctggaggatgtcatggatggacttagcagctattacagccgtcaggacagcctcgcccgcagcatccgtgatgcactgacgtatccgctcatcctgcttgccatgctgtttagcgttctgcttgtgctcatgacacaggtcatgccggtcttccgtgaagtatttgaccagctcggtatcgagctgacaggtgtctccggcacagtctttgctgtcagctcctttttgcagcacggttctgccgtgcttctcgttcttgttatcgggcttgctgccgtctgcttctttgccctgcgtaccgacaggggccgcgcgtttatccagaaactcgctgctcatatcccactcgtcataaaaatccgcggcctgctctcctgctcccgttttgcggataccctttcgctcgcactccacagcggtctggatatgggggaaagctttgaacttgccgcaggtcttgccgaccagccggattttaccgatcgtcttacacaggccaaagcacagatggatgaaggcattgatatggcacaggcacttcgcgactgcgggatcttcacaggtatgaacgcacggatggtatccatcggttttcggaccggctccgccgaggatgccctgaaaaaaatcgccgtcgacagccaggccatggcagatgaccgcatacagtctgccatcggcgcacttgaaccaaccctgactgcaatactttctatcctgaccgggcttattctgatctctgttatgcttccgctgctcggtgtaatggcaaatatcgggtaaaggaggctccttatgaggaatcgatttcaaacagataatcccagaccgcatcttttgcggcgcgccctttcttccgtcgccgtaacaggctgcgggatcgcgcttcttctggccggtacacattccgtacttacaacctcctcaaaaagccaggcagaaagcctcaaaaatgcaatcctgcgcagcgccgtcagctgctatgcctttgaaggtacttacccggaaagcctttcttatttgaaagaacattatggcgtgacctggaacgaagacaaatatgtggttgactacgagatcatcggtgcaaatctgatgccatcggtgacggtaatccctataaactgaaccttcataaaaaacaagacagtcaagcggatattcgcaatccgcttcgctacttgctcataaccgagtagctgcttcgcagcttatcaggagtggcttgtaccactcctgatacaagcaagtccctacccactgcttattgctccacgcaattgaagcaggggacttgcttgactcggttaaataaatataagatgcttctctgattcgagttaaagcagatatgtgcaatccgcttcactacctgcctgacttgggtcaaaacagatataaatagattaacgggagggcttcatgacacagaaaaaatcatctcatgtatttgacacgctctttgcatttcttctgctgatcgcatttctgctgttttccctgctgctctccggtgtcggctctgtaatctatcagaaaggcaccgacagcctcaatgaaaactatacgaccagaaccgcccttgcctatcttcaggaaaagctccggcagcatgacgaaaccggcgcctttaccgaaaccacggttggtgaccagcctgcgcttgcacttactgaaacaaaagacgacggaacctacatcacctacatctattattatgagggagccctgcgtgagcttttcacctctgtctctgtcacgccgtctccggatgcaggaagcaagctcacagagctgtccgcctttacctttgaggagctttcttcaccatccgaagacaacggacatctgctgcgtctttcagccacggatcatgcaggtgccacacagtccgtcatcgtacatacttcgtgcgggagctgacattgtctgcaatttctttgtctgcctgacgaatttcatgcgatactgatattataaagcattcctgcaattacttataaatacccgcatcgatctatcttcacaagtgacttgctttacttattttcaccgctcgctttcgaaaggaggatgccgcgcgtcctgcgcccggcctgtaattctatgaaaaaaaatccccggatgggttcgcgcctgttcttcatcgaatttctgattgtgatcttcttctttttgatcataagcactgtctgcctccgtctctttgctgcagcacacctgacgacccggaaagccagtgcgctctcgcatgcacagcagatggcctcctcgatcgcagagctggtggagggtggtgtgacccgtgccgatgaactaccgcaatattttccggatactgtgtacgagacctcaccggattctgttccttcaggaactgcagccacctctgccgattctgaaagcactgccgccagcgcaaaggcttcttccacaacctctgttgcattttactacaaccgggaatttaccccctgctcaaaaggcagcgccttctacactgtgactgctgtactcaccatatccggcagccagaaacaagtatcgatcgtgacaaaggatgccgacggcacagtcatctatgaactgccggtgagctttcatgttcccacaacaaaaaaagaaaccattggatcgtaagcaaacagcttcctgattatgcattccaatggtttctgcctctccaatctccaatttacagaaaaatactttcgtgttatcatgataataatataaaaacaggtactgcgaaaccttttttgacacttaaggggtgtattgcatgggaagttatctgaatccaggcggcggattattccgagcctgtcgacgttctaaaatctatgtagacaagagcaatctgatcacaaaaacaaatgaagtgcttggcacagaacagcgttttgtatgcgtcagcaggccgcggcgtttcggaaaatccatggctgcaaatatgctggccgcctattatggtcgggatgaaaatgcagaaaatttatttgtcgatctgaaaatcagcgctgatcccgacttccggacacatctaaaccagtacgatgtaatccggatcaatgtgcaggagtttttgagcgcttccgaaagtatggatgaaatgctctccatacttcaaaaacgactgctccatgaattaaaatctcaatatccggattatatcgatggcgattatctcgtcttcgcaatgaaggatgttttctctcataccagacatccttttgtcatattgatcgatgaatgggactgcgttttccgagaattcaaacaaaatacggatgcccagaaaaagtacctggattttctgcgtgcatggctgaaagatcaggaatatgtggcactcgcctatatgactggaattctccctatcaaaaaatatggttctcattccgcactgaatatgttcacagaatattccatgatcaacccaagagaaatggctgaattctttggtttcacagaaaatgaggtaaaaattctctgcacacaatataacagaaattttcaggaaacacaggcatggtatgacggatatgaactcgtcgcaatggaaaacagccagcagaaagtctattccatgtacagtccaaaatctgtagtagatgccatgttaagcggcgtatttgacaattactggaatcagacagagacatacgaagcgttaaaagtatatatccatttgaatttcgacggactgaaagatgctgtgattcgaatgttggccggagataaagttcagatcaataccggaaccttttccaacgatatgaccacatttcagggaatggatgatgtactgaccctgctggttcaccttggttatctgagttatcactggccggatcgaaccgtaacaatcccgaataaggaaatgtataaatgttttaacaaaacagcacacctgtatcattgagaaatatgataaagaataagaaacgattcatccgctgtcaattttgactgcgtttactattgaacccaggagctgccaccatgcgaaaaacctccggattgtcacttctgctgctgatctttttatccttatgtctcgtgacgttttcccttctgtctgtctcagaatcttcggcagatcgaaaacttagtgaaaaagcagcgcagcatacgaccgattattatcatgccctgtcagaggcaaatgaaattctggcgaaaatcgacgatgtcctgtccggatatctgaaagacaccgcctcatcggatacaccggcgaaaacctatctggaagcctgcgcttccatcacagatctgctccctgatgtttcgtggaaacgcaccgatcctgacactgggacgatttcctttcagaccacaattacggacagacaaagcctgcagtgcgagctgaccgtgcgctggccgagtactgcagatgatacactgtacgaggtcaccaggcagcaggccgtcaatacttccgactggacccctgatacgagccagaagctctaccagccaaaatagtacaactgtctggccaaagcggatattcgcaatccgcttcgctgcttgcccggttaaaatactcttgagagaaggagaccttcatggaaccatccactgaaaaagctgtggcagtcctcaccaccgccaccaatgcaaaggcttctgatatttttatcgttgccggacttccactgacctacaaggtaaacggagttctccacagtgagggagaacgtctgatgcctaatacaacagaactgctgattcgtgaaatctatgcacttacagacggtcgtccgatcgaaccgttccttgcaagcggagacgacgatttttcttttgcgctgcccgggctttccagataccgtgtcagcacctacaagcagcgtggttccctcgctgctgtcatccggatcatcgcatttgagcttccggatccgaatcagttcggtattccgcagtccgttctgaacctgacctcctttacaaaaggtatgatcctcgtcacgggtcctgccggaaacgggaagtcaacaacgctcgcctgcctcgtggaccgcatcaattccacacgccagaatcatatcattacactggaagatccgctggaattcctgcaccgacacaagaagagcattgtaagccagcgtgagatctcgaccgatacaaacaattacctgacggcactgcgcgccgcactgcgccagagcccggacgtgatcctgcttggcgaaatgcgcgaccacgagacgatccagactgcgatgaccgcagctgagacaggacaccttgttctgtccagcctgcatacgatcggcgccgccaacacgatcagccgtatcatcgatgcattcgatccgtctcagcagcggcagattgcgatccagctttccatgatcctgcgagccgttgtctcccagcagctcgtgccaaccatcgacggaaccatggtgccggcctttgagattatgatcatgacgcccgcaatcagcaatctgatccgcgacaacaagacacaccagatcgaaggcatgatctatacctccgccaaggaggatatgctctccatggacagcagcctgctgcagctctacaaagcccgccgcatcacagcggatacagcactttgctactgtacgaatccggagatgctcaaaaaaaggctgtgaaaacagacaatctgcctgatacccggcacataccctatatgtactctcgaaaggagaaccacttatgaaacagtattcaaacattccattcaaacacgcagccggccacgacctgtgcgccgatttttatatcccggaggatgtcacaaatccacctgtgatcctgtggatccacggcggcggctggaaagacctgaaccgcaaatggtgccttgtaatgccccagcttgaacgcggctacgcgatctgcagcgtcgactaccgctactcggatgaggatattttcccggcacagatgctcgatctgaaggatgcactcctctttgtaaaggaaaacggcgaaaaatacggttatgacggaaacaaggtcatcctctccggtgactcggcaggaggccatctctgctcgctgctcggtgtttccgcaggcaaccgcgactgggaacagccgggaaaggattacacagtgcaggccgttgtcgatttctgcggtccgtgccagcttggcggactttccgatgagcgtaaggacaactttgttttagaacagcttctcggaaccggaagcgacagcaaagcattccgcggccgcgccgcctttgcttccccaaccacctacattaacggaacggaacctccgtttctgatcctccatggctccgtcgatccgacggtaagccctgatcagtcccgtgcactgcgcaacgcgcttgaggctgccggcgtaccggttcatatgtacctggtaccgggcggtgtccacgggctcagcggtgccctgatcgaccagatcgttcaggaattcctggattactacgtcaaaggaaaaacaacggtgatcactccgcagcttacttctgagcatgaccgcaccattccggtaaacaaatgatgcaattgcaaaaaaagaaaaaagaacgttttttcatcgggatccgcggcaagctgagcatctgctttatccttctgttgctgattgtgatggcatttattgatgttgcggtttatcagatctaccaaggcgacattgagcagaaggaaattgcatccatgactgattccggtgcgatcctctcagacaacatccacaatctgcttggaaatcttgaggaagatttaatgtacgatatccagcgcagcaggctgtttggctatctcacggatgactgggagctgtctgcgccaaatgcggaacgaaaaatgcacaccctcggcactctgctgcattttcgtggtctggaatgcaccgatatttttattctggaccgaaatgacagtacttttttctgcaactatcttaaaaacgggtccacctttgccgattttgaaaaaaaagaaatctaccatcgtattctggaaacacaggaagcgctgtttccgaccagaggctgcacgatctggcgcggctgtgagaattcaccggatgagctctatatgatcaaatcatacatcgatccggtttcgcttgactactacggcatcgtctgtattacgatcagcaacgccgacttcaaggagctgctcggtgaatacaattttgacatcgcactgtacgatgagcagcagagctttctcttctgcagttcaaaatctgctacgcgctctcagctcgaagatcagaaaaattatctgtccgtctcaaccccgatccggcgaaatcgcggagactggtctatggtcagctatatt

SEQ ID NO: 258 - DNA, 32759 bp, Unknown
  16S sequences of unknown bacteria
gtcttattatatcacttctggcagtatcgcgcctacttttctgtgcggtattgccttagattctggaaggaagtgtaaagcatgatcttagtcaagctgctcggctttgcgatgctgatcgggacggtctcggggtccgtgctcgggctccagatcgttatcgaccggctcgtcgctgcgcagcgcaggaaaagaaaagccgcacggtcgtgcgggaatatcgtaagccttgatgcttacagaaaaagaaaggaaagaaacgcatgaacctgtatcacaaagtagaagccgccttcgacggcatggcggacgcgttgaaagcggcgatgaacgtcgcggataacagcgaagaaacggagctgtacagcgatctcgccgacgatctcgcggatttacgcgacgacgcccagagcctttacgaaaagctcattcaaaagaaaaatgccgctccggctgctggcacagctgaaacggcgaaagagtcagataaacactctgatttgagtatagacaaaattcttgagaatgtcaagggatctttcttgctcgcagagcaaaacccggacggcggcgtcgacgtaaccgcgaatattaaactcggagatgatttaattgccgtatacggcgcggtcgtatccgtaatttattacatggctcagaagcaaaagctttcgaccgataagctgacagaaatcgaaaataaggccagaaaccacgccattcgccgcgtgctcaaggaggagttttaacatgacaaagcgtacgaccgtaaaaaacgataagctggtattcacaaaaatcgcaccgaaggcgcatatcgatgcgcagaaccgcatccgcctgaccgacgaagcgattgagatcatcgagaagatctatatggacacgaacatttctttgacgcaaattgcgagtgagatgattaaatatgctgcggatcacgtcaccatcgagcagcagacagtcgtgaatgaggtgttgaagaaatgatgaagatcaacaagctcgaaattgagaacgtgaagcgcgtcaaggccgtgaagattgagccgtccgaaaacgggctgacaatcatcggcggacgcaacaaccagggcaagacctccgtgttggacagtatcgcctgggcactgggcggcgaccgctaccgcccgtcacaggccgtaagagaggggtcggtgattccaccgcacttacatattgtcatgagtaacgggcttgaggtggagcgcaagggcaaaaacagcgacctcaaggtcacggacccgaccggcaagcgcgccggccagcagctcttgaacgagttcgtggaagaactcgcgattgatctgccgaaatttatggaagcgtcttcgcgcgagaaagccgaggtgcttttgaagatcatcggcgtaggcccgcagctcaaggagctcgaggtgcaggaaaacgacctctacaaccgccgccgtgcaatcgggcagattgccgaccagaaagcgaagtttgcgaaagagatgccgtattacccggatgcaccgaaggagccgatctccgcaagcgagctcatccgggcgcagcaggagattctcgcaaagaacggtgagaaccagcgcaagcgtttgaatgctgccatactcggtgaaacacgtgaacgtttggtgcagaaagtagacgatctgcgcgcggagcttgcaaagtacagtcagcagcttgtaaagaccgaacgtgacttggaatgtgcgctgaaaagcgcggaagatctgcacgacgaatcgaccgcagagctcgaacagaatatccgcgacatcgaagtcatcaacgaaaaggtacgcacgaacctcaacaaagagaaagccgaggaagatgcggacgcgcaccgcgccgagtacgataccatgaccgcaaagctgaacgacgtgcggcagaagaagatcgacctgctgaaaaatgcgtcgctgcctttgccgggcttatccgtggaaaacggtgagctgacatacaacggacaccgatgggacagcatgagcggcagcgagcagctcaaggtctcgaccgcgattgtgcgcaagctgaacccgaactgcgggtttgtgcttatcgataagcttgaacagatggacacagagaccttacaggacttcggcatatggcttgagcaggaaggcttgcaggcgattgcgacgcgcgtcagcaccggcggcgagtgctcgatcatcattgaagacggctacgtcaagggcgaagtgccgcagaaaaaagaatggaaggcaggagaattctaatgaatatcacatcgggcaaaatcgaatcggcgaaaaaagtcgtcatttacgggccggagggcatcggtaaatcgacttttgccgcgcagttcccgaacccgttgttcatcgataccgagggcagcacgaaatatatggacgtgcgccgcatggacaagcccacaagctgggagatgctgcggcaggagcttacatacgtcaagcagaacccgcaggtgtgcggcacgctcatcatcgatacaatcgactgggcggagcagctgtgcatcgacgatatttgcagcagataccagaagaagggcatcgaagacttcggctacggaaacggctatgtatacgaaaaagaggaattcgggcggtttctcaacagtctggagaaaatcgtgcaggcaggcgtacacgtcgtgctgaccgcgcacgcacagatgcgcaagtttgaacagccggacgaaatgggggcgtatgaccgctacgagatgaagctcggcaagaagaccggcagccagatttcgccgctcgtcaaagaatgggcggacatggtgctgttcgcgaactacaagacgttcgccgtgcagacggacgacaaagggcagaagtttaaggcacagggcggtaagcgcgtcatgtacacgtcgcaccacccgtgctgggacgcgaagaaccgtttcggtctggcggatgagctgccgtttgagtacgcgcagatcgcgcagtgcatcggcggcaagcccatgcagcaggcaccgtcggcaccggtcagcgcagccgtaccgacacagcagatgaatgccgttttggatgaaacaccggcagcggaagaagcgtacagcattccgtcttacgtgccgaaagcgcttgcagacctcatgcgcccggagcacgtaaccgcagaggaaattcaaatggcgatcgggcagaagggctattatcccgaagacacaccgatctcgagctatgaccctgcgttcgtgcagggcgtgctgatcggcgcatggccgaaagtattttcagtgatccgcagcaacagagatttaccgtttgacgtataaggagaaacagattatggcaaacacaacgaatgaaagagcaatggactgggaagacaccatagaaaacgaaagcaatttcagaattatcccggagggcgattacagctttaccgtgagtaaagtgacccgcgcacgccataacggcagtgcaaaggtcggaccttgcccgaaagcgatcttagaccttgacgtggtgacgcccgagggcgtagtcaccgtgcagcacaaccttttgctgcacacgcgctgcgagggcttgctgtgcgcattcttcacctgcatcgggcagcgcaagcacgggcagccgcttaagatgaactgggctgccgtgcccggcgcacgcggccgtgcgcatatcggcatccgcaaatggacgagcgaaaaggacaaccgggaacacgaatcaaacgaggtaacgcgctttttagacccggaaacggcacccgccgcgccgacaccgagctttacaccgggtgacttctgatggagctgagaccatatcagcaggaggcaaggcaggcagttgaaaatgagtgggcgtgcggcgtggatcgcacgctgcttgttttgccgaccggctgcggaaaaacgattgtctttgcaaagatcgccgaggacagcgtgcgggacggcgaccgcgtgctgatcctggcacacagaggggagctgcttgaacaggcggcagacaagattcgcacagcaacagggcttttgtgcgcgacggaaaaagcgcaggaaagctgcctcggcagttggtaccgcatcgtcgtggggtccgtgcagaccctgatgcgcgaaaaacgccttgcggggttcgactacgactattttgacaagatcatcatcgatgaggcgcaccactgcatctcggacagctaccggcgcgtactggaccatttcagcaccgcaaaggtgctcggcgtgacggcaacgccggacaggggagacatgaagaatttaggcgcggtgtttcagtcactcgcctatgaatatacgctgccgaaagcgatcaaggagggttacctcacgccgatcaaggcgctgaccgtgccgctgaagctcgacctttccggcgtatcggtacaagcgggcgactacaaagccgccgacctcgacacagcgcttgacccgtatttatacggcattgcggacgagatgatgaagtattgcagagaccgcaaaacggtcgtgtttctgccgcttgtgaagacctcgcagaagttccgggatattctgaacaagcgtggtttttgtgcggcagaggtcaacggtgagagcacagaccgcgcggagatactggagcagtttgatcgcggcgattataacgtgctgtgcaacagtatgctcttgaccgaaggttgggactgcccgagcgtagactgtgtagtggtgctgcgtccgacgaaggtgcgcagcttatacagccagatggtgggcaggggcacgcgattattccccggcaaagaccacctgcttttactggattttctctggcacacggaacgccacgagctttgccaccccgcgaaccttatttgcgaaaatgaagaagtcgcgcagcagatgacgcgcaacatggaagaagccgcaggcgcacccgttgaccttgaagaagcggagaagacggcatccgaggacgttgtagcgcagcgcgaagaagcgcttgcaaagcagcttaacgagatgcgcagccgcaaaaaaaggcttgtggatccgctgcaatttgaaatgtccattcaagcggaagacctttccggctatgtgccggcgttcgggtgggagatgtcgccgccgagcgaaaagcaaatctcggcgcttcaaaagttcggcattttccccgatgagatcggcaacgcaggcaaggcggcgaagatcctcgataagctcgaaaaacgccgcacggcaggactgacgacgccaaagcaaatacgattcctcgaggggcgcggatttcagcacgtgggcacatggtcgttcgagaccgcccgcggcatgatcgaccgcatcgccgcgaacaactggcgcacgccgtacggcattgacccgaaaagcttcagaccggaggcgtaaatggagtataacaacgagaacctcttggagctgctcgactatatcgaccctgctctgctcaattatacggattggacaggcatcggcatggcgctcaaggacgcggggtacaaggcttcggactgggatgcctggagccgccgagatttaaagcggtatcatccgggcgaatgtgagcgtaaatgggacacgtttacgggtacaggcatcaccgccggaacgctcgtcaaaatggcgctggataacggctacaagcccgcaaaagcagaccatgagctcgattggaacgacacgatcgaccgtcatgatgaatttgttgtggtggacaagaactggattgaagcgcaggacattcacgagccggaaaagtggaagcctgccgccgagctgatacggtatctcgaaacgctgtttgacagcacggacacggtgggctatgtcaccgagagctgggagaaagacggcaagtacatgccgaaaagcggcagctacacgcaaacggcaggcgaattatgcagcgcgctgtataaatgcggcgacgacctcggtgcggtgcttggcgactataaccccgccgtcggtgcgtggatccgcttcaatcccttagacggcaagggtgtgaaaaacgagaacatcacggaataccgctatgcgcttgttgaatccgacagcatggatatcgcgagccagaacgccgtcatacgtgaattggagctgccggtcgcctgccttgtgtacagcggcggcaagagtctgcacgcgattgtgcgcgttgatgcgggcagctatgaggaataccgcgcacgcgtcgattatctctacaaggtctgtgcaaaaaacggactggacatcgataagcagaaccgcaatccttcacggctttcgcgtatgcccggcgtggtgcgcggggagcacaagcagtttttggtcgacacgaacatcggcaaaagctcgtttgaagaatggcgcgactggattgagagcgtcaacgacgatctgccggacgaagaaaacctttcaacattctttgacgacctgccggcgcttgcgccgccgcttattgaaggcgtgctgcggcaggggcacaagatgctcgtggcgggccccagtaaggcgggcaaatcgtatttgctcatcgagctgtgctgctgcatcgcggagggaaagccgtggctttcgtttccctgcacggcgggacgcgtgctatacgtaaaccttgagttagaccgtgcgtcctgcctgcatcgcttccgcgacgtttacacggcgctcggctttacgccggaacacatcgaccgcatcgacatctggaacctgcgcgggcgcagcgtaccaatggataagctcgcgccgaaactcattcgccgcgccgcaaaaaagagctacatggcgatcgtcattgacccgatttacaaggtcatcaccggcgacgagaacagcgccgatcagatggcgcatttctgcaaccagttcgacaaggtgtgcacggagctcggctgcgccgtgatctactgccaccaccattcaaaaggcgggcagggcggcaaaaagagcatggaccgtgcgtccggctccggtgtgtttgcgcgcgatccggatgcgcttatcgaccttatcgagctggagctgaccgacggcatcaaggagcagcaggagaaccgcgcggtgtgcgccgtgtgcctcgactggctgacgcgctaccgcaaggcggacgaagccggagacgatgaccgactgagcgcgacgcagatgatggcgctgtgcaaaaagcacctgcgggaagcgtcatacaacttaatgctcggcgatgtgtcaagggcgcgtacggctgcaaacgcaaagtccgcatggcgtgtagaaggcacgctgcgcgagtttccgcgcttcgcgccgaagaacttttggttcgattatccgatccaccggacggacgaaacgggcatcctgctcgacctgcaagccgaaaatgccacgccgaagggcaccggctggaagcagaatttcggacgcaagaagaccccgcaggagcgcaaaaaagagcgtgaagcatcactcgacacggcgtttgaagcggtgggcgagggcggcacggcgagcgttaaggagctctccgagtacctcggcgtgagcgaaaaaacggtgcggcgtaggttggaggaggcgaagaagtactggatttcagagggtgaagcaggaataaaataagcgtaacttatttattccacctgcaaaaaacagctaaaaaccattcgagttcagtgtattttaattacagggacagggacaaagacagttgtccctcgaatttgaccctgtgagggacagacattttttcgattttgtccttgcttgtatatttaaaatatagcttggacagagacaatttctcgattttgtctttgtctctatacaaaaaatacaacttggacagggacaattactcgactttgtccctgtcccggacacacctatatatactacgtatatatatccgtttcactttctctcacggtcaaggggtgaagaagtgtgggggtcatgaggttcccccacacgacttcttcccctacccttgacgaaagcaaattttcttcaaagacaaggtttcaacaatttaacgaggtgaagcgaatgacatcattagagttttttgtaccgatggtaccgccgacggtaacgcatcaggagaagcgtttgaactggtcggcacgaaagttctacgaggacgataaactgaaagccgccagacagaagctcgccgcttacatcggcaggcacagacccgaaagcccgatcacgggcggcgtacggctgacaacgaagtggtgcttcccaaatggcagacatgcggacggagagtaccgcacatcgaagcccgacacggacaacctgcaaaagctgctcaaggacgttatgacgcagcagggattctggaaagacgacgcgctggtggcgtccgagatcaccgaaaagttttgggcgaagattccgggcatctacatccgcattgaggagctgtgatggagctgcgggaagttaagcgacacatgaaccgcacggtgcagtacagcggcagcgcttacgagctgacggcgatcatcttccgcagagaccgtaaaaccggcagtgacttttaccaggcggaaataaccgacaagaaaaacgacggctccgtgctgatctgcgggctggagcaaattgaaagcgagggaaagccatgaacctgacctgctgcccgagggagtgcccgcagcgctcggtgagctgccataacgggtgccagacgtacatgcggtacaagctgatgcggctgctgatgaacaagcagcgcatgaaggcggtggacgaagtaggctttcaccgcgacgtgcggcaggctgtgaaaagaaaacatgaaaggaagatcagacgtggacactgaagaacgcaagaaagttttagatgccttgacttcgggcgaatgggtcgaaaccaaagcggtgtgcgatgcactgaatattactttcgcgcaaggtatgagaattttttcgttcagccgaacggtaaagtggagttctccaccggcaaacggacaggatattacgacaaaattcagagtaaggaagtaggagagaaagttatgaagactaaaatcatcttggtcgtgctcgtaatcgcggcgacgctcacggagtgcatcgcgatgcgcaagtcgcgggagtacgacgcagcggacaatattgccgggcttgagcgatgtgtaaaagccatggtggtgcttggctttgtgggcattgccgcagcggtggcgtttgtggcgatgtgataaagataaaggagatggcgatgacaaaagaacttttggagcaataccccgacatctgcgcggaaatcgaagagctgaaggcgaaggacagcacggcggtcagcgacgtggtgcaggcgagcgcggacgagttcccgttcaacctgcacagcgttacggtgcggggcttgccgaacccgaaacacgcagaacgcattcgggaacttgaagtgcaaaaggcggagatcgaagcgtttgtgggcaagctttcctaccgccctcagaagctcgcccgatgtgtcatgaagcacgggacgaggtggaaggtcattatgcgtgagatgggcggttacaagtcgccagatgcactgcgaatggaattcagcagaattttttcaaaaaaattttgagtttgttcgttttgttcgctttgttcgtctataatgataattgagcaattgtatcattcaacaatttgtgacaaaagtattccaatttctcccaaatagatgtataatgtaaaaaattatcatctgtttgggggatttatttatgccgaaaactaaaggcacgaaaaaggttcgcatatattttcatcatttgctcatgacatattccatgaacagaaatgttgtcccgcagcctagcattgacgattgtgtcaattttttcactagatcgcttcagtacacactttcttccccggtgcaggatcgaaaagttgattttgctgcagacgaacaaattgtatggcttgacggctgtaaggtcacagaaaagttgttggatgacaggcgtacaatgacaacttttgaaattacgataaaatccgcaaaatataatcaagtaagaaatgtccgtaacacgaatacgatggaggaaaaagggctgcttaaggaaattatggatggagacgacgaaagcacacacttcttgatttcgcacattactggtcgtaataatttgatatgtgtgcaagaaagcaactactatggaatccgaatgggaaaatttacacagtatttgagaaaacggatggaggcgtacagagcttctattaatgggccatttgatttctggtttgaccatgagatatttccgtctgacgcatttcttgacggtctaaaggatacacggaagataacagttttaactgtgtacacatcaaaatccgctgccaatactttcgtagatctttcagatcgcgatgatttgagagatgagactcagcttgtgttaaagaatccgcgcagaggaaaatacattcatgcacagaccataaaggattattattctgcaatgagtgaaaatcaggatattcttcgaataaccgctcaaggacagcgctacgggataccgttcacgttagacacggaaggatctcagatgaaaaccgaaattgctgtaaagttgacatcaaagactaaagaagttgttggcagcagcttcttcgaagaagcgaatcaggcattacgcactatggggggaattgaagatgaaagctattcggaaagcgttatgtcctatagttgattttttcctaatacgcaagagagtatggaagttttttatccttcctgtcatcgccgcattgagtacaggtattctgctgatgcatcaaaacagcgtcaacataaacaatgagaaatatttttcacagctgggagactcctgtcaaaacttcatcaacacggcgattaccggtatttccattctgacatccttttctttagctgttattactatcatttgttcgtcggatggcgtttctattgcgaggttaaaatctgcgcgcggtgacagaaaactttatcgaccgctgaaaaactcagaaacaacgccgactctttttcaaatattactttccactgtttcgtataatgttttttcggaaatagtatttttggcaattctgtttatgcagcttttcatagttgagtcctatagtatcactgttatgtctgttgttctttcagtcaatgtattcttcattgtacatattttgtgtgttctttggtccacaatttacgccttgtattttacgtattggaaataggattctaattttctatgcacctgcgcttcggcgtgggtgcttttcttatgcccgaaaccgaaaaggaggggtgcacgtgaaaagagaataccgggtatgcccgagggactgcaaatgcgtttgggcggaatgcttagacggcacatgcttctgtatgctctctgtgtgcccctatacggcgatttcagaagtttcacctgttaagagtgaaagcgcagcagaggaccgcatagacggcttggggagcgggtgatgcgatgagcaggcctgtgggcagaccgccaaaatacaagagcgtggaggagatcgagcagaagattgaggcgtacttcaaatcatgtgagggcgaaccgctgaaagatagggacggcacggtgctgacggataaatacggcgcgccgatcatcgtcggcaaaagaccgccgaccgtaacgggcttggcgcttgcgctgggctttgccagtcgtcaggcattgctgaattatcaaggccgaaagcaatttaatgacacgataacgcgggcgaaaacttacgtggagcagtacgccgaagaacggctctttgatcgggagggcgtgcagggcgcgaagttctcgctcgtcaacaactttaaagggtggagcgagaagccagagagtgaaagcgacgccgaactgctccaaaaggcggcggaattgctgggaggtgtggacagtgtcatttagtccgaagcagcaggagtttttgcagaactgtaatcaccgttggaacatcaagaccggcgcgacgcgttccggcaagacgtttttggattacaccgtgatcccgaagcggattttaaaatgccgcggcgaggggctcattgtgctgctcggcaacaccaaaggcacgcttgagcgcaatattctggagccgatgcgtgcgatctggtcgcctgcgctcgtcgggcagatcggcagcaacaacaccgtgcagatcttcggcaagaaatgccatgcgctcggcgcggataaaatttcgcaggtgtcaaaattacagggcgcggcgtttgaatactgctacggtgacgagattacaacctggcacgaggacgttttccagatgctcaagtcgcgcttatcgtgcccgaacagccattttgacgggacatgcaaccccggaaacccgcagcactggttcaagaaattcttggattccgatgcagacatttaccggcaggcgtacacaatcgacgacaacccgtttttggcgccggagttcgtcgagaacctcaagcgcgaatatgccggcacggtgtattataaccgctttatcctgggcgagtgggcagccgccgaaggcgtgatttatcaggacttcgcaaacagcgtggcaagctgtgacgagcggttcgtatggaaaggcaaggagctgccgttgatggcggtgaatatcggcgtggacttcggcggcaatgggtcaaagcacgcgtttgttgcgaccggcattttatcgggctattccggcgttgtgcttttggcatcgcgccgcgtggagccgagcacgccgcaggcacttgaaaaggcgttcgtcgatttctgcgcggcggtgcaccttgcgtacagacgcatcgaccatatctactgcgacagcgccgagcaagtgctcattcgcggtatgcagatcgctttgcagcggtcggagctttcgtttgccgcttccagagtgtcgaatgccgcaaagacagaaatcaacgatcgtattcgccttgtgtccgttttgatgggcgcagggcgcttctggtatttgccggaggcaggttcggcgagagacgctctggcggcagcgctgtggagcacaaaggacccgacgaaagacgagcggctcgatgacggcagcacggacatcgatacgctggatgcgctcgaatacagcattgagcgagactataagcgctttttgaaagcgaggggacacacatgaacatcggagcagtgatcggatacctgaacaaaacatacgggtacgatctcaacagcagttattatacatacattgccgagtggcgcgactggtggacaggctttcacaggccgtttcatcattttgtggagatgcggcagaataaaccgatccaccgcgagcttttcacgctgcacatgggcaagaaggtgtgcgaggactgggcaagcttgctgatgaacgacaagacgcgcatcgacgccggtgaacagaaccaggtgtttttgctcggcaatggtacggaacgcgggctttttgatgaacttgcattttggctgcgggaaaatgaacttattgaacgcgcttttgcgaccggcacgggcgcggcggtgctgcgatttgaaaacatgctggtgcagggcggcgcagtacagccggacgagaactgccgcatttgtgtggattatctgacggcggaaaacatcgtgccgctgacggtcacgccacacagcgtacaggatgtggctttcgcgaccgatacggtctacaacggcaaaacgtacacgtatgtttctacgcaccgattgatcggcggcgaatatgtaatccgcaacgcgtacttttcggaggaagcggacgagctgaagccggcagaactgccggaaggcatcgcacaggaatatcataccggcagccgtacgccgttgttttcgctcatctcgccgaatatcgtgaagaatttttacggaggcgcggggctcggtgtatcggtactcgcgaacgcgctggatcagctcaagggcgttgacctggcctataacaatttctgccgggattttaagctcggcggcaaaaaggtgttttacgatcagtcgctcgtgcagatggacgagaacgggcacccggttacgccggacgacatcatgcagtcgttgttctttcaactcggcgacggctgcgacctcggggataatcacccgattacggaatacaacccgtctttgcgcgtggaagaaaacatcgcgggcatacaggcggcgctcgattatctttcgcttcgcgtcggcttcggcacgaagcactatcagttcaacagctcatctattgtgacggcgacgcagtacaacggtgacaagcaggaccttgtgcagaacgccgcaaagcacagtatcgccgtagggcagcacgtgcaggcgcttgtgcgggcgctcttgtgggcgggcaaatatgtactgggtgcagacgtagacccggaagcgctggtgacagtcgattttgacgacagctacattgtggataaagagacgcaaaaggagcagttccggcagtttgtaatcgccggcaaagtgccgctgtggtattacctcacgcgctttgaagacatggaggagggcgaagcgaaggcgattgcgaacgagagcgcacgtgcgctcggtgatccgtatgctgacgcctgattatctcgaacactgcgccgatgcggtgattctgctgtatcagcggctcgacgaagccatagcgcgggacattgcccgcaggctcatgaaaatgggcgaagtcacggacacggcacgctggcaggcggagcagttacagcacgcagggcgcctctatgacgaggtgatcgccgaagtcgcgcggtacagcggcatgacacaagaagccgtgcgcaaggcgtttgaggatgccggtgtgaaaagcatggacgcggagatcgagcagtatttgcaggcgggcataaacgtgccgccgatacgtcagaacgagcgtgcatggaacatcttgcaggccgcgctcaagaagacaggcggcgagcttttgaaccttacgatgacaacggcgcttgaaacgcagcggcggttcatttctgcatgtacgcttgccgaaatgcaagtcacgggcggctttttgagttaccaagaggctgtgcggcgggcaatacgcgatgcagcgggggaaggcacttccgtactttatccctccgggcatgtcgataagctcgacgttgccgtacggcgtgccgtcgtgaccggcgtcaatcagacgtgcgggaagattaccgaatcgcttgccgatgaatttgaatgtgacctcatggaaatcactgcgcacgcaggcgcaagaccttcgcatgccgtttggcagggacagattgtttcccgttccgggcggcgcgggtatttgtcgctttcggacatcggctacggcacgggcgcgggctttcaagggtggaactgccgtcatagctggaatccgttttttgagggcatctcgaagcgctcctacacaaaagaagacatcgaagcgctgaacgccaaagacgtgccgtataacggcggcatgtacacggaatacgagatcaaccagatgcagcggcgcatggaacgcgagatccgcgccacacgccgcgagcttgcgggactggacgaagcggcgaagttttcaacgggaaagcagaaagccgacctgcaaagcgattttgcgcagagctccgtgaagctcaagcggcaggaagcgaagctgcgggacttcacccggcagaccgaccgccgtgtagatacctcccgcgtgcaggtgatgggcttcgggcgcagcgtgagccagaaggcggtttgggagaataaaaaagagaaacccatatttgacttgctttctgctcatggtgtaaaatacaagcagagaatcaaccgtaaagagatcattgttgatgcaggaaagcctaaaatagtcggtatgcgtgttcatgcggccgaaaatcttacaaccaaagctgaccgcgctcaaatgtcgcttgagcaggcacagcttttcgtgaacaatgcgaaactgacgctgtatcaagacgataagtttacaatgaaatttttggccgaagacggatatgcagttcttaattttgactatgagttggtaacagctgtaccgcagaaatggcgtaagaaatacgatcaatatttggaggagatgaaaacatgagacatccagacgacaaacatccgtgtccgttactgaaacgcgacgtcctttggggcgaatgttgggtcattcaggacatccgcgacgacaacaccgatatggaatttgccccggagccttttgaacgatccaccgcaaataaaatctgtgagaaatgccggtggtatagggtggacgaagaagcatcacgataattttacaccgttgataaagcagcttagcgcttatgcgccgggctgcttttttcatacccaaagtcgccttccacccggaggacgtggatagaaatatacccaaaattaccgcttgcccggcggaaaagaagcggggcggccgcagaacggggactggcccgagaaaaaggacgcggcagaagaaaggaaaaactatggcacttgaatggctgaaaggtattctcggcgacaaatacaccgaggacatcgacaagcaggtctccgcagagatcggcaaagcattcgtttctaaggcggatttcaacacaaaaaacacagagctgaagaacgcgaaggacgctttatccgatgcgaacaagacgattgaaggctttaagtctatggatgttgacgcgatcaaaaagtccgccgatgaatggaagcagaaggccgaaaaagcagagaaagaagccgcggagcagattgcacagctcagatttgacgcgcgtctcgataacgcgatcctctcccggcacggcaggagcacgaaaggcatcaaggcgatgttggacgtggaagccctccaaaaaagccagaaccaggacagcgacatcgccgctgcgctgcaggccctgcagaaagaaagtggctacatgtttgagacttccgatgcaggcaggacgaacacagacaacggtacacagggcggcatccgtctgaacagcggcacacagcacgccggcggcggaacgcccgactacaatgccatgagcgacgcggaatattatgccgctgtgctcaaagataacaaataacaggaggtcattatggcaaatcagtttttaaccatcaaagaggtcgcacgccaggcgctgccgcgtctgatcgaaaacctcgtattcccgaaccttgtatacaaggactattccgacacgttccagaagcgcggcgacgaaattcagatccgcaagcccgcaaagctggaagcaaaggagtttgacgcagcgaagggtgttgagatgcaggacatcgacgacagccagaccgtaacggtcaagctcgacaagattgcgacggtggacgtggagatctccgcgctggagggtgcgctgaacatcgacaacctcaaccgccagtttatcgagcctgcggctgtcgcgctcgcccagaagatcaacagcgacggtcttgcactttacaaggacattccgtatgtctgcggcacgccgggcaccacgccgagcaagcttgaggacatcaccgccgtgcgcaaggtattcaatgccaacaaggtaccgacgagcggcagacgtgccgtgtgggacgtggaagcggatgcagcgttcacaacgattccggcgattgtcaacgcggaaaagtccggcagcacagcagcgctgcgtgagggctccatcggcagactgttcggtctcgacaactacatgtcgcaggcggtcaagcatcacactgccggtacgctttccgccgccgtcaagccgaaggaagccacaaaggcaggtgcaacacagctcaccctcgcggcgactgccgtgaccggcgcgctcaagaaaggcgatattctgacgatcctcggcgacacgtatgtggtcacggcggatgctgcggcagcctcgaacgagatcacggtgccgatctatccggcgctcaagaaggacgttacgaccgcgacgaacgtgacggtcgcaggcaaccacaccgcaaacctggcattcgttgccccggcattcgcgtttgtcacccgtccgctcgttacacccgccggtgtggactgctatactacgagccacaacggcatttccctgcgcgttacaaagggctatgacatgaagtataagcgcgagatgctctccatggacgtgctgtacgcgtacaagacgatctacccggagctcgccgtgcgtgcgatgggttgacatgtggacggtcgattttgagttctaccgcagcacatacggcggtgagatggaagcggagagcttcccgcaggcgatacgtgcggcgtgcgcatatatcgacacgctgacgttcggcagactgcgcggtgcggaagaaatccccgacgacgtgcagcttgcggcttgtgctgtggcggacgtatacgccgcggaacaaagcgcgcgccgggagcagatgcagcgggcaggcgtgaagtcgttcacgacggacgggtacagcgaaacgctcggcgacgccgcacagctcgcgaaagattttgcgcagcaccgtatggacgtggctgaaatttacctgccgcgtgcgcacccgctgcgctacgccggtatttgataggagggcagcatgcagttttgtaaggaatcgctcacgtatttcgtgctcgatgagcgcgaccgcgttgaaaaagccattccgcttttcggctcctggtacagcaaaagcacttcggagctgacggataagggcatgacgttcgcgcaggtcacggagtgccgcatccccgcggaatacgcgccgcagggctttgcaccaaaaaaaaacgacatgctgctgcgcggcacgtttgacggcgacccgccggtggctgcactgctcaagcaccgataccacgcggtgacggtgaaagcggtgcgggataaccgccgaaccgtgatggcgccgcactggcatatctttgcggtttgaaaggcggtgtatatggcagtcagcattgaactgaagcttgacccgcttgtgaaaatggaagcgaaacgtcatttgaacgacacgggcagaaagaaggtcgcaagcgaagtgaaacgcctttgtgacccgtatgtgccgtttgacaccggcatgctgaaaaacaccgcacaggtgctcacggacggcgtattgtacgtgcagccatacgcggcggtgcagtattacaccaacgccggcagcggcaggcaggggcttacaaagcagaatgcgcacaactacaaatgcctgcgcggtgcctactgggacaagcgcatgatggcggataaaggcgacgagctcaataagagcatcgcttcgttctgcggcggaaaggcgggaaaatgagcatatcggttttgacgggcatccgggagtatctttccgggtgtcctctttttgataacggcttgatacgcgtgaattacctcgagggcgaaccgatcgcgtatacggtcgatgaagtccccgcaaagcccgttgtgcggcagtacacggacggcagcagcctgcggcaggcagaattcgtcatcgcatcaagcgagtattacagccgggatgaaatcgaaaacctcaaggtgagtggcttttatgagcagcttgccgactggctggagatgcagagcgaaagtggtgttttgcccgagctgccgcgcgggtgtacggcacagaaaatagaagttttgacaaacggttactgtatcagcgcggacatgcagcaaaaggtccagcggtaccagatacagtgccgtttgctctatttaaaagaattttgaaaggaatgatttgaattatggcagataccagaactttggtacccagaagccaaaaggtgctcttttacggtgttccggcagcgtccggcgatacaactacttaccaccgtatgaagggctttacggacgtttctacatccaaaaacgcgaaggagtatacccgtcagtatgtagacgagctttttgaacagacggacgtcaccggctattcgccgtccacatcttacggtttcgaccagtacgcgggcgacccggtgcatgcggacattgtgaagatcacagacgatgagctgatcggcagcaacgctgtgcgctctctgatcctcgtagacctctccgcaacgggtgccacggcaacgaccgcacccgccatgaagcgcaattatgccgtcatcccggattccgaaggcggcagcatggacgcatatacctacacgggcaatttccgctcgaagggtgagaaagtcaccggcacggctaccacagacgacgactggcagaccattacgtttgcataaggaggcgcagcatgtacaagttcaaaatcgaaaacaccgagctcgaatacaacttcgcggacgccgatgctgtggaatgctttgaaaaagcgatgctcatgctcggtgagcagatgcagaacgtgccgaaggaaaagagcggcagcgagcagatccgctacgtgtgcaaatctgttttcgcggtgctggacatgattttcggcgacggcacggcgaagaagatcttcggcgcgacctgcgatatgatgcgctgcatgaatgcggtggatgcgctcgtgaccgcgagatatgaggcggacgcgcagctcagcgaacagatgcgcgctctgaacggcaaaagttatatcaaatgacctcgtggcagacattgcccgaaagcatcatggtggacggcacggagatcccgatcaacgcggatttccgtgcctctgctgcttttgaggagctgatgcaggacccaacgcgcaccgacgaacagcgtgttgcggagatgctggagctgtattttacctcgcagactatgccgatgctgcaaacgctggtactggaaggcaaagcacaggcactttttgaagcaatcttgtggttttaccgctgcggcaaagcgccgaaagaagatcacgtagcgagcaagaacgagccgcgcccgtattcctttgccgccgatgaacagcgcatttacgcgtcgtttcgggagcagtacgcgtttgatctgtacgatgtgccgtttctgcactggtggaagttttcctccatgttcgcagcactcggggaacacaccgaaatggcacgcgtgatgcacattcgcacggcgaagtttgaaaacggcatgagcgccaaagaccgtgcggcactgcgcagggcgaagcgtgcgtatgcgctgccggatctgcgcaccgacgcacagcgcgacgatgattttgccgctgcatttgcttcggcgttttaggaggtgacggtttggcatctgacggttctatcaaaatattgaccgaccttgacacctcgggttttgaaaagggtatcaacaaactttcgggcttagcgcctaaggggttaggtacggttttgaaatcggtcgcggcagtctccggcgcgctgggtgctgcgagcgggtttgccgtaaaggtcggctcggactttgaagccggtatgagcgaggtcgccgccatatccggcgctacgggcaaggatttggaagccctcaccgcgaaagcgaaagagatgggcgcgaccacaaaattcagtgcgacggagtccgccgaagcgctgaaatatatggcaatggcgggctgggacaccggcaaaatgctctcgggcttgccgggtgtcatgaaccttgcggcggcatcgggtgaaaatctcggcacggtatcggacatcgtgacggacgccatgacggcgttcgggctttcggcagacaaagccgggcactttgcggacgtgctggcgcaggcttcgagcaaatcgaataccaacgtcggtatgatgggcgaaacatttaaatacgtcgcgcctgttgccggtgcactcgggtacagcgtggaagacgccgccgttgcgatcggcctgatggcgaacagcggcatcaagagcagccaggcgggcacagctttgcggcagacgctcacgcgccttgcaaagccgaccgacgaagtggaagccgcgatggaagacctcggcatatcgctgacggatagtgagggcaacatgaagtccctcggcgaagtcatgctcgatatgcgcaaaggcttcaaaaatctcacgaaagaccagcaggcgcagtatgcggcttctatcgccgggcaggaaggcatgtccggcctgcttgcgatcgtcaatgcaagcgatgaggattttaacacactgaccgaagccatacagaattccgacggtgcggcgcagtctatggcagacaccatgcaggacaacctcaagggtgccgtgaccatcgcgaaatccgcgctggaggggctgggcattacggtgtacgaagaaatcagtacgccgatgaaaaatgctgtggagaccgctacggagtacacagggcagttacagcgagcttttgaagctaaagggattgaaggtgctgtatccacactgggcacagtgctcgcaagtgcggcgacaaaggtggcgcaggcagcgccgaaaatggtggatgccggtgcaaacatgatcgtatcgtttgtgcagggaatatccaaaaacgcccgtaaactctctacggctgccgtgaacgtaggtaaatctctcgtcagtgcattgctgaaatttgtaccggaagccggaaaggcaggcttgaaactcatcacggcgtttgcaaaacaactcgtgggatacaagctcggcaaagaaatcgatcaacttggcagcacgatcataaaaagcttttcggacatttcgcggtctgtgagcaatgctattgggaaaatcacgccaatcattgaaaaaatggcatctgctgccattaaagcagcggaaggcggcatagaagtgctggcaaatacgattgaatttctttgcaaccatattgacgttgttttaccgttagtttctgcggctgcaaccgcctttgcagcactctccattgcaaagaacgccgcaacatggatacaaggcgctacgacagcatttcaagggctaatagcggcgatgtcgcttaatccgtttacgcttgcggtcgccggcgctgccgctttagtggctatccttgtgacagtagtcgctatgcaggaggatactgttacctctgcggagcgtttagccgaatcgcaggaaaatcttgcggaaagctgtcagggtgtatttgatcagtacggtgcttggtcggatgcagtaaaagccgcagacggctcgctggacgctttaacatccacaatgggcatcgcaaaggaccagcagcaggagctcgctgccgaaatggaatctgtgcaagcgcagatcacagcgattatgaaaacggcatcagacgaacgccgaggttatacggaggctgaaatccaaacgctgcaggatctgtttgcacagatgaggtcactatccgagcaggagctcgcgatacagcagtcttatcaagatgccgtgctaacgcaggcgagcaatttgctcgacgcagagaacatgaccgccgaatcatacacggaatacgctgcacgtattgcagcacaagccgagacgacacgcgacgcagttattaacagtgccagcgacaaatatacacaagccatcgcctacgccgaacaagaacgcgaagcggttttaaattccgaagcaggtaaaaacgaggaacaaaaagcgctggccgagcaagcgtatcaggacgcaataaacacggctgcaaaggaatatcaagcggctgtggacgcagcaaacgctaaatgcaacgacaccagtgagatcatcgcgcagggatatgccaaaaacgcagatctcgcacatgcgtggtcagaagaacaggcaatgattgccgcggaagaaaccgccaatgccaatgcctacaaacaggagcttatagacgtttaccaaaactatatcgatgaggtaaaccgcaaagggtacgaagaagtatcggacaaagataacctgcaaaaacaactgctggacatcgaggagcgatacaccgacagaatagcatccacaaataaccgccgagcggcaaatctggatgaagccacgcaaaagcaaatcgctacattgcttgagatggtggcggaatcgggcagcgcttacgatgatttggattcgacgacgcagcaaatggtcgatggcttcatggaaaacatcgatcgcctttcgccggaaaccaaagacagtttgaacgatacgctcaaaggtatgggcatgacgattgacagcaacggcaagcttttgtacaccagcggcgaaaagtcaggacaagaggtcgttagagggtggaaaagtaaaattccgtccatgcagtcggctgccgatgaagcaatcaaagagatcgatgccagaatgaaagccggtttggtttcttcaccgggtattcgtcctatcgaaggcacaggtaccgtagcggcaaacgcgcgaaatcagattcagtcatatttgaacaataaccctgtttatgtttccgtccgcacctctcatgcggcgggagggtactgggcgcggggcggcgttacgaagtatgcgcgcggcggtatgacgccggagatccacaagcacgcagcgggcgtattcacaaagcgcacgcggctgtgggacccggtgacgggcatcaacgaatacggcgaagccggacacgaagcgctgctaccgctcaaaacctcggtgtatgacgagattgcgaaaggtatcgtgcggcagctcagcccggcgaagctttccggcattgtggacatgctgcgcagcgccgtacgtgaacgcaatgagaccgttaccgtgcaggtgcaggagcggcgcgaccttcgcgcggcggagaaagcgacactgcacgaggaagacagcggcgttgaagaactgcgcgaggaagtagccgtgctcggcagccgcatggagcaggttttgacgttgttgaaagaattgctcggtacgtcgaaaagcggagcaaatgcactgctgcaagcgctgctcggtatgcgcatcgatcttgacggcgaagcggtcggcaggctgattgcgccggagatcaacgaacggctgaacgacttatacgaactggaagaaagggggcgcttttaaatgtggggactgacgatcaacgacaagcacacgttcgacgatttcgggctttgctgtctgagctgcacactggatccgccggagccgcggctttacaccatcgatattcccggtgctgacggtgtgctggatgcgaccgccgcacgcgggcgtgtgacctacaaaaaccgcacgctgacagcggaatttgactgcgtatatgaaagccgcacatcatacgatgcagcttgcgcggcactgaacacggcgcaccatggaaggcttgtggagctcctcacggacagcgacccccggcatgtgctcacgggacgggctgcgtgggagcatactgtagacggccttgccgccacgcacacgctgacggtcgattgccagccgtaccgcatggcgctgtttccaacggaaaaaacgtatgtcttgaccggcgaggagctgcccatagcgcttttgaacgcacagaaagccgtgattccggaatttgtgacggacgcagccggcatgaccgtgaaaacagcgtccggcacgcagtataccatcatgaagaccggaggctataccatcccggagatttatctcagcgagggcgtgaacacctttacgctgaacggcacgggcacgatgacgattcgttaccgcgagggggtgctgtgatatgtaccgcatcacctgtgacggtataacgctgtatgagcccgataaccccgttctgcagctcatctccggcacgctcaagaccggacagaacattgccggtacgctgacgtttgtactggcgccgacgcacccgtatttgtcccgcatcaaagcgcgcagcagcgttatttcggtgtacagggacggggcgttatatttccgcggttcaccgctcaacgtgacggagagcgacacggggcttgtgacggtcacagcagagggggcgctggcatggctcggcgactctgtgcagccgtttgccgaataccacaacatgacggtgcgcacatatcttgaaacgttggttcagaaccataatgtggctgtgcaagacgacgcgtacaaacagtttacggtcggcgaagtgaccgtgacggacagcaacgacagtttatatcggcactcgaattttgaacacaccaaagacgcgatcaccgagaagctgacaaagcgtctcggcggcattttgcgggtgcgctggaagaacggcgtgcagtatctcgactaccttgccgaatacaagcacgtgaacgggcagggcatcaagttcgggcagaaccttttgacgtatgcccgcagcgtgccgaccgcgaacctcgcaacggcgatcatcccgcttggctgcaagctgacggacgcagacggcaacgagacggacgagcgcctgcaaatcgacaacggcggcaaaaattacgtgtgggacgaaaaagccgtgcaggaattcggctggatcttcgacacgatcatctgcgacgatgtgacactgaaagaaaatctcagcaagcgcggctattcggagcttgaagcccgcaaggtgctgccgacgaccatcaagctgaccgccgtcgatttcggtgcgcttggcggcaattatgagcgcatcaccgtcggtgacctgctgcccatcgtgagcgccccgcataaccttgacacctacatgaccgtcgccgagatgacagagaaccttgtggacccgggcaaaagcacggtgatgctgaacaggacgtataaaacggtgacgagcggcatcgcgagcgtcaaaaaagagcttgggcaagagtttgaccttgtgaaaagcgatatgcagaagcgcacagacaaagtgcggcaggagctcaccgattacaaagtcgacgcgcggaaggacatggacagcatcacggcatcggtaacggagacgcgcaccgagctgacgaccaccaccgaaaacgtgtatgacgcgctgggacgtttacaagataccgcagtctcgacagaggagctcgaaagcgttaaacagctgctcatcacccaatggagcgatcagctcgaataccgctttacgcaggtgacaaatctcattgacagcacaaacggcacgatagcggaaaatcagcggcttttagagcagtatatccgctttgaaggggcgcgaattacgctcggccgcagcgacagcgccatacaggcggtgctctccaacgaccggctcgaatttgtcgaaaacggtcaaaccattgcgtatatctccaatcgtatgctttatatcacggatgcgcatatcacgggcagcttgtctttcggaaacgccgacacgggcttgtatacgtggcgttataacgcggaggccgacacgtttgatcttgagtttgagggggacgactgatgggcaaaaacagctataaagcccagcttaactattatgacaataagtggggctggaaaagcgagggcaccgcctcgcagggccagtgggacggcacaggtgtgcgcaccggcgtactgtattttccgggccttgcagcgctcaagggcaagatcatcaacagcgtaaagctcaccgcgacgaccggacagacgggctacggcacagcgaccaccaaaacggtatacatctacaactccgcctcgcagggcggcattaaaacctcgctcaacgcagggcaccgcacaggcaatgcgctcggcagctgtaaagcgcccatgtgggataataccaaaacgtttgatgttgctttcatggcggcatctatcgccgccgggtacgatacgtactgcatctacaatggcaactcttacacggattatctcaaatggacggctgtaacgcttgaggtggattggcaagagcccgcaacacagccgagtttgagcgccgcaaccgtagaaatgggcaagagcgtgacgatcaacacgcctgcggtaaacaacgcctacaggcacacactgcgctactcgttcggcagcgcatccggaacgattgccacgggcattgcaagcagcgtgagctggacgctgccagtgtcgctcgcaaatcaaataccgtccgccacgacgggcagcggtacaatctattgcgatacatattccggcagcacgctcctcggcacgaagtccgtaagcatcacgctcaccgtccccggcagcgtagttccgtcggcgggcacgctttcggcaacgctcgccgaagacacaagcggcacgggtctatatgtaaaaggcatgggcaaagcaaagctgacgctttccggagcatccggcgcatacggcagcagcatcacctcgtacacgattaccggcggcggatggactaccacaaacagcgcgcttacgaccggcacactggcctcggcgggcaacatcacattcacggccacggtgacggattcgcgcggccgaaaagccagcactacgcgcacaatcagcgtcatagactacacaaagcccggcgtagcggtgtgtgacgtgtaccgctgcgatgcagacggcaaccgcaaaaaggcaggcacctattttgccgtggagatcaacgcgagttacagcgcaatcaccggcaacatcttgaacattacagctcgatacaaaaagcagtccgagagcagttacggcaccgcgatgaacgttaccaacaacggtaaaaccgtgatcggcggcggaagtataggcgcgtccaccacctacgacgtgctcgtgacggtggcggacaagtataacagcttacttatccagcgcactctgtctacaaaaagtgtgctgcaatctttcaagcgcagcgcaggggcggccatcggcaaagtggccgagctcgcgaactggctggacgtggcgtgggatacgcggattaggggtaatttacaggtggacggcacaatctcatcagcagatcaataccgcatcaagtggcagactatcccagacggtgccgaccttaacgacgatgcgtacaaaatatcggggcattatcgttccccgttggggtccaataccatcttaaacgcccctccgtgggtaaaaggcgcatttgagatggtcgtgaccggcattgctgatggaacttattgcacacaaaccgtgaaggattatagagacaactatacatatgtgcgaacacagagtaattggacgacgccatgggtctggtccgattggacgtggcaccttattcccgccgatttgaaaagctatgcacaactgcaaagtccgaacaatctaatacacgcaggaaacgagttcacgtttgtggcaccacaatttagcaacgatatttggctcaattaccgcacgtcaagtggaaataccgatggtaatatcgggacgtatctgtttggcaacggcaaaggtggacttgcaccaatcaaagccagtggcatttatgccgacacgctcggatggaaaacgttgtggagcggcaagctcacgtctggcagcatcacaatcacaggcgctaaaaagtacgcagctatcctcgtgagcgggcatccgggtagcgaggcgtatcgcacgcacatttgcttgcccaccggcggtattgacggccagatggtaacaaatatggtgtacatgtattttgttaccacatacagcggagatgactgcacgataacgctaaaaagcaatcccagcaacggcaatatagattacgtctggggcattgtgcaatggaaggggtaaaccaatgcagataatcttaaacgatcagggctatatcgagagttatgcgctcatcggcgggcttgtagacggcatcgagatagaggcgcccgacgagctgttggaggactttaagcagcacccggaggcgtacaagcttgaagacggtgtgctcgtgctggatgcagataagctcaaggccgacgcggatgcggcggagctaaccgtcattcggcggcgacgcgaaaccgagtgctttgcgtatatcaatcgcggcgagctgtggtatagcctactcacagacgagcaaaaagccgagcttgcaaactggtatctctcttggctcgatgcgccggagacgcggacaatccccgcaccgccggtgtggctggataaactttaagcaacaataaaaggaggaaaataaatgaacaaagcaactgtacttaaatccgtaacggcagtcgttggggcgggggtcgcggcatactgcgggcagctggccgcgccggtgctcgtgctgctgtgcatgatggtgatcgattacgtcaccggcatggtcaaagcttacatgacggcgcagctcagctcgcgcatcggcatcaagggcatcctgaagaagctctgctacatggcgatggtggcggtaggcgcgggtgtggattatctgctgcgcggcgccctggtgcaggcgggcatcgacctgcacatcaagcttttctgcggcctgctggtcgcgatctggctcatcatcaacgagctgatctcgattctggagaaccttgctaccatcggcgtgccggggtttccgcggctgtctaaactgttggagagattgaagaacaccgtaagtaaaggagataatgcagatgaaaaataatcatgaaatcatcctcaaacaatacgccgcgtactgcaaggagcaacccttatatcttggcacggcgggcagctacggcatggagatgctgacgatcattcgcgagggtgtttgggcggagtacgatattttagcggcgtttcacccgccggtcggggctgcggcgcacagcccatccctgcgttaagcggcacaaacaccctgcttaccgacgccgacagcgtaagtgtatccggccgcgccgacctaattcgcatcataagaaaaatgcaagaaaaatgaaaaggagaataaaaatggtaccaatccgcgaaaatcttttgagcaagcgtaaatatgacctaaaagtgccggtggagtcctgcgcaaaggacataaaatatatcgtcgtgcacaacacggcgaacgatgcttccgccgcgaatgaagtcgcgtatatgattcgcaacgacagctctacgtcgtttaacgcggcggtcgatgacaaggaaatcgtcattggtatcccgctgaacagaggtgcgtttgcggcagggcagcgcgacggcaacgcgcacggcatccacattgaaatttgctattcgctttcgggcgggacacgcttcgacaaagccgaaaagaacgccgcagagtatatcgcaaagctgcttaccgagcgcaagtgggatatttcgcacgtgaagaagcatcaggacttcgatggtaaatattgtccgcaccgcacgctcgacaaaggctggcagcgctttttgaacatggtgaaaagctacatgacggcgagcacaccagcagcatccacacctgcatccggcaccctcaagccgtacctcatccgcaaaaactgccgtgacccgctgaatatccgcaagggtccgggcacaaactacggcgtgcagggccagatcaagaacacgctgcgctatacgattgttgaggagcgcagcggccccggctccgccaagggctggggtcgtctcaaagccggcggctggattgcactcgactgggtgaagaaggtctaaaagtaaatacataaagcaaaaggcgcagggctaccgggatttccgagcgggctctgcgcctttttttattttcagaaaaccgcgccccgggtcggaaggacttgacgtggggcgcttgacagatttacaagtgcattatgtaaagccaataaagaaatatcaggaaaatcttgaacaggcctgcaaaaatctgctatgatatgtcaaaagagggggtagctatgacaaaagagcagattagaacaaaatttgaccgttgggctgaacgtgtagggcacacgccgcttgaaaatgacctcgacaacgcgacgcttttgctttcatacgacgacaagcaaacaagtacaacgctttcgaccgtggcggtctatgccgtcgccgtacataccgaccatgtgcatgtgttcttgttttctgtgcgtaccgcttggcagcttgatgagcggggcaataccggcgaagtgcttgatgagaggtatcgggttattgtggcgttttaacctaccctatagcttgcatctcgttattctgaacaggaatcgtaaatgcgcatggcatctatgcagacggcttcttttaacgctgcgccgttttcgcaatcgggtgtccgctcattttcagccatatttgtaaacctcctttgtggtttctcaatgccattgtacggaaaagggcgggtattgtgcctgtcccgccgctttgctcggttttttcgcattgtaagaaatttttcggttgtatatttcgccgcagtttgctataatgaataggaatgtaccgcgctgcggtgcaaaaagtcggcaaaggccggcaaatttacgcagaaagcagtaaatgaaacttatggcattgattgtaattgaaggtctggacggcagcggcaaaggcacgcaggcaaagcttttgtatgattacgccttatcgcgcggctgcgcacggcagataacgttcccagattatgactctccgtcttcgtcgcttgtaaaaatgtatctgaaaggcgatttcggaaaagaggcgggagacgtgaacgcctacgccgcaagcgcattttacgccgtggatcgctttgcaagctaccgcatgaagtggaaagacgattatgcaagtggtgtgccgatcatctccgaccgctatgtgacgtccaacattgtatatcaattaagtaagctgccaaaaacggagtggaaagcgttcgtttcgtggcttgaagacctggaatatgaaaaattcgggctgccgaggccggatcgtgtgattta

SEQ ID NO: 259 - DNA, 6658 bp, Unknown
  16S sequences of unknown bacteria
gcggaatcgaatacggctatgtatcggaaggaaacagcatgacggacgtgtcaaagattgttcctccgctccgtcccgctgtcagaaaagcaacggaagcagacactgcgaaatacgaggaaaacaagcgtcttgaagccgaagcgttcgacatctgcaagcagaaaatagctgaacacaagctcggcatgaagctcataagcgcggaatacaccctcgacaacagcaagcttttgttctactactccgccgaaatacgggtagacttccgtgagcttgtgaaggatctcgcctccgttttccgcacaagaatagagctgagacagataggaatccgcgacgaagcgaaaatgctcggcgggctcggcgtatgcggtcagcctctctgctgctcacgcttcctctcggactttgttcaggtttcaatcaaaatggcgaaggagcagaatctatcgctcaattcgtcgaaaatatccggcgcttgcggtcgtctgatgtgctgcctgagatacgagcacgacacatacgaggctgagatagcgaaaaccccgccggtcgactccaccgtaaaaacttcggacggagttggcgttgtcaccgaaataagtcctctccagggtactataaaagtaaagctgcccgacggaaacataaagcagtataacagaggagacgtcatcagagtaaagacagtctcgaaggaagagtgccaaaacgcggaaaaataattcatctcttccattaaacggaagtttaccggaaatttaatataccgaaacaaaaaaatttcaaaaaattttgtaaaaagctatttaatttgtcccgaatatgtgttagaataggcatatctcaaacagggaggtttattaaaatggcatacaaaatttctgacgattgcatcggctgcggcacttgcgcttccgaatgtcctgtagaagctatttccgaaaaggacggcaagtacgttatcaacgctgacgaatgtcttgaatgcggcgcttgtgcaggcgtatgtcctgttgacgctccgaagcccgaagaataatcctacataggttatctccgcggcaagcggctgaataaagtcgccggctacagcataacataatcggaaaagtgggagacggcgtatatcgtttgtctcctattttcatgcgcatatttacgtgaaaggttttcactctcatgacagagaatactctatataacagcgaaacggaaaaaatcgacgaaataaacgagcggctgtcgcttattcagttaaaacgcgggcttaccttcggaacggacagctattttctcgcagcattcgcacgcagcagaaaaaacggcgtttgcgtcgagcttggcggcggaacgggagttgtctcgcttctcatggcgtcgcggatgaaatataaaaggatatattccgtcgagattcaggagtattttgcatcgcttatcagccgaaacgcgcgtcttaacaaactcgagggcagcattattccactgtgccgtgacatacgcgagctgacaaaggacgacgtcggcggggaatgcgactccgttgtgtcaaatccgccgtatatgaaagccgaatcgggaaagcagaacgacgctaccgagatgaacacggcaaggcgggaagaaaacggcgggatagacgaattttgttcatgtgccgcacgactgctgaaattcggcggatattttacagttgtctatcgtcctgagcgtatggcggagctgttttattcaatgaagcagagcggtatcgagccgaagagagccgtcatgctgtacccgtccgtcaagtcaaagccgtgcctcatcttaatcgagggcaagaaaggcgcatctgagggactaatatttgcccgtccgctgataatctacaagcacggacacggcggagagtattccgaggatatgcagtcggtatacgataatttttcgctcgagcatttattcggataaaaatcggaggtaaaaatgagctgcagaaaaaaaagaaacttttcttctgaggacaaaaatgcggtcatcggaggtgtgctctaccttgtcgcaacgcctatcggaaacctctccgacttatccgagcgcgcactgaaggtactctccgacgtcgacttcatagcggctgaggacacgcgcaacacaggctccatgctcgcgagatttgagatatcgaagcccatgataagctatttcgagcataacaagcgtgaacgcggggagataatagcggacagacttgaaagcggtgaatcgtgtgctcttgtcaccgacgcgggaactccggcaataagcgacccgggagaggacatagtaagactgtgcgccgagcgtggcattcccgtgagcagtattcccggatgctgtgccgccgttaccgcgcttactttatcgggacttccgacctcgcgttttgcttttgaaggatttctctccacggcgaaaagtgagcgtgacgaacgtctgacggagctgcagagcgaagtacgcaccatgatattctacgaagctccgcacaagctgaaaaacactctcgccgacttatataagtatttcggagacaggaagatatcgctgtgccgcgagcttacaaagataaacgaagaggtctgccgcaccacaatctccgaggcgataaaaatatatgaagaaaaagatccgcgcggtgaatatgttcttgttgtaggcggcgcggtcaaaaagaaaacacaggaagaataccctgccgatcccgtggagcacgttaaagctcttatggacagcggcatgaagaaaatggaagcggtgaagacagccgcaaagctgcgcggagaggacaagaacgacatatacaagctcgtcctcgacttataatacaaaaaacaaataatataggctgcttcggcggcggaaaggtatgataattatgaaaatcggtcttacaagctacagcatgaacaactacatctgcggaggactcatgtccgttaccgaggtaatgcgctttgcaaaggaaaagggagcggagcacatcgagcttgttcctttcggattcactctgcacgacgataagacaggcgagttcaacgaacccctcatcaaggaaatacttgatacctcaaaggagcttgaccttcccatctcaaactacgcggttctcggcgaccttctcaaagaggacaaggacgaaagacgcgccgaggttgaaagactcaagagacacatcgacgttgccgcaaagctcggtctgaaatatatgcgccacgacatctcctcattccgccgtcctcttgaatcgaacactcccattgcctttgagcgtgaattccccatcgccgtggaatgctgccgcgagcttgccgactatgcttctaacttcggtatcactacgctcgtagaaaaccacggcttcttcgtaaacggctccgacagagttatccgtctcattaacgccgttgagagagaaaacttcggacttcttctcgacaccggcaacttcatctgcgtggatgaaaacacagccgtcgccgtaaagaagtgcgcgcctatcgcaaagatggtacaccttaaggacttctacatcagaagagcagacaagctcacaggaaacggcggtcttttcagatgcgactccggctgctggttctcctcaaactccggcgaatatatgctccgcggctccatcctcgcacagggcgaccttgacgtatggagcacgctcaaattcatccgcgacgcgggctacgacggctatgtttcggttgaattcgagggcatggaggacggcaaaatcggcagtgagaccggtatggaagccgcaagatacattctcgcaaacgcataaattattttaagccgagggaaaattatgacgcctaatgttttgttcatcgtactcgaccagctgaggtatgactcgataggatattccgcaaaatttaccggcagaaaagctccgctgacaccgaatattgactctctcgcaagtgagggaatgttcatgaagaacgcctacacccctcttccggtatgcgctccctctcgtcaggctatgctcacgggagttcagccggattcgataggcgcactgttcaactacaatttcataaagaccgcgggagctgatcccaccgttcccacatgggtatcggaacttaaggacagcggatacaaatgcgcattctccggtcactgggacgcgtctccgaacggaaatgaatgcgacttcggatatgaatccattttcgacggcggcgcgtacaaccgtgaaatcgccgaaaaatacggcagcatagagtacggcggaggctggttcggctgctcaaatccgctgtcccacgaggacacaaagccctaccgcatatgctccgccgcggctgacttcatccgtgagaacgcgtcctcgccatggcacgtctgggttgacataaccgaccctcacctgccctgccgtccgagcgcaccgtttgacacaatgtattctcccgacgagatggaaccgtgggacggattcggcgacacatttgagaacaagccatacatccagaaaaagcaaatcgaaaactggcatcttgaggggctgaaatggaaagactttgctccgactgccgcgcggtatttcggtatgataagccagacggacgcttccctcggactgattctcgacgagctgaagaagacgggacagtacgacaacacgctgataatacttctctccgaccacggtgacacatgcggaagccacggaatgctcgacaagcactacattctctatgacgacgttgttcatgtgccgatgatagtgcgcggaccgggtattcctcacagagacgttgacgcttttgtttcgtcctcacttgacgttgctccgactgtggaaaagctcgtcggacttgaagcaaagagcgcacgccacggaaaagctgtcacggaagaggacggagactttgccgtattcacctcaaacggtcagcagttcggcttgttcactcagcgcggaatcaggacaaaggactacaaatacatctggaaccttaccgacacggacgagttctatgttctcaccgacgaccccggagagcttgtcaaccgcgccgcctgccccgaatacaaggatgtcatgaaatccctcggagaagtgcttatcgctgagctgaaacgaagaggagatccgtttgcctcgggctgggtagcttggcaatgcgggcgcggagaatgacttatcgcgtgagaagaacatagttttttgagattttttgaacgcaactgtcgcattcttggtaaattttcacttattatgcagctttttgagcttatttactgttgattcagcatatcagaaacgtcttgtaaaagggacgtttttctgttataatttgatgagcggtttgaaacaatatattcgccgcctaagaatactctgaataaatcggatttttgtgataaaagtctaaaatatagggacttttgtcgcaaaaataaccttatatcagaggattattaactaaaatgcaaaggagtaccgcccggaaatgaaagctttatttaaaaacggttatatctacatctatgaatcacgaatgttccgccgttctgatgtgcttgtcgaagacggaacaataaaaggcgtttttgagccgggtgaggtgctcgaatacgacaaagaaatcgacctcgccggaaaatatctcataccggggcttgtcgacattcacactcacggcaggggcggtcacgacttcaacttcattgacgacaaagccgtagctttgatgcgacgctcatacgccgaggcaggaacaacgaccgttatggctaccctcgcttccgcggagcttaacgagctttatcattcggctgaggttatcggaagacaccgcacgtcggacaagggtcttgcaactctcgcgggaattcatcttgagggaagatatctcaatccgaagagacgcggcgcacacaatcccgaccttctcgctccccttgaccccgatgagcttgaaaaactcgccggagctatgatgccgctccctctgcacgtctccgccgcttttgagcttgacgaagggtacaaattccttgaccgtgcagtaaaactcggtgcgacctgctctcttgctcacagcgacgcgacatatgacgaagctgtaggggcagtagcgcacggagtaaaatcattcacacacacatacaacgcaatgcgtcccatccaccacagagaacccggaaacatgatagcttcccttctctcggacgacgcgtattccgaatttatctgcgacggcgagcattctcatcccgctatgatagagcttgcttaccgcgcgaagaatcacgacaaaattgtgcttatcaccgactcgcttgaagccgcaggatgccccgacggagaatactctatagcgggacttccggtatatgtcaaaaacggacgtgcggtcaacagtgaaggcgcactcgcgggaagcacactcgacctattcaccgccgtaaagaacttcatgcgcttcacgggagcaacacttgaagagacgattccgatggctactgcaaatcctgcgacgcttatcggaatagacggcaaatgcggatttataaaaaccggatgccgcgccgactttatcacggttgacgacaaagagaacataactctcagtgacgtctacatcggcggggggaa

SEQ ID NO: 260 - DNA, 15137 bp, Unknown
  16S sequences of unknown bacteria
tttgtgtaatattcatatggaagtgcataaatatatgattcaggaggcattgtctgatggaacgccgtatcaaatacacctaccatcggagtattcggcatcagctgttcgcaggcatcgataccgagaaggttaggcggattgtgaagcggcgcaagctctatacattctgtaagagctctttttacatcctctgtaatgagaacggaggatgcaaacttttcacctgcatgcactactctgtgacctacagctccgatttcatccatcgacttaacaacaccgtgctcgctgtcgataacagcatcgagtacatgccctattgcttccttatggctcttcatcggagtctcaagcttaaacttgtccattccgattttttcatgtgtaataacggaaccatccattccgattctttctacaagacctttgcagagaagtacttccgttgtcatatcaagcacctgatatttcaatgaagaactgccgcagttgattaccaaaactttcattttatttatatcctccataaattttataataaccctaatattatcattatacttgaatccagcggtttttcaagagaaaaagaaaaaatttgcatttacttttgaaaataaggcattcttacatagtctgaataatcgtaaatcacctttccgcatatcagattgtaaacgtcagcagcgattaagtcatatgataaaagcatcctgtccgtttctttttcgagcctgtctttgtttacattggttataatgggaattttacatttaccgctttttttgatttcctttaagaaacgtgcacctttctcggaaaatccgagcacgcggccatacatagcaccttctccgtctatgatttcaaaatcgcttttcgtaagtccgattgcgagttgtgccaaaatgcggcgcatgcgcgtttctgtatagcgtttagatacagcggaagaaacgagcgtgtccatatcagatgacatgcgcgccgcttctataagcctgttttctataccttcactcactgctaagatctctgcaattgcagaaggcggtgaagttataatcttatacagcacaagttcgtaaaatttattaaatattaagttaatatcgccatcaaatgatttcaaaatctctattgtgctttcgggaacaaacggctctatacgagtaaaattaagattttccgcaagtgcagcgcgaattgccgaggcacttgatatattggttttattctgttcggtgtagattttgtcaggaagtctttgcacaagaaattcagcgctgcttccgcccgttctcttcacagttataggttttattgctgaatttgtgcgcataagctgtttcaggtattctatagataaaatgttattagagctttttaaaaagtcgttttgcgcatcgtccgccgcgcttttttcatccaaaaaaacagataaagccttcgcacgggctttagggtacgagatacctgtgcgaaggttttctttaagcgcgcttttaaactcagcgttttcgtctgcgagtattcctgcaataaaggacagtctttcgatacagccttcttcgcttccaaaagagatgaaatcgattaagccgagtccgtttaaaaggcgaactgctcctttggcaaaatattcagcgctgttgacagcataggcaaacggcaactcaaagacaatgtcgaccccgccttttaatgccatctcagcccgcgtccatttatcggcacaagacggctctcctctctgcgtaaaattaccgctcattacagcgacggcaacatcagcacctgtaagttcaaggctcttttcaagatgatatttatgaccgttgtgaaacggattgtattcagctattattcctactgcagtcatttcttttgttcccgcgcttcctattttttatcttaattatttaaagtttttgccgagttctcggaaataatccattttttcttgattatctgcgatctcatcctttccgtatgccgaatatttttctgcaaatacaactttccagtcgaggtatttagctatcgaatcaaactgctttgagatgagctcgtactggatattgctcgtgtcatcgccgccgattattacatagcctatcttcttatcgccgagtttgccctcgctcttggagtacattctgtcaagcactattttgagctgtgcggtcataccccaccagtatacaggcgtgccgaatatgagtatatcggcttcataaagcttttcaattatatcgtttccatcgtcaccgataatgcagctgccgccgttgcctttgcaggcatcgcagcccatacacggagcgatattcatttcctgtaatcttatattttctacttcaagtccgtttattgtttcgaggccttcttctatcgccccaagcgcagcgaaaatatttccttttcttggacttccgttaagcaaaagtgccttcataatatcccctcctatgaatttgttcgttgataaataattttaccactaaattttacaaaagtcaaaaaatacaatattacaaattaaagtgtgataaaatgcagcaaaaccgaggcaattaaggctgctgaaaatccgtgacaaagcttaaccgatataaaatacggagtgccgacaccgcttcccgcaagcatcgaaagcgactgacctattacggaaataccaccgaaagatacgagaaatgatgcgagcacagttttaaaattgaggctgatgagagttttgctcactgctgagcaacctaccgtcatttcaaaaagacctttgaacacggctttggcatacggctcgtgaaatatgttcaaaataccggaaaactgcacgagatcagttataaacataaacatcacgatatatgaaagcactattcccagcgatttaagggcgccgaggatggaatctgtgaaaagtgaaaatatatcctgctgcgagcttttaaatttagatgaagtggatgcttttgcgcctgattttctgtattctttaagattgcgcactgttttgcctttagctctggaaaatggcagcaaacgcagcgctccgcagaacaaagcaccggtcataagcgctcctgcatagtgtgatagcgcaattataatgcccgcttcatgcgaaccgagcattcccgttcctacagctccgagaagaaaagtcgggcctgatgtgctgcaaaagcttatgagccggcgagctgtatataggtcaatctcaccgcgtctcaccatatcgccgataattctcgctcccataggatagccggcgagaacactcatcgtaaatacaaaaagcccgcgggggagatattcggttattcccagcgaattcataaatcccacgcatatgaaaaaaggaagcagcgccggaagaatacttccagcccaaagcactatgcctttctgagctgaaagcagtgctatatcgggaagcacaaccataaatatacacccggcaagtgcggcaaaaagcgctatatttgtatgttttgtccgtccattaaaaatatccatagtagataatattcatctgctatggatatatgaaaacatatttgtactttaattaaaggtcttcgttctgcactttaaacgccatatccttaatttcttctctgttagcggcaagcgtggcgttaatgccgccgaatgtgctttcaagtttttcaaacatttcctgaaaatacgtaacgttaagctgttccattttatcctgaaaattgtaaagaatgctgtcgacatagtcgaatgtactcatcttgagctgtttgcagttcgcttcagcgatgctcataatctcttctgcgcgcctcttagcctttaccgtgatatcatcgttttctatgagtgcctctgcctgcttctgtgcgtcgcggataacagtatcgtattcgcgcttggcttcgtcgagaattcgctgcctttcatctttaatccactgagcctgctgaatttcatcaggaagctccactcttatttcctttacgatctcaagtatttcttctgcgtctaccataatctttcctgttagtggaaatcctgccgcagtatcgactatttcttcaatttcgtcaagtaattcgagtaccttcatcttttttcctccctaatcgttttctccttcatataacgcattacagtctgcggaacatactttgcaatatcagcgttaaaagcataaagctctctcactgcgcttgaacttatgaacgaatacttcggattcgtcataagaaaaatcgtttctgtatttccgctgtaaagccctgcatttacctgcgccatctgtatttcatattcgaagtcggtcgtcgccctaaggccgcgtacaacaatatcgaatttattttcgtttacatagtttgcgagcagacccgaaaacgaatccacgcttacatttgttatgtgagatactgtttcttttatggtgtttacgcgttcttcaagtgtaaaaaacggctccttatacaaattgtaaattacacctacaatgagctcatcacatattttagaagctctttctattatatcgagatgtccgtatgtcataggatcaaatgagccggcatataaggctttttttgtcatcagtcaagttcctccgataaatactgataataattttatcaaatttaaataaaaatatcaactatatatgctgataatgatttttccgtattttctttcttttatcttggaaaagcctgagatttcatcaggaagcctttcgtctttgccgtgctccgctatgatgagaccgccctccgctaaaagatcgtgttctgaaatgagataaatgcagtcttccataaggccgtccctgtaaggagggtcgagaaaaaatatatcggctttttcatttattgatgcgagaactttttgatattctcctgctatgactatggatttctcctgcgtaccgcacatatttatattttttctgacaagagcaatgctttctctgctcttgtctccgaagtagcagcgagatgctccgcgcgacagcgcttcaagcccaagattaccggtaccggcgaataaatccacacacacagcaccgggaaggtcgaaggctataattgaaaatatggcttctttaaccttatccgtcgtcggccgtatgctgttatcctttggcgattcgaggcgcctgcctttatattctcccgtgataatgcgcataatttcctccgcaataaattcataaagcaacgatttgccgcaataaagtgtaacatatttttggcttgtacacaagatttatgcaatatgaatttatttaatatatttattataccattaaaagcgaaaaagaaaaagcctgcaaaaccacttgcagactttctctcactatccaaattttcttatctacctgataactgctgttcagccatctcgactaacttcttagtcatatagccgcctacataaccattctgtcttgcactgagatttcccttatccatagtgtcatagtttgcaagaccgagttcgttggcaatttcagttttaagattctttaatgctggcttagcattagtgttcatcttgtcctgtaatgtcatttctttctcacctcctgttacgttattattgttgtcctgaggcaaaaaagtattctttgaaataattagcatctcctgccttgttttggcaccttcagctacatttttaaatcaagatttgatttaaatgttttaattatcctttctctcagaggcgcatactttgcgctttcaagcagcggatcttcagcaatcactgccagagcctcttccttaacggtttcgagcatatctatatgcttgacaagattggcgattttaagatctggtacaccgtgctgtctcgtaccgaaaaattcgccgggacctctgatttcaagatccttttctgcaataacaaagccatcagccgtgctgaccataatttccgcgcgctgtgccgccacctccgtctcactatcatttatgagaatgcagtaagatttataattgccgcgtccgacgcggcctctaagctgatgaagctgcgcgagcccaaagcgttccgaattttctatgaccataacggaagcgttctgaacatttattcccacttctattactacagtagatacgagaatatcgattttgcctgccgcaaagcgctccattatatcgtctttttccttctgcttcatattaccgtgaagaagcgcaaccgtatatccgcggaaaagccgcaaaagctcactgtatattgattctgccgagcgcacgtttatggcatccgaatcctcgattagaggtgccacgacataggcctgccggcctttatctatctgtccttttacaaaacggtaagcgtcgatgcgtttatccttaccgatagcctttgtcgtaattgcctgccgtcccggcggcagctcatctattactgaaatatcgaggtcgccgtagagtataacggccagcgtgcgcggaataggcgtagccgtcattaccatttgatccggatttttacctttctgtccgagcagtgtcctgtggtttacgccgaaccggtgctgttcatccgttattacaaggccgagctttttaaaatgaacatcgggctgaataatggcgtgagtgccgattatgacatcaaattctcccgattctatcatcttaagggtttctgtgcgctgcgcttttgttacgctgcccgaaagaaatccggtattgatgccaaaatgcgcaaaacgcttttttatattttcaaaatgctgccttgcaagtatttccgtcggtgccatcaaaaccgcctgaaagccgcatttaacggccttgtacatagctatttcagcaacgactgtttttccggagcctacatcgccttgcacgaggcggctcatggcgttttcgctttccatatctgtcattatttcacggactgcattttgctgcgcgcgtgtaagcgggtatggcagtgaatttatataatcatccacttttatttttttatcaaacgctatacctttattcttgccggcaccgccattttttatagcaaaaagtccggtttgcaagcatagcatttcgtcgaatacgagtctgtatctcgcttccttgaatttctgctcatcctgcggaaaatgaatgtttgaaagcgcataggagtatgaacaaagattgttgcgcgcaattatctctggcggcaaaaattctttaacattttccgcatatttacttgcgctgcgctgccatttcctcatttcgttttgacttatgccatcagtcagcggatacacgggaatgataccgcgaagcgcatcacttgcagcaagagagaattcgggatgcgtcatctgcagcctgtttccatagcctgaggatgcgcgcccgtaaaacagatattcctcgcccgctttaaaagcgtttgccataaatccggcgttaaaaaaaacgatttccatacggccgctgccatcgtccgctgttattttaagcgtttttttcttaccatatccgaatttattgttcactatatttatcacatacgcacggacaagatatgtatttcccggcacgagatttgctatgggcgtaataaaacgcctgtcctgataacttctcggatagtaattgatgagatcggaaacggtttctatatcgagttttttgagaagttcggattttttttgacctattccttttatttccgtaacgctgctctcaaaattcattgttttttaacctcaatgtttctttttccagcattttttgaaaatacaccttttattacgactgatatctcagcacaatcgctccctataagctcctctaaacggcgatttacaagctcaataagctgatttgtcgtctgcttaatacctgcgccaaagcgtacgagcacatagacttttattttagttttactgccaagtctgtctatatcgaggaaatagacactcatactgtctattggactcactttgcctttagcgttgcagagaacgagcctgccgtcaaatgcctttacggcatcggcaactatatttgcaagaacactcttaccgaccgatattgttcctatttcattttttttgtcatacattatatttactctcattattagtaagttttaaaaatctataagctttcatcattatatattttagcacacgaaaaaatattttaaaacaattttcaatacttagcatattataaacggggtgatttattatgggaaagaactgcaagccaaaaaaaacgggctgtgattataaaaaatttaaagaaatgggtttcgtgctcatcgtattcggtcttataacaatatgcgcctttttcctgccggtacaagcgtggatagtgcttctcggtattgtcttcatagtttgcggcgtgaagctcctgagatgagcaattaaatgcttgaatacgcaaaccaaaaagtatataataataaaaagaaatgtgacacttactattttaacacatactatcgcaaaggaaggtatctatgaaagatattgagaataagacaaataccggcaaagatctttatgagggctgcgatgaaagctgctttctctacaccctcagtctcatcggcggcaaatggaagatgataatactttatgctattcacagaaacggtactatacgctacaatgcactgcaaagatctatcggtaatataacatacaagactctgagcgttcagcttaaagagcttgaagccgatggtctcataacaagaaaggaatactcacagataccgcctaaagtggagtacagcctttcggaaaaaggccgctcgctcatcccaattatggacgtgctctgcatttggggatataatcacagaccgaagccgtccgatttataacatattaaaaaattcaaaaacgaacgctgtatacattccaatcgttcgtttttatttttaaaagcaacaaaaaataaaacagcggtatccttaaagataccgctttagtcagcatatttactgttaaatggcacggtttattttatttgatcttaagcatcttgtacaaacattagcttttcttactgtgccgttagcttcctttactcttacagtctgaatattagcgttccattttcttctcgtatgtctgtttgagtgagaaacagtgtttcctgaaacctgacctttaccgcaaatttcacattttcttgacatttaccgcacctcctttattatcgtaagcatttagcatttattctctatcaattcgattttacccgaacaaacgtcattatatcataaacgttcttatctgcgcaagtatttttttacagtatcggcaaaatatctgaaaaaatcaaaaactaaggctctaattattcgtcataaagtacaatcgcgccgcgctttcgtgttttattcatatctataaagcgttgattactgctgccgcggaaaagaagagaaaggtctctttcagcaagcacaaatctgccgtctataagataatctgtgagctcaagaagcttttccgcatactcatcttccttcgatatctcaagaagctcttcataggtatatcccgtatatatgagtatgttcaaatcgtttcttttttcttttatcttctttgcaagcagataaaaaccttcggtttgaaacatcggatcgccgcctgtaaatgtaacaccgtcgagcagtggatttttgaggatttcctccactatcttatcaatatcgcagtcgtagccacctttaaaatcgtgcgtctccggattgtggcagccctcacagttgtgtctgcagccctgactgaaaatcgaaaatctgatgccagggccgtcgactatagactcccggtatacgcccgctattcttattgtttttgcttcactttcgttcattgtaaaactcctttgagttctcacgcatcaggctttaaaatcttaaatttcttcgcgcacaccgtgctttacgcgatcggcttcctctgctgttttcgcgctgttccagtgatccatagtacctacaagatatcccgttattctccttattctctcaaagccttcaccatcttcaaactcttttctgccgcagtgcggacattcgttatcgataatgcctgtaaatccgcataccggatccctgtcaaccgggtggttaatggatccgtatccgattcccgattctttcatgcatcttacgattttttcaaaagcatcgaggtttttaagcggatcgccgtcaagctctacatatgagatgtggccggcatttgtaagcgcatgatacggcgcttccagtttaattttgtcaaacgctccgatattgtaatatacaggaatatggaagctatttgtataataatctctgtccgttacgccttctattataccgtatttttgcttgtctatcctcacgaatctgcccgaaaggccttcagcaggagttgccaaaagtgtccagttaagtcctgtttccttggatttatcatccattctttttctcatgtagcctataatttcaagaccgagcgtctgcgcctcttttgactcgccgtggtgccttccgataagtgctttaagacattctgcaaggccgataaagccaatcgagagcgtaccgtgcttgattatctcttcgatagtatcgtcaggtccgagcttgtctgaatcaatccatacgccctgtcccataagaaatggaaagtttctcactttctttgccgcctgtattctgtatctctcgtaaagctgatccatcgcgagatctatcatcctgtcgaggttttcaaagaatatctcaagatttccattggattttatggctatgcgaggcagatttatggatgtaaagctgagatttcctctgccggagacaacttgcctctcaggatcgtatacattgccaattacacgtgtgcggcatcccatatacgcaacttccgtatcgtagtctccctctttataatattgaaggttgaacggcgcgtcaataaacgagaagttcgggaaaagacgttttgccgaaaccttgcaggcaagcttaaagagatcgtagttcgggtctcctggattgtagcttatgccttcctttactttgaatatctgtatcggaaatataggtgtttcgccgtttccgagacctgcttccgtagcgagcattacgctctccatcacgagtcttccttcgggcgatgtgtcggtaccgtaatttatcgagctgaaaggcacctgtgcgccggctcttgagtgcattgtgttcaaattatgcacgagtgcttccatagcctgataagtttttcttcttatttctttatcggcaaattttgtcgctctgtcctgcatgcgaagcgcgtcttcttctgaaacgagctttttaagctcttcgagctcaagctctttataattgttatcccacgccatacatggacatactccgtgctcttcttctatctttttaccgaattcttttacaatatcggctccgttttctatatcgtgcagaaaatcaagcatttttccgagatttgtccagtaaagctttttgtatgtctttcttacgccgggtgccattccgtaatcaaagttaggtacggactgacctccgtgctggtcgttctgattggactggatggcaatgcaggcgagcgctgaatagctttcgatatcgttaggttctctcagatggccgtgtccggtagaaaagcctccctttaagagctttacaaggtctatctggcagcaagtcatcgtaagcgtgagaaaatccaggtcgtgaatatgaatgtcgccttcttcgtgtgcctttgagtgcgccgggtttaagacatacatcttataaaactcctttgcaccctctgaaccgtacttaagcatcgtgcccatcgccgtatttccgtctatgttggcattttcacgcttaatttcgttatctttcgcctctttaaaagtaagatcctcatatattttcataaggcgagtattcatctctcttacgcgcgtacgctcagctctgtagagtataaattccttggccgtacgggcgtggccgttttcaataagtattttttcaaccgcatcctgtatctgctctaccgtaggtgtctcgttgtggcatacttcaagcagataaagctctacctgtcttgcgagatattttgccatatcacgatcatttccgccgagtacttgggcagctttgaaaattgcttcagcaattttatctatattaaaataaacctctcttccgtctcttttgacaattttctttatactgtccataatttcatcctcctcgttgcttttaacattgatacacaagatattgtatgccttgcgtgctatgcactattcaatatacaacttttacaggcataaagcaagacaaatttttactttttttacgaccattttttaccttttcccgtagaccttaaaaacaaaagcgtttagcatattataaacaaaaaaatttttttagttcataattttatatagtttatatattgtaaaaaagtattaaatttacattttattttacataatatttaattagtcaatctttaataattcttgaagttatgatgaatttttcgataaatatatataattttttttagtattatgttatcattaaaaatactttaaaatatgaggtacaataaatatgaaaagaattatttcatttattatagcggcggtgtttatcttctcgctcttcgcatgcagtgatgatacagaagaacagatagatacatatatccacacacattacgatgaaatttatgaagctatatgtgcagcagatgatataagcgatgtatctaattatattttggagtgggcggacagctccggcattaaagcgctaaaggactcaagttcaaatgtaataatgtcgtctgatgcgacaccgggatatgaagatgcagaatccacagcgtttcagtgtacaatagatctcgaaaatccagagcataccgccctctccgtaagcatagcctcctatataataagcgagagttcacagcacggagttttgcgtgttatcttcacttcatctccggacggtattgcaaaaataagccgctcccatctgcaaaatattgacaattttataagtctcgactggtatgaaaacaacgaactgctcgtcggaagcgcaggaaatgaatattacagtataacgcatgagcttgaatgggaagcaccttcatatacaaaggcatatgaaatatcggtttacgtgccggatgatataaagtctgctgatacttatcttcataaaaatccgataacatatatcggcgatatacttgcacgcgcaaagagcagtaatatactccttgaggttgccggtttcaacggcggtgattcagccgacacatatcctcacagagtatcttgcgtcattctcgtcaatcaaaacgatatcagtaaaattaccagaagcataaatgcagccaaagaggaatttgaccatatgtacggtgcagatgacagcgaatatttctttaattttaccgaagttgaaactcccgataaagtgatttcgtacgaagataccgccaatctcataagttttctttacacctgtatagacggcacatatcttaaggacgacgccggtgaagttatcgcgattgctaatgtaggaaagataagaacgacaagcggtaacctcgagatagaaatatgcgcctcaagcaaaagcagcgcagttctcagtgaaatgaattcagagtttgatactatctgcggcctttgcgatatctcttacagcgtaaaaagcggtgtacctgtatgggaaaacaggacagaaacggacagtgaatcatattccgaagcggaaacgcttgaaaatggatatataacagcctctaatgagcttatagacgcaattgatgtacaaattaaggaaatcactggaaaagaatcccgcaaggtaaggatctttgatgaaacagcctgctcggaagcggcaaagcgaaatcctgaaatgaatatcgtcggcttcggccttacgaaggatgatatgctcgagcagacggaaatacttataaactatctcgcttctttaaatatgcaagatctgagctaacatattgcaagcaaaaaacggaagaccggaaaatgaatgacggtcttccgttttttaatgttttataccatttattttaagaaaattatataaaatgaatgcgcgcttcatcgtatctgctttcttgtgcatggctttccgcaggatacccaacaggaataatggcaaacgatgaaagatctttcggcagtgaaaggatgtcgttcactaattttgttcttgcctcatccggagctatacctatccatactgcgccaagaccgagctccgtaatctcaagcagcatattttccgtgcatgcggccatatcaacatgcgcaaattcctgagcccaaagtccttcgtttttataacaaggcactatagcgaaatctgcctcggccaccggccctgcccactgatgtacatgtgaaagtttttcaaggatttcattattttttacaacataaaactgccagggctgctgattgccggctgacggcgcagcgcacccagcttctatgattttcttgatcatttcatcgctgacagattttttctcatactttcttatgcttattctctcaaaaattgcgctcatttcataccctcctaaaaaattataaatatgtaatacccgttttatgaaattctaacctgcgatataactgtaattttaattgatttttatattatatccataagtccggagtattctttgagctgttttcttcttattttataatcgggtataaatgctccgacctcattccagaattcacggctgtggtttttatgtattgtatgcgccagctcgtgaactacgacataatctataatttcaggcgggcacataacaaggcgccacgaaaaattgatgctgttactgccgctgcacgaaccccagcgtgttttggcgtttgatatctttacgctcgcatagtttgtattcataatctccgcaaaggcatcggtacgtttcttgaaaagcgcaagggccgattctttcagccattttattagatcgtcagcacctgcgctgctgctaataaaaagttccgtgccatctaaatatacttaga

SEQ ID NO: 261 - DNA, 12178 bp, Unknown
  16S sequences of unknown bacteria
gtggtatttctcgtttttttcctcaaaaatccgaacttcactttggcaatttaggcatcaattttaatcattatacgccttttactgtcccaaaaaatggactgttactcacaaaaataatctgtgtttattttgaaaatgttaaatgtttttacactttcaacgccaataccgtatttcaccatataatcagctaacaaatcaccatcaattagcttaatacttttttgctgctgattggttccatattcaaaagcttctttagtgtaagaagatgtagtaataaatacccctttttgaatatgacccatagcgcctacgaatgcttgtaattcttttctacctacttttttatcctttgaataacgttttgcttgaatatatataaggtctaatcccagtttatcttcgctgattattccgtctataccattgtcgtgtggacctccagtaacaattcccgaatttttatcatatccatatcccattttcaaaagcaattcaacaacaagttgctcaaaaaagtcaggatggttaagcataacattgtctaacaactgctgcttaatttgttgcaaatgctcattcatcgcattcgctattttttcttctgggagagattcggtattatcttctattactttttttgattgatgtatgttgttagaattgctgtttttgttaacaacaaattttaattttttaccatcttttccggcaatcgcaaaatgctttactggataagcagtgggaaaatcaagtccaacacaatgacgtcttatttctccgtttacaacgccaactggattttttgcaccaaattgataaagattgttttctattattttctgatagatttctgccgatgacaaacccttaggctcgttttttaatacatcttttattgcttcaattatcgtcactgatattccctcaatttataatatagttttcttaatactgcattaatctaaaaattgttcatcattccgcttcaacggcaacatgttttccgctgaaggcaacgccgtatttatagattgtttttacaccttttaatttcaactcggtgtcgtattttttatcgttaatctgttttagtgctgttttggcaagctcttgtaattcgttctcattgcagtttttctcggctttcagttcgatgataataccgggaagattactgactttcggagaaagtgcaatatcgtatctgccgtcaccggattcgcggttagaagttacatacgaattgccaaacagtgcacaaacaccgagcataaagccgtgatagaagttttcgcctgcaacatcaaaagcgctaaccgattgaataagaaaattgctgatgatatcttgcaacttttcaccgttgccagagaatattgcttcctcaacggcaatagccgtggcttgcggaatgatattttccaacttttgaaggatttctttgcggtaaacaagtgagatttctttattcggcaaagcgacttcgcacataaaatctccgcttatagaaacgctcgatttaacaactttcaaatatcctgccatcagcaagaaactgtaaatggatgacggattgtttttaatttgcggataaatcacgcttgtgtcgatataagttgtaaacgagccgccgttgacaagagaagagaggcgttcgtagatttcgttgtccgcttctttaataatctcgccgataatgtcgttgcttccggtggaaagccagaatgctctcggctcacagtcgttgctgaaatagttaataaccgaccacgggttgaaaatatctgtcttgccgaagcgatagccgtcataccattcgcaaacctcgtcaaacttatccggagcactgtagtacgccgccagttcttttacttcgtttgcagtaaatccgaaatattcgctgtatttattatcgaggaccgaattgattgtaaggttattcagcccactgaaaatgctttctttggcaacgcggagaatacctgtgaggaaaccgaatgccagactcttattatccttgaaacagccggacagaagattacgcataaacgcgataacatcgtcgtagaaaccgcttgtgtgaccgctttgaatcggagtgtcatactcatcaatgatgataacagcaccctcaccgtaatgttttttcaacatttcagacaaatacagcagcgaccgctcaaggtcaacagccgaaaacttttcggacaccattttatcgtaaaaatctttttgctttttatctaactttggacttttagaaagatctgaatgccggcagtattcgctggaaataatcgagccgatattggcaaaagtgttatcccaagaattgtgttttacatcttttaatgtaataaaaatcacagggtacttgccttgaaaagagcgataatattcgccttgctcccaaattcttttatccttgaaatactttgaagtatcctcgtttgttttttcaaagaaagtgcggagcatatccatattgagagttttgccaaaacggcgtgggcgcgtaaaaagagtaaccatcgggcgctcatcaatgaaatctttgagcatcatggtcttgtcgatatagtaatattcagttgaagctaagcgataatcagacacaccgactggcaggggcaagtgtttcggacggctttttgcccgaacatacactccggttttaattctgttgtcaaccggtttttctgcgccggcggggataagccagctgcgtccgcttttgatagcaccggggattttcccaccaatacaaagtccgcgaactgttctttcggctaattcccaacgcattgctgcttcttttacagaaattacattcgccatagtaaaactctccttacagttgttcgattatattatacccatattgcggctaaatgtcaatgcaaaacggcgaaatgtttgataattcgccgctgcgtttcgccgattgataatcaacataagaaaagcggagccgaagctccgctaaatttattaattttcgacttcaatagtctcgctcaggtctatgaaatcatcttcggctgagtttgtatagccccttcgcagatattcgtgtccgccgtcaacaaagaccttaccgcatttgcaggttttaaagtcatgtgcgctcgttgattcaatgatttcaccgcaatgtttacattgaattgcatttttaatgatttttgtcatacattcactcctcgttattcagtattctaatggcaaaacctatctctatctcaaaatcaattcctcattgactatctcctccgcgcggtggcggatattgttcattcggcgcacccattccatttggtcggtggcttttaggcgctcggtgacattttcgtttttcgctatgtcgcgtacaagctgagagaacatttcatcggcttgccggtcgatattttctatgtaggcgttcagctcgcccgaaagccacagactgctgaaaagtattttatcgtgctttcggatataggcgtagtgccgccgaccgaaaggtccaaaggtgggttgctcgggcgcggcaacattcggcaggagataatcgccctctttgcggtaagtgccgcccatgcgttcaaatagtgtttctttcatttccattgactcctttttgttattttcccagccgtgaggtgagcttttccacggctattcggaacttttcgaacggtgtcaatgttatcagcggcgggtcgccctcgcggatccgcatcgttcttcttatttcttttggaattactacacgcccaaggtcatcgatgcgtcttacgattccagtagctttcataatatattaactcctctttgtttaaattaatgaataatgaaaaaagaatgatgaatattgaataattaatgtgtcggcacagccgacaatatttatatcgtgccgaaggcacaccgaaattattcactattcattattcactattcactcgcaatgctccgcattgcgtctgtgttgctttcatatattaaaatctccttttttaaatcgtgttgttattatttgtaaagagatataatatattcattgacggatttatttatcagaaagccgtataattaattttatcctgcaataaaagaaacttgattgaaaaacactttgttttttgttataatacggttatacagcttcagtttccgcatataaaatgtcattgcaggtgatattttaaagagaacggagttcttacccgtatctcggtggagcatacggtgctgcaaaaataaagagcagtatgcgaagactgtacaaggataaattatgagaaaaagaatatcggaactcaaaagctttcattggcggttatggctctctctttgcgcgcttgcgctaatcccggcggtgtatcaaacggtcaaaaccttcctgatttccgcagtcgggcaggagggcgcgtttgacattgtcgggcagatggaatggttcgatttgataaacgagaccctgcaggcgtttctgataattccgctttactcggtgttaaaccgtatcttcaaaaaccaccgtgaggaatttgcgggagcggtcttcaagacagggtcttgtacatttgctctttatactcttttctcggtcggtgttcttatctacggctcgacacttatcggggcgatgagcccgggcgagataaatatcgcagtcacttcaacatatctccgccttgaaacggtcgcgtttatgacgggaattatcgtaagctttgcgaatatggttttcgtcgtgataggcaaggataaaaatgtctatatatttcttgccgtccgcacggcgctgtcgctcatcgccgactttttgctgataccgaatttgggcgtttacggtgtggcggtatcgaatatcatatcaaacacgctgctttccgccatgtgcattatgatgctgtataaacaagggtacatccgtttcaaatgcttcaaaaaatcggacggagcaatgctccgcgaatggtgcaaaaccggggcgttttcgggacttcagcaatttatcgacaaccttatctatgccgtcatggtctgcaaaatggtaaatatggttgccgagcagggcaactattggatagcaaataattttatctggggctggctgcttattcctataacagctcttgccgaggttattcgctcggactgcaaggacggttataaagagctgcataaatttaactattattttatcgccgccgcaagcgcggtgctctgggtgattactataccggcatggacgccgtttttccgctgtgcgcagggacttcaaaatgcgggcgaaatcttcggtatcgtaataaagctcgttccgttttatattgcgtatgcgggctgtgcaattatcgataatatctttgtcggtcttggaaaaacaagctataacgccgtcaattcgctcattatcaatttcggctactatggcatcttttatatactttatcgcacgcacaccgttacatttaacatgaacacgataattttgatgttcggcttcggtatggtagtgcactacgctgtttcgcttgtcgaggaacaggtgtttaaatatcggatttaaagtattcagtttgtcgataaatcaaacggaatcgaaaagatcgggggatacaatgaattacgaaaagctttccgacagaatttcagaacaaattataaatgaccggagaaacgataatctttcggcttttggatttaacgaagaaaacgcattgcgccgagataacgaaagggataaggcgaccgctatcagaaccgcgtttataagggatacggataaaattattcattgcccctatttcaaccgctattcggataaaacgcaggtgttctcgttttataaaaacgacgatataacccatcgcatactgcatgttcaactcgtctcgcgcattgcgcgcacaataggcaaggcgttagggcttaatctcgatctgattgaggcaatcgcgctgggtcacgatataggtcacacgccgttcggtcacgagggtgaggaatttctcgacgaattgctgttttctcacacgggcaggcatttcagccataatattcagtcggtaagggtgcttgataaaattttcccgtataatattactctgcagacccttaacggaattgccgcgcatgacggcgaaatggagctttcagagtataacctgaagccgcttgagagctttgaagagttcgacaggcagattgaagcatgctttgcggataaaaagaacgttcgcaaattggttcccgcgacccttgagggctgcgttatgcgaatatcggatattatcgcatacctcggcaaggacagacaggacgcagagcgcgcgcatattatttcaaacgccgagtttgaaagcggcgctatcggctcatacaatgcggaaatcatcaacaaccttatagttaatatagtagaaaacagctacaaaaagccgtatataaaaatggacgacgagcattttgcggcactgaaaaaagcaaagacggataattacgagctgatatataaaaacgattcggtaaaatcggcaatgtgcgaaaccgtacagcctatgatggcaagggtttatgaaagactgctttcagaccttgtaaaagctaattttgattccccgatattcacgcatcatatcaattttgtgaataaagcacattacaaaagagatattccttacgaagaaacggagcccaatcagcttgttacggattacatagcgagcatgaccgacgattattttgtagatttgtattcataccttttcccgaacgataggctgcaaatagaatataagggatattttgagtaaaaagaaacaggcagacggaagaaaaacaccggcttgcctgttttgatttttaaaggaatcaatcttttttaatattgagcagatgtgcgattccgggtatgctttctccctggaacgatgatgtgggggacataagcgcgccggtggacataaagagaatattgccgaaatcacccttctccaaacggtgcataatataggagcataagaccgaggcgctgcagccgcagcccgagcctcccgcgtgaacatcctgcttttcacggtcgaatatcagcgttccgcaatcgctgtggcggcagcgaatatctataccctcgcgctccaaaagctcatagaggaggttcgtgccgacatagccgagatcgcctgtgaaaattatatcataatcatcgggctttgtttcggtgtccttaaaaaaattgagcagagtacctgctgcagcgggagccattgccgcgcccatattgttggcgtccttaatattcagatcctcaatttcgccgaaggttaccgagcttatataaatatctccgccgtccttacctaaaataagagcgcccgagcctgtcaccgtccattgagcggtcggggtccgctgagatccgtaattgagcggaaagcggtattgccgctctgccgagcaaaagtgcgaggaggtgaccgagatcgttttttttgccgcgcccgaatcgatgaaaactgcggcaagccccgccgacagcgccattgtggagcatgcgccgtaaagacctataaagggtataccgaagctgcgcagaccgaaggagctgcctatgcactgattcaaaaggtcgcctgcaaaaatattgtcgatatcatcgggcatcagccccgctttatcaagcgctgtctgcacggcggtcttctgcagtcggctttcggctttttcaaagcttttttcgccgaaaaagctgtcggtcgtgtaggaatcgaattcgttcgagagcggcccctcatgctccttttttcctaccaccgagccgtagcttataatcctcggcttattttcaaagataattgtgcgttttccgattcttttcatgctctcacccgtaaatactcatgatatacagaataatgccgtatataacgcttgccagcgtgccatatactataacaggcccggctatcgtaaacattttggcgcccagccccaaaacatagccctcgcttttatactcaatcgcgggggataccactgcatttgcaaagccggttatcggaacgagcgtacccgcgcccgcatgctttgcaattttatcaaacagcttaagccccgtaagccatgcggcaatgaaaatcagcagtgagggaatggctgcctttacaaccttttctggcatatcaagcgccgtgaaccattctttaaaaagctgacctattacgcagatgagaccgccgaccgcatatgcccatataaaatctttgagtttgcttgaaggcggcgagagccgctttgtcatttcaccgtattccttttcggaaggaaacatataatcacatcccttttttgtagtatttacatcggaattcgggtttattccgtatttacaaagcaaaaaaagaccaattcgatcctgtaccgcagcgatgcgtgttaagctttgaacattgcggtgcttaaggaactcctgtatccgtcgttgagatgcgtttccgttttcaatatacagattgatttcatggcgctctgtttgctgcttttatttttcctttttgtcacacattattgcaatacatacagcgcgcggctttaaaataaattttaacagttgcgataaggaaaaaaatgtgttattataaaatgaaatatgaaaaaaggggtggttgcatggcggacagtcgtgcaataggagtttttgattcgggactcggcggtcttacagttgcacgggagcttataagagagctgccgcaggaggatatcgtctatttcggggataccgcaagagtgccttacggaaaccgaagccgcgagaccataagaaaatacgctgcggaggatgaaagctttttgctgcggcacagcgtaaagctgatagttgcggcttgcggaacggtctcttctgttgcggcggacagtgctgaaaagcttcccgtgcctttttttgagatggtcacatatgccgcagcggctgcggcggctgccactaaaaataacaaaataggggttataggcacacccgttaccgtaaacagcggcagccataaaaaggaaatacttaaattaaagccgaatgcggaaataaccgcctgcagctgcccgctttttgtgccgcttgtggaggagggctggttttctcccgaggacgcagtggtaaagggaacggtttcccgttatcttgagcctataaaggcggcgggtgtggatactctgatactcggctgcacgcattacccggtgcttgaggacgcggtaaggcggtttatgggggagagcgttacgcttataaaccccggcgttgcggtggcacaggcggtaaaaaagtatcttgaaaaagcagactcggcaaacgaaggtcaaaatatcggaacgcaccgcttttttgttaccgataagccgggatcgttcaaaaaaaccgcttcggtgcttttgggcgaggaaattgacgaccgaaaggttgaacaggtggatttaaacagcttatgttaaaggatgttttaattaatataaagggcgtgcagggctccgacggcgaggaaagtgtcatcgagcttacaaccgacggtcgcttcggcgagaagaacggcgggttttacataacctatgacgaaagtgaaatgatcgggatagacaatgtcaaaaccagcctttatataaagcccgataattcggtaatattgcagcgcagcggcgcaattgacagccgcattgtggttgaaagcggtaagcgcagcgtgtgctattacaatacgcccgcgggcgaaatgcttataggtatattcggtgaaaaggtagaacataatttaaaaaagaacggcggaagtatttccatgaaatacacaatagaccagaatttgaattttgtgagccgaaacacggtcagtatcacagttagagaggttaaagaataatgtcgattttagtaggaaaagcaaaggaacagataagcagctgcattttatccgcagcagagagcgcaatggctgacggctcgcttgaaagggcggagcttaccgagttttcggtttccgtcccggcggacagaagccacggcgactatgccgcaaatgccgcaatggtgtgggcaaggctttttaagagcgcgccgcgcgcagttgcggaaaagctctgcagccatatgagctttgaggacacctatgtcgatcgctgcgaaatagcgggacccggatttataaacttctttttatcggacgcgttttatgccgatattcttaccgatgttgataaaaagggcgaagattacggaaaaagcgactacggcaagggcaaaagaatactggttgaatttgtttcggcaaaccccaccggacctatgcacatcggcaatgcgcgcggcggtgccttgggcgattgccttgcttccgttttggaggcggcgggctattacaccgagcgcgagttttacattaacgacgcgggcaatcagataaacaaatttgcactgtcgctcgatctgcgctatcggcagctatttgaggacggcgttgaaatgcccgaggattcataccacggcgaggatataataaaccacgcaaaggcatttgccgaaatacacggcgacagctttatgaaaaaaacggaggaggaacgccgcaaagcgctggtggatttcgctctgccgaagaatattcaggggctcaaggacgaccttgcaaaataccgcatacattacgacacctggtttaaggaaagcagtctgcacgcaaacggcgagactaagcgtattatagagctgcttaaaaacagcggtcacacctatatatccgaggacgcgctgtggtttaaggctaccgatttcggctgtgataaggattttgtgctggtgcgcgcgaacggcgtgccgacctatgttgtgccggatatcgcctaccattacaacaagcttgaaataagaaaatttgaccgcgccattgatattttaggcgcagaccaccacggctatgtgccgcgccttaaggccgcgcttaccgccctcggggtggacgcctcccgccttgacgcggtgcttatgcagatggtgcgcttagtgcgcgacggcggggttataaaggcttcaaagcgctcgggcaaggcaataacccttgtaacactgcttgatgaggttccgatcgacgcggctcgcttcttctttaatctgcgcgagccgaacagccattttgattttgatttggatttggcggtaaatgagtcaaattcaaacccggtttactatgttcagtacgcctacgcgcgtatttgcagcattttccgcaatttggcggcagagggcataacccgccgcgagtgcaccgccgaggagctcaaagcacttaatacccccgaggagcgcgagctcacactccatatagcggcgctgacggacgagatcgtaatgtcggcaaagacctacgaccccgcaagaattacccactatgtaacggagcttgcaaccaagttccataaattctatgccgcctgccgcgttaagggcattgaagagccgcttatgcaggcaagactgaccctctgtgcggataccgcagcggttattaaaaatgttctcacgcttatgaaaataagcgctccggagaaaatgtaaggaaaggcgctttcaaaatgaatatgaccgaaaaaaatctcacaatgataatggatctttatgagctgaccatggcgaacggtatttttacaagcgatatgcgagataccgtgacatattttgatatgttcttccgccgcgtgccggatgacggcggctacgctattatggcggggctggagcagctcatagagtatatgaacaatttaagattcggggaggacgatatcgagtatctcaaaaatcttaatctgttctcggatgagtttatagattacttaaaggactttaaatttacctgcgatgtctgggcggtgcccgagggtacggttattttcccgcacgagcctatcgttacggtaagaggtcctgccatgcaggcgctgatgttggagactatgctgctgctcacaataaaccaccagtcgcttatagcgaccaaggctaaccgtatagtaagggcggcaaacggcagacccgttatggaattcggcgcgcgcagggcgcacggctacggcgcggcttattacggtgcgcgcgcggctataataggcggctgcgcgggtacatcct

SEQ ID NO: 262 - DNA, 3915 bp, Unknown
  16S sequences of unknown bacteria
tgatgatacaagggtcaaaaggtcatgcgtttcatgcttgcatgaaaaagcatgacttattgaccccaacatcatctgcccactgtcttaacctcataaatcagccgacagatcaatgcatggtctgcgtcaattatacatcttttttcgggaaatgtgtaaaaaagatgtatcttatctctgtactctggctccggctccgcccatgatcgcctcgacctctttgaggctggccatcgtcgtgtctcccggcgtcgtcatggcaagtgctccgtgcgctgctccatagttgactgcaagctctgcattttccgtcgtcatgagtccgtatatcaggccggatgcgaaggaatctcctccgcctacacggtccatgatttcaagacccttgtaatcctttgccttataaatctctccgtctgcccagcagatcgcactccagtcattcaccgttgctgtcttgacagtgcgaagtgtcgtcgcgactgccttaaagttcggataggttctggccgcttcattgatcatctttcggtaaccgtccagattcagttcctttaaatccgcatcatttccctcgatctcaaaaccgagacacgccgtaaagtcttcctcattgccaatcatgacatccacatattttgcaatttctttatttacctgttgtgcctttttttggcctccgatcgcactccacatagatggccggtagttcaggtcataggacactaccgtgccgtatttctttgcggtcttaatcgctgcaagcacggtctcgcaggtctgctcggaaattgcggcataaatgcctcccgtatgcagccatctgactccaagcgttccgaatatatactcaaaatcaaagtcctccggtgttgcctttgatatcgcggtatttgcccggtccgaacatcctactgcaccgcggatgccaaagcctctttctgtaaaattaattccgtttctgcagatgcgtccgattccgtctgtgtccatccacttgatcagggatgtgtctacaccgccctggcagataaaatcttccatcagcatgcctacttcattattggcaaatgcagtgatcacacctgtgttcattttaaagcactttctgagtccgcggactacattgtattctccgccgccttcccacgcacgaaaagctctggcagtccggattcttccctcacccggatccaggcgaagcattacctcgccaagagaaaccgcatcatatttacattcactctttggttttaaattaaggttcatatccgtagtctcctttattttcgaatgctgtgcgccagttcaacagcttcttttgtcatctcggcaattttatcaaattcaccggccttgatcatgtcgcccttgaccatccagcttccgccgcagcatacgatcttactgcagcccagatagtctttcaggtttttcacattcacgccgccggtcggcatgaatttcagcatggtaaacggcgctgccagtgcctttatcgttgccactccgccatactgctctgctgggaaaaacttcacaacctcaaggcccctctttaccgcctgtattgcctcggaaggagtgaccactcccggaaggaccggtatctctttttcgatacaatagtcaacgatttccggatcaaatcccgggctgacgataaactttgcacccgctgccacagccttatccacctgctcaatggtcagtaccgttcctgctccaaccagcatatccggatactttgtgctcatgatccggatggattcctctgccgcagccgtccggaaggtaacctccgcgcacggcagtccaccctttaccaaagcatcggccagcttttctgcatccttttcatcgtccagtaccacaaccggcactaccagcatttccgctaatttctcaatcatcgtattcatttgtctgatctcctttctcaacctgcaaactgctactccatgtaagcacccttcatcgcactcacggcatgctgcgcatagagctttaagagtccatgtgtatacttgctttcaaaccctttccaccggctcttccgctcttccagaacacgctccacctcctgtggcgttttccgttctccttttatgccgacgatagatatcgtcctgttatggacatccagctcgatcaggtcaccctcttccacaaatgcaatcggtccgcctgctgccgcctccggggacacatgcccgatcaccggtcctctggatgctccggaaaatcttccgtccgtaatcagcgccacactcgatgccagctttggatcggcacagattgcctcaccggtatagaacatctcaggcatgccgcttcctcttggcccttcataacggataaatactgcatctcccggctttacctctccatgcagcacggcactgatgcaggcctcctcgctgtcatacggctttgcacggagcactgcctgaaacatattttccggacatgccgtgtgcttgatcacgcagccctccggcgccagatttcctttcaggatcgcgatacttccgtttgtccccttcgcatgctcaaaggaatgaatgatgtcttcccggtctatatttcttccgaacagctttgatttttcacggaggatctcatcacagtgctcataaaatccgtttttcttaagttcctccaggttttcgcccagagtcttgcctgtcactgtcatcacatccagatgaagcatgctcttgatctcttccatgacacgcggcacacctcctgcataataaaagtactgtgcaggccaatctcctgacgggcggatatttaacaaataatgggcacctctgtgcaatctatcaaaggtgtctgcgctgatttcaaatccgaattcatgcgcaatcgccggaagatgcatcgttgcatttgttgaccctgagatcgctgcatgcaccatgattgcattttcaaagctttcctttgtgacaatgtccgatgtctttattccttttgaaatcagatccatcagctgttttcccgcctgataggatgcctccttcagttccggcgccgtagacggcatgagggccgttcccggaagcataagtccgagcgcctctgccatgatctgcatagtcgaggcagttcccataaatgagcatgctccgcagctcggacatgcatgctgcttgtaataatccaactgctcctccggtatgactccggtcttctcccatgcgtcaaatttaccaatctgctcaagcgtgagtaattcatttattttgcaggccgggtcatcgacaatatattttttcggcagctcatgcgcctccatgacgccgccggtcactacgatcgcgctcatgtcctttaaacgaccgatgctcataagcatagccggcatggatttatcacagcttgcaataaataccccgccatcaaaaacagtcgcattcgcctgcgcctcgaccagattcgtgatcgcatcgcggtgtgcaagggagtaattaatgccatcatgcccctgcgcaatgccatcgcacatgtcggttgcaaaatatctggcagcctttccgccattttcattgactgcttttaccgcttcctccacgaaaatattcaggtgtgccgaccccggatggctgtctccataggagctctcgaccataacctgaggcttcgagagatcacttaccttccagcccattcccatgcgcagaggatccatctccggtgccagctttcttacttcttcacttctcagcatgtctgcttcctccctgtcttttatacaaataaccttttgaccgcaattctacaaacattcgaaatccgctgatttactacgtaaatcgctactttctcatgtttggcgggtcccaaggtcaaaagccttatcatgcaagcatgaacggctttttgaccttttgaccctagcat

SEQ ID NO: 263 - DNA, 24934 bp, Unknown
  16S sequences of unknown bacteria
ccggatgggacccggtgaagttcacgaaggaagtaaggctcgaggcggtctcgaacggcgaggctccggagtacataatgaagctcgtcgacaatatcgaggcgaccgggaacgcgtatgggcttgaaaagccggatatggagatcgtgagcctcggcgaggctctgccgcgcgtcgcggatacgcttctctatatcggaaccgacgtcaggtacaaggcggcggagtacgcggtcgacgcggcggcggtgcttaagaaggcggggattgatttcacgattctcggggatgagccggacagcggcgcggcgatcgatttcctcgtcggagaggctgacgagacgaagaaggcggcggagaagtgcgctaaggcgatttccggttataagaaggtcatcgtcctcgacccggcggacgcgaagatgatgaagcatgagtacaaggagtggggaatcgctccggactgcgagatcgtgactttcacgtcgctcgcggcgtcgctcatcaatgacgatatattacaggtgaagaatatcggcgttccggcgacctatcaggacagcttcgcgcttgtgcgcgaccttgacgaggttgaggagccgagggttataatgaacgcctgcaccgagcttcacgagatgctgcttaaccgcaaggagctgatctggggcggaaacacgctgatggcggagtatatgccggacgtcatgaagctcgtctcgaaggacagatggacgaacgctgagcacgttggcgcgaagctgctcgtcgtcgcgagcccgtccgagttcgccgcgctctccgcggtgaagccggaggacatggagataatgtcggtgccggaattgatactcgcttgcatcgagtaatgtattgaaaggatatataaatatgttggtttcttttgatgaggtgttatctctcgccgataagggcgggttcgcgataccggcgttcaacgtctacaatatggagacggtcatgggcatcatcgcggcggctgaggagaagcgcgctccggttattctgcaattttactcccgtctcgcggcgaacgaggaaggatattatctctccccgataattttagcggcggcggcgaaggcgacggttccggtctgcttccatctcgaccacggcgcgggcgacaaggaggtcatgcacgcgatacgctacggcgcgaccggcatcatgatcgacgcgtcgacaaagccgctcgaggagaatatcgcggtcacaaagaagattgtcgatctctgcgcgtacaacgacatacaggtcgagggcgagataggtcatatcggctccgcggcgaacgaggataacctcacggcgtcgacgacggtcgatgaggctgtgaccttcgcgcgcggctcgggcgtcagggcgctggctatcatggtcggaacggctcacggtcactacaagaaggcgccgaagctcgatatcacgagaatagaagagatccacgccgctctcccggaggtgtcgcttgtcctgcacggcggctcgggagttccggacgaccagatacaggcggcggttaaggctggcatacgcaagataaacttcggcacggacgtctgctattcgttcctcgataaagttttcgagacctcgaggagcctcatcgcggtcgatctcttcatgaaggacgcggtaaagagtgtcaaggcgttcgcggaagagaagatcgaccttctgatggcggatggcaaagccgattgacgatgtatgatgaataacaataaaaaacttataaccggtatcggcgcgaacgtctacgacacgctgataatgctccccgaataccctgccgaggacacgaagatgaaagccgacgcgataagctctgtcggcggcggaccgaccgcgacaggactcgtcgcggcggcaaagctcggcggcggagacgtcacggtcgacttcatcggcagcgtcgctggggacgacaggggaaggtttctccttggcgacttcgcgaagtggggcgtcggaacagaatatgtcaccgtcgagaatgactgcgagtcgttctgctcgttcgtgcttctgagcgcgaaggagaagacgcgcacctgcgtattccaccgcgggaacaagccgccgctcgtccttgacgacaggcagaaggaacggataaggaattccgacatcctgatggtagacggaaacgagctcgaggcggcgatcgagggcgcgaaaaccatccacgagggcggcggaaaggtcttatacgacgcgggaggactttacccgggcgtcgacagattgcttccgcacgccgacatactcatcccgtccgaggagttcgctctcggtcacacgggtgagaagaccgccggggcggcggcgaggaagctctatgaaaagtactcgccggaggttgttgtgataactcagggaaagcgcggcggcatcgtctatgacggcacgctgacatcctacccgatagtcgagaccgaggtcgtcgactcgaacggggcgggagatgtgttccacggcgcgttcgcgttcgctctgacgaagggctgggacacgaggaagtgcgctatgttcgcgagcggcgtctcggcgctcaagtgtacgcgggtcggcgcgagagcggctgtcccggcttataatgagactattaatttattgaaggagaacagtcacgatgaatttcaagaagacatggactaagaagtacggcaagtccgaaatctacaaggcgggcgagtgcgcctgcaggaaggtcgagatggatatgctccgtctcgccgatggtcagtcgaagctctaccgcgaggagaacaaggagtacgcgctcgtgattctcggcggaaagtgcacggttgagggcgacgatttccgtttcgagaacgtcggaaagagaaaggacgtcttcgacggcccggcgacctgcgtttacgtcccgagaaacaccccgttcaccgtgacggctgtcggcgaggtgtcgatcgcggtctcgaagtcacctgcgacgaaggatttcgctcccgcgctgataaaccccgaggacgtcgtgataaagaacctcggcaagcccggatgggagcgcgaggcgcacttcatcctcgacgaccgcaccgacgcggagatgctctatatcggcgaggcgttcgtgaagggcggtcagtgggcaagctacccgccgcacaagcatgacgacgacaatatgccgaccgaggctgagaccgaggagatttactactacgagttcaagaaggaatccggcttcggcatccagcgcgtctacacgatggaaggcgacgtcgacgaggtttacgtcgtgaagtccggcgatttcgtcgagattccgcgcggctatcacccgttccacgcggcgcccggatatgacaactactatctctggattatggcgggaaaggatcgcggcttcttcatgacgactgacgaagagcacgcatggctgaataaatgagcagacttgaggaactgagaataaagaaccccgggataaggttctacagcgtaaaagacaaggaattcgcgcgctacggctgtattgtggagcatgatttctccggaatagcggagatggcgaagaagctcccgttcctggttgaaggctcgaaatatgaggcgtccatcggtgcgttcgagatagatccgtcggcggaggtcgcgaaggaggagctttacggagagcttgacatacagatcggcaactgctggggctacaactcgtacctgaacgcgctcgagtggcataagaactccgagatcaacgtcgcggcgaccgatctcgttcttatcctcgcgaagctcgacgatattgaggacggtaagctcgattcggcgaaggctgtcgcgttcctcgtcgaggagggtgaggcggtcgagatttacgccgacacactgcattattgtccgtgtcaggtgtcgccgaccggcttcaactgcgtcgtcatacttccgaaggggacgaacagaccgctgtcgggcaagccggaggatccgctgatcttccgcaagaacaagtggatattctgccacgaggacaacaaggaactgatcgcgaagggcgtagtcccggcaatttacggcgagaactacaggataaactactgaaaacgacacccggacagaacgccgggaattctgtccgggcaaaatttaatataaggaaagggcaaactaccatgaaaaaatcacgtaccacggcatttcttctcttaacggcaatactcctttccgcctgcggacaaggcgcgggcgacggcaaagaaacgacttcgacggatgaaatatcatccgggggggggggaaccgaaacctccgaaccggatctttactctgacctcccgaccggggattacggcggggagaagttcaccatcttcaacagcacggtcacctgggctgaatatcgtatcgattcggaaggaatcgacggagacacgatgaacgacgccgtctatgaacgcacgaaatttgtcgaggataaactcaatgtcgatatcgagcttatcgagcaggattcatggtctggcgcgtcgtcatatgtcgcgaatattgtgctcgcgggcgacgactcgatagacgcggcttttgtcggcgcgatgttcaatgtggcgaacatcagcaagggactctatattgacctcaacgacgtcgctgaatttgacttctcgaagccctggtgggacagcaactcgatgaagtactacgagatcgacaacaagctctatatggctcacaacaacacgagcgcgaatatccacgacacgctctgggtcggcttcttcaacaagaagattcacgaggagcttggtcttgaggatatctactcgatagtccgcgaaggtaaatggacgatcgacaaaatgaaggagttcattgaggtcgggcagaacgaccttgacggcgacggcgtgctcggcgcggatgacaggtggggtctcatgacgcataacggctcgggcttcggcttccttcacgcctccgatgagcgcggggtcgacatcaaggacggaatcccgtttgtcagtccggtcgatgatcgtatgttcgacacgataacgaagatacgaggcgtactggatctcaaggggacaatgaccgacgacaagcatcagggaaaacttggatacaactgcgtgaacggcttcgcgaacggcaggtcgcttcttctcatagaggttatcggaaacgcgaagactctccgcgcgatggacgccaatttcggtattatcccgttcccgaaatatgacgaggcgcaggaaaaatacatctcctactactccccggcgacgaacgcgttcagcatcccgaagacggtgaaggatctctcgcgcacggctgtcgtcatcgagaacctcagcgcgtacggctataagacgatccgtccggcttactatgacgtggtgctgcacggaaaaacggtcagagacgaagaatcgcgcgagatgctcgacataatcttcggaaacatcgagggcgagatggcttatatctacaactggggcggatacgcggacacgctcaaatcggttctcagcggaaagggagacatcgtgtcggcgctcgaggcgaaaaagaccgccgttgaaactgctatagaaaaatacttaagcgatttacaacagtaaatcaaccatttacagcggaatacttaccggtattccgctatttattaaggagaatatccatgctctacacacttggaatagattttggcggcggcgcgtcaaaggctacacttctgtccgccgacggcgtgatttcggcgacgcatacggtcgagtacccgacgtcctacccctgcccgggatacgccgagcagaacccggaggactggtaccgcgcgacaaggtcgggaatcgccgcgatcctcaaaaaaaccggcgtcgacccgtcggatatcgtcgccgtggcgctcgacgccgcgacacacacggctgtcctctgcgacggggacttcaatgtcctgacgccgtcgatctactggacggattcccgctcgaccgaggaggtaaaatatctccgcgagaattacggcgggttcatatatgatcacgtctatcacaagccggacacgatctggacgctcccgcagctcatgtgggtgaagaagcacaagccggatatctgggcgagaaccgagaaaataatgttcgcgaaggactatgtgcgccacaggctcaccggcgactacgtgaccgaccggatagaggcggagggttcgatgttcttcgattacacgaccggggactggtcgccggagctctgcgctctgctcggattcccgccggaaaagctcccgcgcctcgtcgaccccggcgatatcgtcggaaaggtgacgaggaaagcggcactcgacaccggtctgtccgagggcacgccggtcgtctgcggcacgaccgacactgtgatggaggtcttcgccgccggagccgtcgggaagggacagatgaccctgaagctcgcgaccgccgggcggatctgcgtcgtgacaaaccgtccgtaccccgaccgcgacctcatcaattactcgcatatagcgaagggaatgtggtatcccggcacggcgacgaaggcgtgcgcttcctcgctcaggtggtaccgcgacacgttcggcggagattaccgctcgatcgatatggcggcggaaaagattccgatcggctctgaggggctcgttttccatccatatattaacggtgagctgacgccctacgccgacccgaagctctgcgggagctttgtcggcgtccgcgcgaaccacacgaaggggcatttcgaccgggcggtgctcgagggcgtcgcgatgtctatgctcgactgcaagaaggcgctcgagcggataggaatcgagcactctgacactgctactgtcatcggcggcggcgcggcgagccctctctggcggcagatggtcgcggacgcgctcggcttcacgcttataagaaacgagaacagcgactcgtcgttcggaacggcgatgctcgcggctgtctcggcggggatattcgacagtcttggcacggcgctcgatatctgcacgaagcggcagtctgtgaccgaaccgaatccggataaccgcgaagcctacgaccggctctacaggcgatacaaggcggtgcacgacgcgctcgctccgatctacgacggagatatatgatgaagatactcgttttcgtgaagccagtgaagggcgagataagcccgttcgacgaggcggcgctcgagacggcgctcaggctgaaggacgacaccggcgctgaggtgatcgcggcggcgatggcgcccgacagtgcctgcgaccgtatgcgcgcgctgacgagggtcggcgtcgatcgttcggtgcttatctcggacgcggcgttcgcgggctcggacacggcggcgacgagttatgttctctccctcgcggcaagaaagctcctcgggatatcgtctgacaaaaaagtaacggaaaatacatttctgatactatgcggccgccagagcctcgacggggacaccgcgcaggtcggaccgtcggtcgcggaacggctcgggataccggcgctgacctgcgtcatgagccttgacgtcgcggacggcagcgccgactgcgtgacgcggctcgggaatgagtcggtgactcttccggcgctcctgactctcgagcgcatcgcgccgctcagattcccgtctatgcgggcgagggcgcgggagaccgaacggctcgacgcggcggctctcggcgcggataagcgtctctgcgggctgacaggctcgccgacgaaggttctgcggacgtttgagtgtacgtcggacaggcggaactgtgagttcctcgacgccgacgcgtttgtcgggaagctgcttgaactcatgaaagctcccgacccgcggctcgcggcggttcagccggaaaatcctgaaaataccggaaagaagctgaatctcgcccttgccgtcggagaggacgcggcaaaggtcgcgcgtggcgtcgccgaggaggtcataacacttgaaaaagggctgtcagccgatgattatgtcagagtgacgcgcgagagggaccctgacgcgctgttcttcgcgtcggacatatgggggcgcaggattgcgcctgttgtcgcgacacggctctccgcggggctctgcgcggactgtacgcggctcgagagcgacggggagcggcttttcatgtaccgcccggcgctcggcgggaatatcacggcgaagatcgtatcgcgcgcacgtcctgctatggcaactgtccggacagtgaccgcgggcggggacattgtgttttcgcgcggtctcgggctgcgggatgagctttccaacgccgacagattcgccgcgatgatcggggcggagaagggggcgtcgcgcgggcttgtcgacgcggggctggcaccgtacgccgagcaggtggggctgaccgggaggaacgtctcgccgaagatatatctcgcggcggggatatccggcgcggtgcaccatacggtcgggatttcgtcatccggatgggtgctggcggtgaatccggacaggtcggcgaggatattcgatatttgtgattacggcttcgtgggagactttggacaggttatcgccgccttccagaagcacaaagattttacataaaattttttgaagaaaatttgcaaaaatacttgattttttgagaacgatgtgctataataggtacagtatcaaaaatatagatacgccggtccggattttttcgtaccggaaagaatttatctcgaaaggatattgcaaacaatgaaaaagcttggttctctcgcactcgcagctcttctcgtagctgcactctccgtgtccgcatccgctgcatccacttccagcgcagctcagggcaccgctaccatcgatggtaagaaggatgacatctacgcttgcgatccgctgactgtcgcgactgttcaggacaactccggcaacgtcgctaaaccggcaaccggtaaggtctggaccgcttgggacgctaacaacctctacgtttacgcagagatcactgacgccaaggttacaaagcctgaggatgtcactactcagtgggctaacgactccgtcgaagtctacgtcaacttcgctggcgaagagggcgctatcgccgacatcaacgctggtcagatcaccatcggccctggcttcgagagcgttcagggcggcggtctctacaagactgagcaggaagctaacatcaagtacgcttggacctacaccgacaacggctacactgttgagatggctcttccgttcggcgaattcggcgcgaaggtcggcgcaacccttggcttctccatcggtatcgatgacgacgatgatgatgattccaccactcgtgaggctcacatcttcgacggtgagggtcttgacaacgcatggcagaccgctgactccaactggggtactctcactctgaccgacaaggtctatgaggctcctaaggctgatgcaggcgaagagggtggctccgcggctaccgctgacgctggcatcatcgcagctgtcgcatctctcgcagcttccggcgctgctgttctctccctcaagaagagaaagtaattcggtacataactgaatagctgaaagacaagccctgacccagtgtgttttcctgtcattgacaggaaaacacacacggcgccggtaccttatacggtgccagcgtcgtgcggcgtcaggttttttcattgttttcagtatgatcaaacgacgggacggtcgtcgtttcaatagtaactcgcttatatcgacacttagaccggcagcgaacagccggcaggatcccttgcttttcttcctgagatttgatactttggaagaaaaaaacaccctgtctatgtacggactgaaattttaatcggaaaaacgaggtattatatcatgaaaaagcttgcatctctcgcacttgcggctgttcttacggctgcactgtctatccccgcaaccgcttcttttgaccgtagctacaccgcgccgaagggcacgccggtgatcgacggaactgtggatcagatctgggacaacgcggaatggacaaacgttgataaaccgtttgacggcacagctgataccgattccacactgaagatcaagcttctgtgggacgaggagcatctctacttcttagccgaggtgttcgacaaggatatcaacgctgacaatgacattgttgagatttactgggaccagaacaatgacaaggacacttcctacggcgacgacgatatgcagtcgcgtttcagggtcgctgacggaaaggtcgttcaggattcgggacctaactgccagaacgacgcgaaatgcgtttcggtttcgctcgacggcaacaagtacctgcttgaaggcgctctcacctggacacagaatgtcaaggaaggtatgaagatgggccttgagttcatgtacaatgagggtgactcatcctctgatttcgtagaggcttatcgttggaacgttgatactgctaacggcgacggtgctccgtatgcggacacctctgcctttggtactctgacactcggagccgcaccagtcgtcgacaccacctctgacgacaccgcgtccgcatccaccgcagacgctggcatcatcgcggctgtcgcatctctcgcggcttccggcgctgctgttctctcgcttaagaagagaaagtaatttcagtacataaaaactgaatagcggattatatataacgtaatccggaagtcgaaagacaagccctgacgccagtgggttttctcgtcgcagacgagaaaacccacacggcgccggcgccccacacggcgccggcgcctgtggcgtcaggtttttttattgttttgcaaatcattgtaccggcaaaacgccgttgtatcaatggcgtctcgcttatatcgacgttaaatcaaatcaaagccggagcaaatcccggcaaaattccgcggtttattttccacggaacaaagacggaaccgggtcatacactgttccgtcaaacggcagaaaaccgcaacattttttcggaaaacgaggtattttatcatgaaaaagttcgcatctctcgcactcgccgctctccttgtcactgcgctgagcgtttccgcgtccgcagccgacagcttcgaggcagcaaagggcaccgccaaaatcgacggcgtcaaagacgacatctactgcaccgacccgatgaccatcaacatcgacgaagcaaccgactccgccacaaccgaccttgccaccggcaaatgctggtccgcttgggacgacaacaactactacgtcttcattgaagtaaaggactccacccccaccgacccgtccacctgctcctccgactgcaacagcgactccatcgaattctacatcaacctctccggtgaggaaggcgccaccaccgacatcaacgccggtcagtacacagtcggcccgaacttcaccgcgatgaacggctacggctaccacgagtccgccaacgccgccaacaccgtctgggcggcaaccaccaccgctgacggctacacagtggaaatcgccatcccgtggggctccgaatactcccccaaggctgacgcgaagatcaccgtagcgtgcggcatcaacgacgacaccgacaaagacggctccacccgcgaaggtcacaccttctccggcaccggtctcggcagctcctggtccaccgccgactccaactggcagaccatgaccctctcctcgaaggtctacgaagctcccaaggctgacgaagcaggcgactccgcttccgcttccaccgctgacgctggcatcatcgcggctgtcgcatctctcgcggcttcccccgcccccctttttcaaaaacttttatacatacaagaaaaagccctccggatgagggcttttcttaattaaagcatagtttggatgacgattgaactttacggacgctctatctttgtaggggcgaccattggtcgcccgccttcgagggcatcgcacaaattaacgtccgtggtaatgatataggagcgggcgaccaatggtcgcccctacaagcgtcgtgccagattcagagcaggttattaattaaagcacaggcgcgcactccgccgcccatacctccggcggtatcaccccggcgggcatattgcactcgaaatagatggttccgcgatcctcctcggcgagcggctgtacctttatccgcgccgtcctgacgccgcgcacgtcgatgcaccagacgtccccgtcgcagaaatgatcgttcagaagcaccggctcacaatccatcgaatacgccgcggcgacattcccgtacaccctgacgcacaacgtctcgacgccctccggaatattcacctcgtactcgaccgtgtggtcggtcagcgacgagccgtcaagccttctcagatgcctgaacgcctcaaatgagagcccgcacggaaccatcctgacgtcaagtctcgtgagcggcgttttctcagccgtcatgggcgcgccgagcttcaccttcacgccgccgatctcatcgacctcggagagagccttcaccgtgccgtccgcgaagcacacgaccggagcgacacccctcagcgggatgaactcgacaaggttatcccgaaccgtaacaggcattgccgtgatatatctgacaatctcgctccctatccggaacatgaacgggaacacgccgcagccgcccgccgggagggtcatcggtatcgttatatcaccgtcgttcagccctatcgtcaggtcaagtttcttctccgcgagagtgtccgtgtgaacgtgattgttgtagaacacaaacccgctgatgccgtcagagcgcaccgcgactctcggcgtgtcggtgtcactgagatccttcggcatttcgttcgggaaggccgggcgcattaccgcgagagattccacgcacgcgtcgacgaaacggtgcaggtcggcgagggcgaagtaactgtctcttgtctgaccgcagtcgccgagcggagcctcgaagtcgtaggagacgaccgggcagtcgttcggatagccgctctcacggctctcttcgaaggttatgagtttgccgttttcgtctctttccgtcgggtttactccgccgtggtacatatagtagccgagtccgttcgcgccggagccgagcttgcagatcgcgagggctgtcagatcctccggcaggaagagcgggcggcggtggtaggtgttctggttgccgccgccgagctcgcaggtgaggaacgggtatctgccgcggtaggggtcggtgagcggctctccggacgcctgaccgaggaggtcttcgccgatgacgccgtcttctctcacgtgcgagaagaagtagttggcgttcggtccgagttttcgtgtatgaccttcccacggggcttcggggtagccgccgaacatcggctggaggtcttccggcagctttgctctgccccacgcggtcgcggaccagatgggggcggtgaagccgatttcctggaggatgtctttcagcatcgagaggtattctgggctgttcgtgagctcgttgtcgacctgtatcccgacgatattttcgctgcctttcagctgttcgtatatcttttcaaagagacggcggacataggagatataggtcttgtcggtgctgcggagcgggagcccctttttcatcagccagtcggggaagccgccgttgcgcgcctcaccgtgcgcccacgggccgatgcggaggaagaagggcataccgaccctttcgcaggtgtcggcgaagaggcggatgtcgcggttgccggtgaaatcgaatttgccttcggtgttttcgtggtggttccagaagacgtaggaggcggcgatgtcgattccgccgtttttcattttagtgagttcgcgttcccagtctttttgagggacgcgggagaagtggatttcgcccattttcatgacgcagggtttgccgtctctcagaacggcgtcgtgggtgacggtccagctgtgaccgccggcttcaccggtcatgtgtgtcggcgtgaggtcgggcaatgtgttgtctgcttttataaacatatgtggtatcctttcgtgttttccttaattataccatgttttgtcctttcttgcaagtgtttgtgccaaaaaaagataataatcctcggagagcgtaaaaaaggacagatttgtttctgcccttgtttgtatgaagtttacggggagagggggtgcagggggagagggacgcttttcaaagcgtccttctccccctgcaagctaacggtcagatgagagctccgttgtctgtgagaatgtcttgcatggtcttgaccggaatatcctttgacgcgcagtcgtgttttcttacgagagacgcggcgattccggcggcttcgccaatgcatgaggtgattggcatgatgcggaaggaggagtgggcttcgtgggtggaggagatgggtcttccggctactatgaggttgtcggcgcctgtcgggatgagggcgcggtaggggatggtgtagaagtcgttttcggggacggggcagtggtaggtgccggttccggcggggttgtggatatcgatttcgtaggtggcgcgggctatgcggtcgtcgtgtttgtgggctttggttacgtcttcttcggtgatggtgtagagaccgacaatgcggcggctttcgcggatgccgatttcgctggcgctttcgattatgtcgcagttttcgcagccggggatgtttttctttaagaagaggaacatttcgtacatttgctcgcgggcggtcatttcggcttcggtgaggtcttctaccagagtcgggtttttgcctactattctggtggtgttgaggtgcattatgttgtagaccgggtagcggaagacgaggatgtcttcgcgggggttctttatgaggcctttttcgcggtattctttgtagagggcgttggcggctttgccgtcgtatctggaccagtctacgtttgtcaggcggaagtttaatgtcatgggctggcagagtccgtcggattctctgccgaggttgtattcgagaccggcgaaggcggtgaggtcggcgtcgcctgtggcgtcaatgaagacgggggcggtgatttttatgttgccctgcggtgtggagatggtgattgacttaatggttctgccgtctctttcgacttcggagaggagggagtggaagaggactttgactccggcttcttttaccatgcggtcgaggaggagtttcatgtattcttccttgtaggcgccggaggtgtcggagtcggagccgccgagggcgtgcattcctttgaggagggtcgagaagagaccggcgttggcgacggcgccttttcctctttctctgtaggacatgaaggggaagacgagaccggaggtcgccataccgccgagacagccgttcttttcgatgaggatgactttcattccttctctcgccgcggatatggcggcgaaggcgccggcgagaccgccgccggctactattatgtcgtagttgtgttccatggcttttgatcctttctttgcggagaggtggttttccgctgtatattaatatgatagtacatttttgccggtttgtcaatcgttttttcaaatctgaaacagtaaaaatcaaactttttcttgattttttctgatttgtgtggtagaatatatgtgatgggatgcctgattcggaggatctggaggtggagctgtgaggtttgaggagattgagccggggataaggtatacgttcaggactaatgtcagggaatacaatgagccggtggtgcaccataagctgtcgatggcttatcggtttctcactataattgaggggagcttcaggctgctgaccagcgggattgaagaggagtgcgagcggggggatcttatttatatgccgccgggggtggagtatactacggtctttcatcccgggaattcggagtttctcaatatcttttttgattattcgaggcgcgggggcggtagggtccggaatgagccgatatctgactttttcgttatgactgattatgagaagccggatccggaaaagcgttcggagattgtcgagtttactgatctgccggagttttcgcgggtgcaggtgatacgcgggatgccggacgcggagatgcggtgctcggagatacatgagattttcgacggcgcggagaggttcgcgggattgcgggcggattcgaggctggcgtcgctgctggcggatacggcgcattttctgacggagcggcgggagagcacggcgctgaaggtcgtgagacgggtggtgtcttatattgacaggcattatcaggagccgctgacctgcaagggggtcgcgctggcgctggggtatcatccgaattacctgaacaggctgatgcgggagcatatgggcgtttcgctgcatgatcatatcgtgtcggtcaagatacgggcggcgaacaggatgctgttcgggacggatatgtcgataactgatatcgcgtacgcgctgtcgtttactgattcgagccggttttcgagtgtttactgtgccgcgacaggtatgaagccgtcagagaggcggcggatgatgcaggagagtgcgccggaagttcagcgcggcgcggatgtttctttgaaaaaagggaataatggtttgaagggggattaatatgatatataatcagacttggcttgagaagctgagaaggaggttcggacggttcgggataccgaatctgatgctgataatcgtgggggctatggcgatagtgtttgtcatggatttcgcggttatggcggcgagcgggcggtcgctgtcgtcggtgctggcgtttgaccgggcaatgatattcaggggacaggtgtggaggatatttacgtttttgttcattcctccgtcgtcgagtcttttgttcgcggcgctgacgctgtatttttattggctgatcgggtcgacgcttgagaatcagtgggggagcttcgggtttacgctttattatctgctcggtgttgtcggggcgatagtgtgcgggttcatttcggggtacgccactaattattatctcaatatgtcgctgtttttcgcgtttgctatgctttatccggattatcgggtgcttttgttcttctttattccggtgaagatgaagtggctggcggcggtggacgcggcgttgtttgtgtggagctttatcacgacggactttgccggtcggctggcgctgatcgcggcggtgatcaatgtgtttgtgttcttcgggccgcagtttgtggattgggtgaagtcgctttaccgtcgatggaagtggaagcagaatttcaaaaaatagatgttctcccgggcgagctcgtcaaacagacgaaaagcgcccgggcatttcgttctatttctacgcgtccgaacatttattttcaaaaaatctctttacaataaaaaatgtatgtggtataatgtatagtatgaagtttgagggaagagaggggtgcaggggagaggaacccccttttcaaagggggttcttctcccctgcaagcgaagggttatggaccgttttaagttgcacgcgccgtataaggcgacaggcgaccagccgcaggcgatagataagcttgccgccggggttgagtcggggatgcgggagcagactttgcttggcgttactgggtcgggaaagacgtttactatggcgaatattatcgctgaggtgaatcgtcctactcttgttctggcgcataataagacactcgcggcgcagctttgttcggagttccgggagttttttccggagaacagggtggagttttttgtgtcgtattatgattattatcagccggaggcttatataccggggcaggatctttatattgagaaggattcggctattaatgacgagatagatatgctgaggcatagcgctacttcgtcgctgcttgagcggcgggatgtgattattgtttcgagtgtgtcttgtatttattcgctgggtgatccgcgggagtacgggtcgatgctgataccgctcagaccgggggcggttatggagcgggatgagcttgtcagacggttgatttcgcttagttatgagcggaatgatattaattttgtgcgtgataagttcagggtgcgcggggatgtggttgagatatttccggcgtccagcggggataaggcgatacgcgtggagtttttcggggacgagattgagagggtttccgagataaatgtcgttaccggggagcttgtgcggtcgcttagttatgtttcgatatttccggctacgcattacgcggtgagcgatgagcggcgggaggcggcgcttcgggagattgaggaggagatgcgcgagagggtggatttcttccggagtcagaataagctgcttgaggctcagagaattgaggagcggactaaatatgaccttgagatgcttcgcgaggtggggttctgttcgggaatcgagaattattcgcgggttatgtcggggcgggcgccggggtctacgccttatacgctgcttgactatttcccgaaggattttctgttgtttgtcgatgagtcgcacgtgactttgccgcaggtcaaggggatgagcggcggagacttcgcgaggaagaagaatctcgtggagtatgggttcagattgccgtcggcttatgataaccgtccgttgttctttgatgagttcgagaggaagataaatcaggtgatttacgtgagcgctactccgggggagtatgagcgttcgcggtcggagcaggttgttgagcagattatacgtcctacggggctgcttgacccggagatattcgtgagaccggttgaggggcagattgacgacctgatcggggagatacacgcgactatcgataagggcgagagggtgctgataactactcttacaaagcagatggcggaggacctgactgagtaccttgaggggaatatgataaaggtcaggtatattcatcaccgggttgagactatggagcggagtgagatacttcgggatttgcggcttggggtgtttgacgtgctggtcggtattaatttgcttcgtgaggggcttgacattccggaggtgtcgctggtggcgatacttgacgcggataaggaggggttcctgcgtagtgagacgtcgctgattcagacgatagggcgcgcggctcgtaattcggaggggcgcgtgattatgtacgcggatacggtgacgccgtctatgcgggcggcgattgacgagacggagcggcggcgggctatacagcaggcttataatacggctcatgggattactccgcagacgataaagaagagcgtgcgcgacctgattgagatcggacgccgtgaggcggagcgctcacccgagaagaagctgtcggacgcgctgcgtgagaagcgccgcctgagcccagcggagaaggagaagctgatcgacgacctgactgccgagatgcgcgaggctgcgaagaagttggagttcgagcgtgcggcggcattgcgcgatcgtataaagtcgcttaaatcataaaaattatttgaaagtttgggaaaaagaggggaggtgcaggaggggagagaagcccttttcaaagggcttctttcccctcttgctgcaaacaaatggcagaacttaaattgcgtggcgtgcgcgtccataatttgaaaaacattgacttgactattcctcgtgataagcttgtggtgttcactggtctttcaggttcgggaaaatcgtctttggcgtttgatactatatacgcggaggggcatcggcggtttgttgagtcgttgtcgtcttacgcgcggatgtttctcgggcagatggataagccggatattgattcggttgaggggttgtcgccggctatttcgattgaccagaagactacttctaagaatccgcggtctactgttggtacggttactgagatatatgattatctgaggctgctttacgcgcggattggggtgccgcattgtccggtttgcggtaaggagatacggcagcagacggtggatcagataattgacaggataatggcattgccggatggtacccggtttatggttttggctccggtcgtgcgcggtaagaagggtatgcatgagaaggtgttcgaggacgctaagaagggcgggtatgtccgggcgcgggtcgacggggcgatttatgagctttccgaggagataaagctcgataagaatcagaagcatacggtggagattgtggtcgacaggttggtgaagcgggcggatatacgtccgagacttgcggattcggtcgagacggcgctgaggctgactgacggggaattgcttgtttctattgtccttcgcgagggcgagacttttgacggggagactgagatgtcgttttcgcagaagtacgcttgcgaggagcatgggatatcggtcggtgagttgtcaccgcggatgttttcgttcaataatccgatgggggcttgcccgaggtgttcggggctcggggagctgcggattatttcggaggagaaggtgattccggacaggtcgctgtctctccgcgagggggcggtgcaggtcaatggctttaagtcgctcgaggaggagagctggaatggtccgctatttgaggcggtcggggagaagtacgggtttacgctcgacactcccataaaggattattctaagacggcgctgaaggctctgctttacggcaccgggaatgagctttacgacgtcacgaggtactgggagggcgacggacggcggaaggcggttaagttcgacggtatcgtcaatatgattcagtcgaggcttgagtcgaatttcaacccggattattacgagcagttcgtcgaggaggtcccgtgcccggattgtcacggcgcgagactgaacccgatgatgctcgccgtgacggtcggcgggaagaatattgatgagttctgccggctgtcggtcacgaaggcgcttgagtttgtcgggaatctgaggctcaccgagacggagcagacgatcgctaaggaaattctgaaggaagtgaaggcgagacttggctttctcgagagcgtcgggcttgactacctgactctggcgcggaaggcgggaactctgtccggcggagaggcgcagaggatacgtctcgcgacgcagatcggttcgtcgctgatgggcgtgctgtatatcctcgacgagccgtctataggtctgcaccagagggataactcgaagctgatagcgacgcttaaaaagctccgcgacgcgggaaacagccttatcgtcgtcgagcatgacgcggagacgatggaggcgtcggattatatcgtcgatatcggtccgggcgcgggcatccacggcgggcagatcatcgcgcagggaactccggaggagataaagaacaacccggcgtcgataaccggcgcgttcctctccggcagagagaagatcgaggtgccgaagattcgccgcgcggggaacggaaagttcctgaccgttcacggcgcgagggagaataaccttaagaatatcgacgtcgcgttcccgctcgggctgttctgctgtgtcaccggcgtgtcggggtcgggaaagtcgtcgctcgtcaacgcgatactccaccgtgtgctcgcaaaggagctgaaccgcgcgataacttatcccggaaaatacgacagcatcgagggaatcgaaaatctcgacaaggtcatcgcgatagaccagagcccgatcggacgcactccgcgctcgaacccggcgacatataccggcttgttcggcgatatccgggagctgttcgcgaagacgccggacgcgaagatgcgcgcttacacgtcgggacgcttctcgttcaacgtcaagggcggacgctgcgaggcgtgcgagggcgacggcgtcaagtgcatagagatgcacttcctgccggacgtctacgtcacctgcgacgtctgtaaaggcaaacgctacaacaaggacactctcgaggtgaagtacaaggggaagaacatctccgacgtgctcgagatgacggtcgaggaggggctgtcattcttcgcgaacctgccgaagctggcaaagaagctccagacgctgtacgacgtcgggctcgggtatataaagatcggtcagtcgtcgacgactctgtccggcggcgaggctcagcgcgtgaagctcgcgaccgagctcgcgaagcgctctaccggcaggacgatctacatcctcgacgagccgacgacaggactgcacatggcggatgtcagaaagctcatcgaggtgcttcagaggctggtcgacgccggaaactcggtcgtcgtcatcgagcacaacctcgacatgataaagaccgccgattatataatcgacctcggacccgagggcggcgacggcggaggaacagtcgtcgcgaccggaactccggaggaggtcgcggagtgcgagaggtcttataccgggcagtatctaaagaagatgctggagaaataaacaaaacggtctgccgttctttgacggcaggctttttgttatattgaagcttgattgtgttaatagtaacaccattcatttgttatataacacaattaatgtgaaaataccggaaaacacatattttttaccgaaaaatacatttacaaactgacataattgatgtataatagtgacaactatcattccgacgcgagccggattgtatgccgtgccgccccggaaaaaaaccaagggagttttcagcatgaaaaaacatgaccagacagcgcttatcctcgcgttattcctttcctgttccgcgttcctgacctcctgcggcgacgccgctcagactgcctcgaccgacacttccgcagacgacacgacatccgcctccgaggagacgacggctgacgattacgggtatgttgacccaagcatcgggaagaaggactacggcgggcgtacgttcactatcgtttaccctaactggtcgctctataacaactactatttcgcggaggagtacgacggcgatatcgtcaacgactcaatatataaccgcgcgaaatacgtcgaggagcggctcgggatagagttcgcgtactacaatccgggatatgtcgaggcggttttcccggcggtgcagaagacggtgctcgccggttcgcccgactatgacctcgccctgacgcattgcgcgacgagtatcgtgtcatacccgaaggagggcatcgtgctcgactggaacgcgcttcctggcgtcgatcttgacaagccttactggaatcagtcggtccgcgagaatttcgaggtcgacgggatccttccgttcatgtcgagcgactacatactcccggacgtgaactcggtgttcttcaacacgaagctgatagccgacaacgcgcttgacgacccgtatgatctcgttctctccggcaaatggacatggacaaagctgcgcgatatggcgaaggtcgcggcgcaggacctcaacggtgacagcgtgatggacgatcaggaccagtacggcttcgtctgcgagcgcggctggcagacctcttctgttccgatttcctgcggtcagcagttcttcgcagccgacgccgaaggaattccggagctcgcgatgaataacgagaagtcgcagaatatcctcgagatgttcacggcgcttctctggaacgacggctcgtcgttcagctgggaatataaagccgagtacgacccgaataacggcggaaagccgcctgtcgactttggcagcgggcgctcgatgttctatctgacgcctctcagcctcgcggtgtcgttcagggacaccgaggtggattacggcatccttccgctcccgaagtacgacgagacgcagaaggattatctgacgctgaactgggcgggcttcatgtgcgttccggcgtccgctggcgacccggagcttgtcgggcttgtcgcggagcttctcgcctctgagagctgccgcacggtgattccggcgttctacgacgttctgctcggcgagaaggtcgcgcgggacgagaaggcgaaggagacgcttgacatcatcttcgagaacgacatctacgacctcggcgtgaatctcgggtattacgggctgttctgtgatcagctgaaagacagctcgccggacaactcggcgttcatcgcgaagaagctgaacgcggtcaacaaggatatttcggactacgttgacggatgcagatcttataagaaataaaaaaataaccgccgcggacacaatccgcggcggctttacgtattctttcgtttattctccgatacgcttcttgaataaagtattcacaagcgcgatggcgatagctccgccgacgacgcaggtgacccccgcctcaatcgcgccgttgacgccgacaaacgcgaggatgaacccgaagacgttcgtcttgccgagcagctccttgaagccgccgatgtagtcggtgttccagaagaacgcgacgagcgagcccatgaagagcgtcgtgttgaaaagagcgaccgacagcgacgctatcgggcagccgatgatccttgccttcggtccgatcttcgagatcgccatgtagatgagcccggcgagccagcccgcgaggatacgcgcgacgacgcaggttatgaacgtgccgaccggattcagcgacataagcgtcgttccgaacgcgtccattccgaagcactgccagaagcttgtcgcgccccagatcgcgccgagcaccgcgcccgccgccggtccgaccgtgattccgccgatgaccaccgggatcatgatgaacgtgatagacagcgctccgaccttcagatacccgatgggcgtgaagctcatgagcaccactatcgccgcgagcatcgccgtctcgacgagcttcagcgtcttctgatgtttctgttctctctgttgttgtaccgtcatttttttctcctttgctgctgccgcgtctgtgacttgtgcagcgctaaaaaatttatttataacacgaagatcggggcgggcttttccgatagatgtcacttgtaatcatatctttcgtacaagc

SEQ ID NO: 264 - DNA, 32759 bp, Unknown
  16S sequences of unknown bacteria
ccacggacggtccgcccctccacctctaccgtctcgcctgctgtaacacagcggcggaaagcagcattctctattttcaccaaaaggggaatgcagccttccatcgactcctgaaacaatccacagcaggcctgtgccataatttcacacaaaatcacgccgggaaccaacggctgatttggaaaatgcccatgcaaaaaccattccgtcccctggacgcgataggttcccctcacgtatcccggttgtatctccaaggcatcaagcagcagcatatcgtctctatgcggcaaaagcgtctgaagttgttctcgatccatatctccttcatccctatccatgttttgttccgcaaataccccgtatttcgccaacgtccctcgtcagtccggcaatcgtgcggacggcaggtcatatattcgtcacgccgctccgatcaaggaaggacgtccggctcgagtgttgtgcgcagttgtgtcgaggacgctctttttttcgttccagcctgtattacctcgattttcaaagagaggcaaacgttttcttcggggaagcctttgaccgaggcgtcggcgccccgtgccaaaacagaggggcgaagctggaacagcgccagggcaaatgacttctcgaaaaaaggaaatacataatctacacattccaatgccgccagaagccgcaaccggtcccgcagatgaaaataggggaaacgtcctttgttgcggtacacggaagaatcggtattgacccccacaaagagggcatcgcccaaacgcgctgccgcctccagatattctaaatggccgatgtgaaatatatcaaaacagccacaggcagcgacaatccgaccgctgggatgctgttttcgcagccataccgcttcttccctcgtaaccgttatacccattgcccatctccgtccgtcacggcattgtatggctgccgatgcacattttctttcgcagtgccgatacgccgcgaaaaagagaaaccatcaattccgcactgacgtttccctgatggtacagccctttttccgtcagtacatagccttcgggatcgttcgcaatcaaaccgtcctctgccaggcggcgcagcggctcctcaaataccgtatccatggaaatatggaacgcatcgaaaaaagggttccgcaaaacccggcctttccgaaatcccatgatgacggcgcgctcacggagttgttcgggcgtaatctgcgcactgatcctttccaccggcaaacgatcgttttggagcgcttttatatactcctctacactttccgcattctggtagcagtaaccgttcagatacccaaaactggacacgcctattgctatgttatcaccaaacccgtcgtaagttgtatcccaaaaacgggtgctcttccccgccttaccatattcctgtacgctttgaagcgtgtatccgctctgcaaaagcagtcgatgcgcggcacggaacatggaaaaacagctttccgcatccggcaacttatcagaaggccggcggtccaaatccttatacaattttgtataggcaaataccaccagtttatatagggaaatgtgccccatccccctgtcgatggcatgctgtacatcccgcagcagctcttcgatgcccgttccgggaaatccatacaaaatatcaagcgattcgtcatcaaaatggaagtctctgagcatatccagccagagctcgacggagtgcgacagccgtgcaatgtggtatgttttccgaatagagtcgcggaagctttgtatgccggcgctcactctcgtcacgccgttttcttttaagaccgtcagtttttcgcgggtagcgttaagggggttgcattccaccgtcatttcacagccgcgcagatcaaatgccttgtgaagtgcttgtaaaatcctttccagctgccgcttggacaagactgagggtgttccaccccccagaaaaacagcagcgatttttgtgccggccacccgttcgctccgggcgtatatccctatttcacggatcagggcgtcgacgaatgcctccacgacttccttattgcccggagcgagcatccgattatacacgcagaaatcacaaaggcttccgcaaaaggggatatggatatacatcgacgtctcccatgggccgccctcgtctgtgtgaaaaggcggagacaagagccgtatagaggcatcttccggcgtattttgataaaacagcgggtaattcattaccgcgacctcataattggtcatgtcgactccttaatggtaaacttcgaacagcgtggcttgagccatatggccgccggcgcatatcacgctgatgccatatcgggcgtttcgcctggacatctcccataaaagtgtgacatccatgcgcagccccgtcgcaccgaccggatatcccagcgccagattcccgccgtttacattgacccgttcaggcggaatccccagcgccgcaatggttgccagcccctgcgctgcaaatgattcgttgatttcatataaatccacgtctgccatggacagagacgcctgacccagcagtttgcgcaggcatgtgcccattgcttcgccgatggtatgccgcggcacaccgacggatgcatatcctctgataaccgccatcggacggattccgtatcttcgtgacgctcgttcttccatcagcagtacggcggcggcgcaatcggaaatcggcgcagcggtataccgtgtatgcagtccgtcttttaaaaacagtggttctgcatgttggacatcaccgaatacggtatcgttctgcactgtttcgtcgacggaaagtgctccctcgtcatggatgaccggcagtatctccgcctgtaaacggccggattgctgtgcatggcgggctttctccaaactttggtaagcatattcatccagattttcccgccgaaagccatattttctgccgagcatttccgccagatacgccatatcgttttcctggatctcttcagcaaccgattcgtataacggaagattcccccgcatggcgttttttactttctgcttcatcacccccaaaatgtggggggaattgctgcttttttccacgcctcccaccaaaaccgtatcggcattgccgcattgtatggcttgtatgccatggaatagggcttcgtccgatgaagcgcaggttttactgacggttgccgacggaatctccggtgaaagggtggcggataatacggctttgcggcacagattatcgcgctccaccggaaaagcggagcctgccaccgcctcatggattggaacgccttgcgcgcttgccgccacattctgaaagacctgtgcgagcatctccacgtcgcttgtcccagaaagctcaccggggatttttccgcagggggtccgccgggcatatagaaccgctacgtttctttccgtaacctttgcccccctttctctccccttttcagggactccttcagccaggcggctatatcctccccaaattggcggcattgttgtctatcccgtcgatcctgccactgaatacgttccgagtgaaaagcaggctgtctggcatcgatacgacgcaaaagacgttgcatggcctgtctatcggcggtggtcagcgaatcccacagcagttttccaggcagtgaccgggtcatgacaggaacacagggtgataaataatgcagaagaagttctaaaaacccttggcaggcgtcccggtattctgtcgactgcgcccacgacgtaatgaacaaaaacaccggcacacggcaaagcgccgccttatgccttttaatgaataccgtcatatcttcggctggctttccaataaaaaccggcgtccccaaaatcaaaaaatcgacggtatcgacaggaaaatcggaaacctgcctagtagagacggaaaacgggattccttcgctgatccactgacagacctgttttgtggaaccgtatctcgtcgcgtaaatcaaatatcctttcatatccccaacccgtccatcagctgaaaaagttgtctttaaagatttgaatccccaattcctttcggccctcttgaatcgttttcagcgcctcatccacagacatcccctttgtggtacggtagggatatccaagggcgacgaatcccgtatcatcataacggatcaggctggaatcgtccaagtcgacgattccatattcttcgtaatgctcccgcatatcggaaatcattccgaaatggacaatgtacacccaatagtaataacggcggttgtcccgtaggaaccggatggaatcccatgcttcctcctttgtttctgtgggaaaaccgatcaggcaactcaaaatgctctgaataccggcgttatgcatatttttcagtaccccaagcatattttccggcgtatttcccttgttcatcaggttgagcattcgctggttcgcggattcgaacccaaacagcgccgtatggagcccgctgtcacgcagccggcggcaaacttctgcggtaaatccgctgtcaagccgcagataagcatcatatcgcagatgcatcctacggcgaaggattccgtcggccatcttttccatcagccgcggatggatggcgtcgtcgataaactgaaaggcgtggaccccataccgctttttcatctggtcaaaatgatcgagcaccgcatcgacctttcgcgttatatagcccttattgtcccgatagctgcaaaaggcgcatttgccccagtaacagccgcgggaaaactgataggggagcttggcgtacacatacttctcgagcggaagatcggaaaaatccgaaagagggatctcttccattcgcgctatttttccctccggatttaccatcagttttccagattcatcaaaagaaacgagactcgggacatcctttagcccttctcctttttcaaccgcccgaatataccgctccatcgccagttcccccattccgacgatgagaccgtcaaacgctgtgagaaacggcggatgttctacaagcagcctccagaataatgagacctgcgggccgcccatgacaaccctgaccccgggaaaccattttttgatctcccgtccaagcaaaagagcatagaaaatctgactggtaaaggggagggatattccaatgatatccgccggattttgctgcagccacggccttatccgttcccgcatgaagcggataatgctatttccatcccgctccacgtcggtctcggcataggctttttttatcttgtccagcgaatccggccggaaacagacttcgaatatgttcgaaccggcgatacgaagatacgtattgatgagtttttgtgcacggtcttcccgtccggatgcgatctcacaggcaaacacgtttttcgcatcctgaaaacggccgcgcaactcctgcagagaataccgaagtccgcgttcatagaaataacgctggattttttcgaatcctccggccaggatctcgtccataatctccacgttaaaatcatgaaccgtacaggatatcccctttgcgcgcaaataccctttcagcatcggcagggccaggtgcggaaattcatgaacgctcagtggaggattcagcaggcagacctgcatatgtcacccttctttccacgggaatacacatggtattctaccgtttttcccatcattgaaacaggcgctatcgttcctcacggcgccagctcctcaaatgtacacatgctgttcgatacgccaagggcggtctcgatgatccgcatggccagcggacagccggttccttccccgagccgcatgttcaggttcagcatgggggtcagtcccaaggcatcggccgccagctgatacgctggttcagcggagcggtgtgaagcgaacaggaatgtccggacaagcggctgaaggaaactggcgagcagggccgccgcaattgagatcaagccatctacgaccaccgggattcggtaataagcggctccgagatacaggccgaccatcgcggcaatatccagccctccaactttggagaggatatccaggccatccccggggatcggctggagaaaaatcagcgcgttttggatcactctttttttccgtgtcaaaccatccggcgaaaggccggcacctgtaccgacaaaacggctttcccgaatgtccaatccggcaaaaatacaggcggtggcggtggtggtgttggccatccccacctcgccggtgcccaagatatcgtaagactcttttttggcccacgccgcataatcgaatccgatttgaatcgcctgttccacgatcgtccgcggcatggcgggcgtgccttttgcaaagttatttgtcccgtccatcaatttccggtcgtcgatccgcggatggtgcagctcccctttcacgcccatattgacaagtttcagtttcacatcatttgcatcgcaaatcacattgatcccgcatcgccgaacatgggcgtagctgagcagcagcttccgtgtaaattcttgtggcgctgtagcgaccccttcttcatacaccccgttgtctgccccgaaaaggaaaagcccttttttgcgtatggacgagtcctgccggccagtgatccctgcatattggacggcgatgtcttccaacaggccaaggctgccggcgggtttggccaagcgctgctgccgttcccgggcagccgcttccgcgcatgcgtccgtaccctgtattctttttattttttccttatatggactactggacggtataagctgcggcttttcgcaggatgtgttcatagcgtttggttcctctcttccgattcgtcgtatttcaaatatccatgatgaaaatattgatatatgcgccgtatccgttccggagaattgaggcgcgccagaagttcccgatagtttgattgaaaacggtccgccgtcatgtgcctcaatggatgcagcagggtaaagccgtcgtacaagctccaatcagttgggagcggcacaccgctttcgatcatcgcccggtacatatcggttccgggaaatggcgtcgatacggtgatgttggtgccatagagacaggtgtccagaataaaggtatacagccgttcaaaagtttccggcgtatcgtcctccaatcccagcacaaaactgcccaccacaccgatgcgtcggctttgaatggcggaaaccgccgtcctatatgtagccagcctggtttctttaaaaccagacgcattgatctgatgcaaattgtttttgctcaggctttcgaagccgatcaacagttttctgcatccggccgcggccattttatccaaaagatggcctttattacaaactgaaacgtcggtgaaggcataccagtccaccgggcttcccataaggatatccagaatggaatccgtataagcaggatttatacaaaaattatcgtcggtaaaaaataagaaaggccgcttccaatgggtacgaatcgctgcaatctcccgcttggcctgttcccgcgtttttcggcggaccatctttccgtagattttggaagacaggcaaaaccggcactgatggggacatccgcgggaaagctggatcggcacgcttttatagggatatttcacggccagatcgtatcggggaacaagagaggattccaaaggtggataccggcgggcccggtagattttttgtgcccttccctgctgctcttcacgaaaaaataaaggaaacagttcctcgctttccccaacaaacaccgtgtccgcatggcgggccgcttcttcgggacagacggtcacatgcggcccccccatcaaaacacggcttccccggcggcgataatggtcggcaatacgataggcttccggcgcctgcgcggtagagggggacagcaacacataggtgaatccacgctccggaatcgcttcaaatgtttgatcgacataggtaatctcgaaagaatccggaagaagcgcggccacggtcagcaatcccaggtttggcgtgctccacagccggtcccgggaacggaactccgccaactggcggtcacctgcttccggcatgttccggttggttagggcaagcagcaaaacggtgaccaacacaatccccctttcctccgctctcatccgtccgatttcgaaatacgcagataatacagttcattgcgcaatgtatcggagaagaccagcgcaccgtccggcagagcggccagtgccccgatatggcccagcttcgtaccacgcaagtttttccacagggaggaatcgagcagccgttccagcctcccctgtcccctttgatacaggtaaatcgcccgtacggtactgatgtacaagtcacccatttcgtctgcagccaccgcaatcggtaaaaatccggccggtgtttccccggcaagcgccgtgcagcgcccatccttcaaggaatagcataggatgcggccgcaggctgtatccgtcacaaaaaggagagaatcccataccgctatcccgtacggctgccggcagggaatcccgtccaatacggtaagtctcccctcacggtttcggcggcaaatccggtcgtgatggaaatccgtgaaatacaggtttccccattggtcggcggctacgcttccgggaaaatcgagcggcggggtcagctcgtccggtgacacaagtgaatcccaggtcttatccgtctgccgaatccatatcgtgttgtcaagcgcgtcggataccacgagacgcccatccagccgggtgattgccaatggtctccggaaaacgggggatgtatcaaatgattggaaaccatgtcggatctggtcgaaacagacaagcctccggtttcccatatcgactatccaaaggttccggttttgaccgtcatagagtatccctgacggataggccagccccgtctccctgccgacaagtatccgcgcgtcaagaatcctgctcatctttcagatatccgcggaccaggtccgcaaaagaggcgatatcccggatacgatccatattcaaatcgctgtcatcgatttcaatgtcgtaagcttcttcaatttccactaggatagacaacgccaaaatagaatcaatgccgagcgtcagcaatggcgtgtgattatccagtgcatcaattttactttgatccttcatacgggaaacgatgatttcttttaccttttcttcaatgtttctgctcataaacaacctcctgattacgtcaaacaatgtgttagtccacctggaggcagcatacccgattgtttgccccatccaggatatacagcgtgttttgatatacggccaagccgttggggtttgccagagcgaaatcccgtacgccctcacccgaccggccggtgccgattccgactcctccggccacggtgaaaatgcgtttgtccccggccggaagaatacgcacggcctgattgccggcatccgcaataaaaacattgcctcgtgaatccccacagactgctacaggattttgcagacaggcttcccgcgcgtctccgccatccccggagtaccctggacggccgcatccggcaatggtatcaatcctgcgcgagaacaggtcgattttccgaattcgatggttgccataatcggccaaatacagcttgtctccggcggcgctcataccgatgccgtaaatctcctggaattccgcatcgagagcatccccgccgtccccggaataaccgaaacgcccgcatccggcgaaaggacggatcgttccatccctgccgatacagcgaaggcggttattggcgatatcggcaatatacacgttacactcgcggtcgaccgccacgccgccgggcttattcagcagcgaatggcccgccggtccgccgtcaccggcgtcccccgctgtcccctgtccggccaacgtctccatataagagtccttccggcttatccgtcgtaccacatcgtttcccgtatcggcgatatatagcgaatctttccggcaccaaagcccggttggtttgttcagacaagcggacagagcgttgccgccgtctccggaatagccgaaacgcccgcatccggcaacccgaaaaatatccagcggtccgcaacagactatctgatgggagtcttgatcggcaatgtaaacccatccctgttcatcggccgcaatggcctggggctcccaaagaatcccctgttccttcggcagcgcctgcttcagagtcccgacacggccgggccctccggtgatcacatgcatggtggcatccggcacgtagaggaggcgggatgagtcggaatcatgttcccggggccgtatttctccgccggctatctgccaacggtaactgaaaacttgattccggcgcagggcctttgccataaatagggcggttatcgccctatgaagaagcgtcgatacatcgccggcatcttccggaaaattaaccactccggcgctgaagcttattcgaagagaccgatatgccgccggcagcccttcggtaaatcgatggcggcgaaaggccaggcgaatttcttccgctgccccaacgcctttctccagatcggcactgggcaggaggagtgcaaattcgtcgccgcccgcctcgatgaaccgggcgccctgtactgcatgctccgccgctttcgggaggaaacggcggatttgctccagcatttgatcacaggcagcggatgaaaaacgcagacgatagcgaagaaaaaagtcgatatctaaaagaatcagtgtatagtgacccttctgtccggtaagccgttcttcaagtattttcagaagcttctgcatctcttcctccctcttcccgcccgttaccgaaagccccggaaaaaggattcttcatccgcggattgctgtttggtcccaaaaaagcgcaggtagcggtcgatccgtttcatcagtctttcgggcatccaaggtgtattggccttgtcataggtgaaattggcccatccttccaaagtatcgggaaatgccattcctgcctgacgggccacgtcgtaaagcggcgtacctaaatagggagaaaaaacaaacaacaggatttcactgtttttatcgatatgccggatttgcccgataaggtcaatcgtgcgtgcggtatcctgttccgggttccacggaaatcctaccataaaggaaaaagaagacatcaggccatattccttgcaccggcgcgcagtttccaggatctgacggtttgtatgcgccttatggatttttttgagcacctcctcatcaccggattcaccgcccacgatcacccggaacagccctcctcgcctcaaacgctcgatggtttgcggagagaagcgcacaaactgttgcgccaccaccgttccatcccatgcgacacaggtgctgctctcgatcaggccctctgcgaatcgtgcggcccggcgcacatcgagaaaaaaattattgtcaaagaaatgcaccgcatcaatgccgtattcatcccgaagccgtgcgatatcccgcgcgacggtctcggccggaaggccgtgccagtgccgtttatacaccgctccaatggaacaaaaagcacagcggtatgggcagccgcggctggattcataccccactacccgccggtgcccccattgcggatggatgtaccgttccaggtcgacagcggtatatccgcccgccggggaaccgtacacgggataccgcgccatctctatgcggggattgatgacgacctgtcctccggtatctttatacaggacattgggaacccctttaaaaggcagccggtcccgtgccctttgcgcaagctgcggaaggatctcctctccttggccgatggcaaccgcatctaccaaaggatggcggagggtctccatcggcatcagcgtaggatgccagcctccccatacgatcggaatgtgaggtgccagccggcggacggagcgggcgaaacgaaggccgtttacaatctggtagctcgtgatggcactgatgccgaccaacacggctccttccaactgttttccgatctcctcttccgtatatatatgcagccgttcatccagaatctccacctcaaaggacgcagcccgcagcggcgctgccaaagccaccagagacaagggaagggccgtatacaatgtgggagattcatctccgttgatcagggatggatagaacagcacaacccgcctcatgacgattctcctctcaacagcagggaaacagcgcggctgaccgtttgacccattttctcaaaatccacggggttgcccagtatcaaagactgaatatggagaacatcgctgagtatcgtaagccattgcgcgacggtttccagcgtatccatatccggatccagcccgatctcttcccgcaccatccggataaactgtatggtatactccctgtaaatggcggcgaggcgtttttgaatatatacatcgccgtctttggcttttttccaaagatcgatataggcattcagtgcgtcggggtgttgttcacttccccgtatataagcgtttaccagatgggagagcggttctttttcagcaccagttctccgcagatctttccggatttccgctatccatcgttctcccgcatactgaacggcatccagccaaagttccgcttccccattgggatataggaaacgtagccggtcatcggacaaacccgtggcgtttgaaaaggattgtatcgtccatttttccatgccgtgccgctccagttcgcggaaagctatacgggccaggtgttgcttcgaaccgctcaaaaccgtcggccggattgtttccccggtcagccaagtatcaaaaaaaccggttaacaaccgtccgtattcctcccccatcaccgcacagttggtcatgtgatgggcgcgtggctgccgtatgaagcggctgttttccgatcggatccatcgatatgccctgtatgcgttttcgatggggatgatccggtccttccccccatggataaacaaaaccggcagtcccttcaactttttcagatgctttcttgtcctccggctcatgcggtaaaatccaataaaaaacagatatgtaacaagaaagcagaggcgggcgattcgctttcggatcctccggttgtttaaaacataaagaaaatatttccgtacgtagatcaacgggccgctgtccaccacgacggccttcatctgtggaagctgccgcgccgcattcaggatcaaggaggcccccatggaaaatccgataccgccatatgggccgggtaccccctgtgtttttaatgcctctataaaccggcgcaagtcattgtccaaggtgtagcggctgctttttcttccggcgctttgcccatgattggggtaatcgaacgcggtcaccatataccctgatctcagcaacgcaacgatatatggatagatgctgtatttactgccgcctaaataatgacaagcgataatcgtccctttcgactcggtattcggatagtatttaatggcggacaagcgcaaaccgtttgaatggaaggtgaattcctcagttttaaattcctcctcattttctatgccttttgtgttccgaggaggatgtcccagtttatgaacctcctgcagcccttcccttgcaccggcgaggagacaccccgcgattacgattcccgccaaaatcagcattcctatcagcatatcggcctccctagcagaatttcccgaatcgcgttgttcgcatagtccgccacatacagccgtccatcctgataagccaatccggctggtatgttaaaacgggcatccaacggggaactacgggcatccacatacccgggttccttgtttccagcgacggtatggatgctcctgtcccgcagatccaccatacggatacaatgatttcccgcatcggcaatgaaaagaaaccggtcggaatccacaacaacccaataaggggaatcgagccgtgccagcccggccgggcctccatcgccggaatagccgggctctcccgtcccgcataacgttgagatgcgtccggaaagaaggtcgacccagcggatgctatggttcccgtaatccgcgataaaaagccaccgtccattctgggtcacgcataagccatagggtttattgagctgcgcctgaacggctggtccgccgtcccccgccgcgccatagccgccgtttccggctatggtggaaatgctcccgtctggcgctatacggcgaatgacgttgtttccataatcgtttgtgtatagacagccggcatcatccaccgccacgccgccgggacggctgaggcgtgccgcccccgcatctccgccatctccggaatagccttcctgcccgtcgccggcaagtgtacggacgatcccatcctcgatcaagcgaatgcaatggtttccggtatccgcgatatacacacgcccggatggacggtgtacggctatgccgctcggtttgctgaattccgcccgcagcgggtcaccgttatcgccggcatagccgccccgtccggctcccgctaaagtgtatacccggcccctatcgatatatttgatctggtggttggaacggtcggcaaacaaaagccttccctgcctgtcccaatcaactccgtacggttctgcgatagaagcggtataggccgatgagccgtcctcacagcggccacgaaggcttcggccgatccgggtgcggcagcatccatccggcaaaatgtgcaaccgcttgtcctgtgcggtttccacacggttgcgtcccttctttttcgccgtgagcagagctgtttccgcctccttcagcagaagaaagcggtcgctcaggtgatgggaccacgctgccacaccgaaacttgcacggatcggtacccgctcatatccaggcgtttgaatccaacgcacctttcgaaaccgccggcgatactcctcggctatatggaccgctttatccaatcccgccccttccattaggagcaaaaactcatcgctctctctgcgtgccgcctgtatgtctccgttttcgcacagcatttcggaaatccctcgtatcaccgcgtctcctgcggaccgtcccaggcggcggtcgatgttgtgaaaaaaatccaggtcaaacaagatgacggagaagaccgcgtggctggaaatccgtgcgtcaatccgggcgcataaactctcataagaatacaaggccaggccgtcgttgcttaccgtcattctcagagccccatcccgccgtccagggacaagatctgccctgtcagataccccggggacatctggtcgtccaataaaaagcggacgaccagcgccacctcttcaggggcacacaatcgttttaccgggacgttgctgagcagccgttccagatattcctccgacagacctttgagcatttccgtctcgacggggccaggggcgacggcattgaccgcaatgccaaatgaagcggtttccttcgcaagcgctttggtaaaaccgtgcagccccgctttagctgcggaatagttggtttgtccggacaggccgctgatcccgctgacagaactgatgttgacaatccgtccttttttggctttgagcatataggggattaccgccttggtcatgcggtatacgccggttaaatcgatatcaatgactctgtcccattcggcgtcgtccatatacaagagcgtccgatccatccgaatacctgcgctgttcaccaggccgtcgatagttccataccgcgcggcgatcgaatgcacaaatctcttgatctcttccccatttccggaatcgactctataagcggttatgtatccggaaagatcccgggccaatttctccgtctcgtgggcacatgtatcctccttttggtaggtgaacgcgacgttcgcccctcgacgcgccaaatccaggacgatcgcccgtccaatcccccgggaacccccggttactaaaatggtgtggtttttcagactcatagattcactcctttcccgtgttttaccgtgtcatgccggcaagcatcacgcagcctctggatcatctctttggaacaaagcacccgtgccaagcttctatagggaaaatggagccgtgcaggccggttcagcatacgtttggtctggcacaacgaaattgccgaacgggaagtcaattcggaagcgaaaaagtgtaccgtatccgtcagcgcatcccggtccaccatccgatggagacagccatacgccagcgcgtcgcttgcctgtatccgttccatggacaggcacaatttacgggcgttttccagtcccacgctatcccggagaagcaaaaggccgccgtctgccaaaaggccgccgtatttcggatcgggaaaccaaaaccacacatcctgatttcccattcgaaaatcacaggccaaggcaatagaggccgcggaaccgataacactcccgttcaattccgcaatatacagttttttggaacgccgtatggcgcgtacaatacggtataccaaccgttccgctttatagatacgcaaggccgtgcgccatcgtccagtatgaagcagcccgttcagatccaatccggaggagaatagatagggattgccgctttgcagatgtacgacctggatctggggatctctgtccatttttttaatttccccaagcaggccgcgcagtactgtcatattcagcgcattagcgggcgggtggtcaagaacgagtttttcaaccggattcaacgccgtccctccctgcttgccttctccatgctctcctttattatggcgacacactcgtcctcaagagattgatcgcccttccccctccggaccatatcggccgatatggtccggaaggcgattcccgctttttccaaagcggaacgggacgagggtgccaagggcggtaaaaaggaacaatgccgctgcaatgcgtcgattaccagatccaccttcatcctctttgccagtgcggtcaacttgcggcaccgtacggttgggtcgtagaacaccgatccacaaagccggtccgccatctgtgaataaaacaacccgcggagatcgtctgccggctcggcaggaggacagtcgggatggtcgaacatccacatctcttcccagacaaaacgcactggcatcaccgcttcgattttggcaagaaggttattattatacaggggaatcaaccccatccataggatgcggaattccttccccgcctgccattccgccgctctttgagaaagcgaatggtacagcccctgcaaaaccataagggccttttcactcccaaagtcattttctaccgtaaaaagtttcagcatttcaccgctgtcggcaagcccaggatggcgaagacggagcgcgtcgatccgctttttatacgcatttgcccggttatacagacggctgacgtctccttcgtcccgcttccgtgagaaccgcttttccagcaagccagccgccgccattaagtcgtgctttatatacggctttcgaatgcgatggatcgggatcgcccagcgttcatgcagccgttccatcatctccgccgcatcgccgcagggaaagtcgacactgagaagaagacatggctttggcagcgccccctgctccatcaaatggaaaaatgcccgctggtacgaacaaatccctggcggcagggagccgctcaatccgtccaggagcccggtactcacagtcagtcccacaatccgctcgatatacagcacttccacatcataaagcagaagcaattccggagggacatagtatgtacacagcagatagggagccccttcctgtatacgctgaagcgtttccagctgtccggcaatatattgcgccagcgtgtgttttccctcgcccttcagcagtctcacgctcaaatccaaacgatgcagcaaattatccataatccgctatccatcccatcaacgcagcgccaagcgcgcccgtaatctgcggttcgaatgggacacgcaggccgggaaactgcttttccaggcatcggcgtatcccatcgcttttggcaacaccgcctgtcagcacaacatgctccctgaccccggccgccatcgacgcgatgcgtcccgctaccgcttcctgcagcccggcgaccaaattttccggcgatatgcctctggcaatgccggaaatcacttcggattccgcaaaaaccgtacaagtgctgctgattgggtatggagacgttgcccgcagaccacagcgggaaaacgtttccatatccatttggagtacccgagccatgacctcaagaaagcggccggttccggcggcgcatttgtcgttcatcaagaagttgtctacccctccatccttggaaaggtatataactttacagtcctgcccaccgatgtcgataacggtctcggcttcgggatagagatattgcacaccataggcatggcaggtgacttcggtaaaggtcctttgtgcattccggatattccgtcggccgtatccggtactgatgatggggacgttctgtctggaaaggcaattctctttacagatatccctcatcaattgttccgctgtttctgccggccggcagccgctctccgctatgcgataacctaaaatatctttttcgtcgttcaacaggagaacattgaccgacgttgagccactgtcaatccccaaatacatccttctctcctttacggttcgtgtgtaaatccatactttcccgaaacgcttccatgcgcagcataacctgttcgctggaaaagccgcggggatcaatacagtcaccgggaagttccaaaaacgggatttttttctcttcggctatcattcgcagctcccaggaagctccggggatcgcccggcagccttgatgcataaaaaagacggcaccatcgatccggtagtcttcaattaacctgcggtacaagcgcatacgctggccgctgcccgtcaggaaaaaatgggacagcactttttttgctaaatcccgaatcggatcctcttcgctcagcgtcggccaatagacatagccgaggatgtcgaaagcgatcaggcatcccagtgtcttttcgaaataccgcatcacgtcccctgcgtgcagaggagcaaaatggatccataaaatgcggcggggcggcttatccgtggacagccaggtctccggccgcgcgctccgttccttgatttgacggtaataggcctccgccgccatttcaccccgagaagacccggatagaaaagacaggccaaacaggttgcggagcgcctgattgccgtaaaaaagggccggacctttcctcagttcgtttactgcctgttgccagcagcggctgtgattggagtaacggacagcgttggacaacgctttggggtagagcgtttttcctgtataggctttcagaaatcgtatcaaatcccgcagttgtccttcaacgaaccgaacggctctctccccttgctgctgataggggatatcgaggaggaatatcggcgtgcggaaccgctgacggaagtactgaagcagcccgttcccgccgtcgcagatatgggaggaaaataccgccaagcggggcggtgggatcgccccgcattccattgccccaatgactgctttatgatatgagcatagtccgacatgaaaaccgcgctcctccgcgacacgaatatactccttggacagcagaagagaggaaatccatccggcggtcatttccgcgtggacaggtgcaagtccacaggcataaaacaattcggtcggcatgaccatattggtccaaacaatctgttccggggaatcccaaagcattttggtatatagccgcgtctgccattccactaataggcgggcggcttccagatccagatcctttgccgttttttctgcaagcaggaaccggtggaccagacggcttttttctgccgaaggactagtcccttccatatcctccctccttcttccatttgtccgttttcctttttgcccggcctgtttttcctagtatttcccagaacgcttccagccgaatccgattctgctcgctgagtgatgggccgaactcttcttccaaaagcaataccgggcgcctctgctcttggcatatttgtttgatttgcggcatagcaaacagcgaaaaatcgcatttgggggaagaaaccccaataacagccctgatgctatccccatctctctccagctttctggaaaaccacggcagaaaatccagcatgtgcggacaatttccatccaagtctccggtatccaggaaatggtccccatggcgggaggagcggcaatcgctgaaaaccagcttctcatccaaaaataccttttgtacggcctctttccagaggggatgtaggctgttgccaaacacccacaccgttccatccatgccgtccatttccagaagacggggcggcgggctttttcttgctccaaagcggcgttcgagcgcttgaaaaagccggcggcactccccggcaagctgctttttcccttctttatccatgcggctgggaagctccatcatgtggagaaatagaccgggattccgatactggaccacatcaaacagccgctcagcgctgctgcagcaatgcgtgaaaatcaccccgtcgtacagcgtaaaatcgatatgggcgcaatgctgcatataacggcagatggcgcgggacggggaattccgtatgccggccatgcacgcttccgcgtccccgggagcgaccatgacgaagcccatatccttcagatgccctattggaacataggcgcaaaaataaagcagccgttcgtttatgactctcccctcccgcgtttataaatctccatccaataccggagcttgcgcttttgtatatctcccgtattcaccttttccaaaagccgtctatacgctcggttccattccccggcatcctccttttcaaaaggcatcaccggatgaaatatggtatactcgttccaatcgtccgacagccgtttcccctgccgctgcatccgcgtatacagctgggtgcctggatacggcgtacacaccgtgatattggccgcgtagagatgtgttttgtcgatgaattcctccagccgttcccaagtgtccggagattcggcgcctctgcccacgataaagctgccggtaacaccgatgccgttggattgaatccgctcaatataatcgctgtaatgcaccgcatgccgggatttgaaattccgcggatctaaattttccaattctccggcagtcaccccttccaaaccgatcaacacctggcgaagcccgctttgatacgcggttcgtatccggttttcctctgttccaaaaccaatgtcggtgttggcgtaccagataaagtccgtctctttgaaaagggcgaataattcgctggcatgcccggcactgctcagtaagttgtcatttgtcaggtaaacccgttttgctttcggcagacggcggattgcctccagctccagtgcgatgtgctccgatggcttttttcggaaagcgccgccatacaatccgcctacgttacaaaaacggcattggtggggacagcccctggctgtttgcatcggcaccaacgcctgctcctccggacgaagggatttataaaatggtatcggagaatcctccagatttacagacgccagaggctgaaaataccggctttccggttttccgcgcaaaaaatcccgcaggaaggaacgaaaaatatattccccttctcctatcagcaacgtatcggcaaaccggcggctctccatctcgaggaaagaggaatgaacccctcccatggccacccatgagccgcgcaatcggtatgcctccgcataacgatatgcgcgtttggcgttgggagttaccgtatacatacaaacgagatcaaacgtcttgtctgtcggagccggtgcgaaatcttcatctactaccgtcgcctcgaatccctcctgctcagcaatggcggccaacagcaaaaggctgggcgtgacgactttccagcgatgccgctcaaccatgcggtcaaggtcagcgggccacgaggcgttgtagggatgtccctgagggccgtccatcccaggggccagcagcaataccgttttcattccatccctccactggagtgatgaatttttttgaaatattgcatcctttccctggaagcctcgggagagtatatctggcgaagcgtataggcaaacccctcctccagttccctcacactcatatttttgggccggaccacgacgttccaaagcgtgtagtctccccagtgctcggtcaatatgcgcttttcccggttcagccgctcaaaaagagccgatcccggaaaaggcgtgggaacagaaatcatcgcgccgtacaggtggttttccagagtaaaatccaccaccctttgaaaaaccgaacgatcgtcgctgtccagtccgacgataaaagtcccccacacgccgatgccgtacgactggataatccgaatggattccgcatagtttttcagcttacggtatttccatcgttcgagggaatacaacgattctgggacaatgctttcaaacccgatcacaattttccggcagccggagtcatacagccgttccaacaccgccctcttttctgccaggctgatatcggaatgcgtcatccaatggatgcccgcccctttcatctcctgcaagagttccagggagaacgccgtatttaccagcatattatcgtcggtaaaatagatatgcggatacggccggtaccggcggatcacagccagctccgccatcacctgttccacgcttttatggcggtaggccggcccatacactttagtggaggcacaaaattcgcagttgtggggacatccgcgtgatatctgtacaggaatcgtgcggtaatggttgaatttcaataaatcgtaccggggcatggacaccgtagccatatctaccggcagccggttttcatagaccctcttcggtgcgccggcacggtagtcggacaggaattcatgccacgtgtattcaccttctcctataaaaaccgtatcgaaatgttcaagcgtctgacccggcagattggtgggatgcatcccaccgcaaacggtatacacgcccctctcccgaaacctcccggccaattcgtatgccctggaagcctgctgtgtcatgaacgacatgcctgccatatcgtaatgggcttcccagtcgatctcctcgacttcttcgtcgatatagtcgatttcatcgaaataatcggcggccagagcggcgatcgtgagcaatggggaattcgggcaagacatcaattcctgcaaagattggatgttcgccaattcctggtaaatacgggaggttttgtccatggactccggccgccccattttaacccctttgggcgatatcaatgcgatcttcatgcattttcctttcgatatggttcttttgcaggctctcccggatcttccgcaggcgcagacgggaattttcttcggaataaaattggccgtacatccaggcgacaccccgcgccaattcgtctcccgtcatatttttaggtctatataccacgtcccagaaggtataacggctccagtccatatcggtcagacggccagccgccttcatctgctcaaacaaagccgttccgggaaggggcgtcagaatggtaaagcttccggaatagagaccgttatccaatgtgaaacgcagcgtatcttcaaaaacagcggtggtgtcgttatccgtaccgaacataaatgagccccagatatacacacccgcacggtgtatagcatcaattaaaactgggtaattttcgcacagccgtgctttccattgcttttcatccagcagttccaagctgcgccggttcacattctccaggccgataaaaagccagcggcagcctgccgggcgaagcattttgaggatatccggctgttccgccaccgaaatgtcggtctgcgtaccccacgtaatgttctccttggcaatcgcctgcaatagtttcagggaatgctctttatgtataaacatgttgtcatccgcaaaaaagataaacgcattgggtgaaaccgctttaatcgcccgaatctcccgcactacctgctctacgcttttgtgccggtataccgaaccgtaaatgaccggcagcgtacagtaagcgcaagtccgcggacagccccgggtggtctggatactatatgaggcgtatagctccggtacggttaaatcataccgcggaacaggtgaggtatccaaatccacatactcatcggcacgatatcgcttctgcggcttgcccttgcaaaaatcggataaaaaccgggcaaaggctatttccccttcccctaatgtgacggtatccgcgtgtttcgccgcttcatctggatagatgctggcgtggataccaccaagcacagtatatacgcctttcgtccggaacgcatcgcagatcgcgtatgcccggttaatctgctgggtcattccagtcacaacgaccaggtcaaacccctcgttccagggaattgcctggccgtggtcctcgtcgatgaagcgcagatcgaatgaatcaggaaaaaggccggcaatcgtgagcagactgaggttgggtgtttcccacgctccataaaattttgagacgatatcgttacgctctaaaaaaatctttagatagggatttttcccgtatttagagcctttgggtacgatcagcgccgtttttatcataactccgccactccttccgcctggccttctggggcactggcgcgctgtacgatacggatacgtcccgtattcccccggatatccagccaatcgccattccggaacacgcgcagcgcgtccccgttgaaaaccacgaccgggataccatactcccgcgccaccacagcgccgtgggacagcatattgccgtagctcatgataagccccgccgccattttcagcgccggtgtccagctcggatggaacgtatcaaccacgcagatatccccttgccgcacatcatcgatatcccggatgctttgcagccggcgtgccggccctctcgcacagcccaaactgatacccgtccccttataactcgcgtatccttcccctttttggacggtcacttcctcggagtctttccaaagataggggggtgtcgtctcctgttccttttcgaaaagccgcttacgggcctcgacggtttcgcggcttaggagatagtggggacattcgagtgcggtttggatttcctcgatcgaaagatgaaagatatcctcccgtatacccagccgtccatccattgcccaccgttcgccgatctttaggagaagccgccggagcagcacccagctcttatcaaaatagtaccgctgattttcacgcagccgcatatattcccccgtcaagcggataaaggcgcgcaggttttttctccgcttcgggctgattggcccgagctgttcgaaaagctcattttccagcgcttcccaaccggtttctcccggcccctcccctgtcaatccgctgacggccatctgctttagaaggagaacgacattttctggtttttccctccaatgcggctcgtacagatcgtcacaggacactccgcgatgcccatgccgctgaagaaactggttcaactgccggcggatatccgctgaaaaatcccccgattcgatacgtgacagcagttcctccggggccgtgtctttccagatggccagcatggatttgtcctgtcggatccatgtggccatgcgctgcagttcctggttggcccggatggtcatattgtccatggaaaactttccaaccaccgtttcggccagacgtaccacttctttttcatccgacggcgatccttccctggaaccttcaccttggaaaaagaaaggcagtcgtttgtatagaagctgtgcaataccaagaaaacggaaatggtcggcaccgagatagccacaaaaattgtcgataactttatcaagcagcagtcgccactcatccggcgttgctgcggaacatacccgctcgtccaacaactctacccgtctttcataggcaggcagcctgcgataccaggaccgatatccactatgaaccagacgacgcattttccgctgcttatcgggtgtatccgccggatcctcaaaaaattgtttttgatagcgcacattccagtacacccggttatggacaaaacgcagtggctgttccgcaaaacagtgaccgggccgtttttgataaaaactgagatatactctctgctgccatgaatttaaaagagaaaggtaacagacgctggccggctgggcgtaccggtccaaaagaacagcgtccagattctctgcagcgcaatcgtgataaatccccgaatgggcctgcgccgtcatcggccggacttgaaaaatccatatttttctgttccataatccccattccatatcgcaggggtatcccagttcctgttccagcgtctccccgatgtgcagcagttttcggcgttctggatgtgtcagcctcagcccatcccgctcaggctgttcgatcgtccggccggaccgccgctctatccggtatcgtccggcggcctcctctccgccggttaccccctcgttggtcccattcaagaactccaacaccatttccccttccaaacgaaggggattccgggtgaataaaacgcccgatttcacgcagggcagcatcggctgaatcagaaccgccatagccgccttcctgggatgggcgttccgatacgcggccgccttctccgaaaaataggaggcccacacaatcttgactgcttgaatgagctggtcaaagctgcggatatgcatacagctttcaaatattccggcaaaggacttccccgctccgtcctcttccaccgcagaggaacggacaatcaactcccgatgatgttttccgaacgtttcgtaggctgtttgcaggcgatggaggagggacgccggcatccttcccccccgaatgtcggccggtgagggactattgcccgccatatcctctccaagcgtccagccgtttgactcgcagaacacacagaacgcgtctgtgttcaatatcatgccctcacaaacccggaagcctttggcgtacaatccggcaagggttttggctttccgcccgatttgggaggagcaggcataccgcgcctccgataaggtatacattctcatacgtcctcaaaatcctttgttgtgtgaatccagtggaaggaaaactcaccacccgcaacacgggcgttcgcggatacggtgcatcccggcccgatctcccagagatgggtgacgccgtcccgattcagactttccaccagatgatcccagcgcaacggctgattgatctgattagagagtttccggagaatttccggcccatccacactcttttttccatccaggcaaccatataacggaaaagcgggttttcccggcctgagagcggcgaaatggggctgtgccgctttctgcggcccgctgcacagcgggcaatggtaggcacgataggaatgcaacggcagaacccatcgggcccctcgcttttttgccaggcggactgcctgctgcaaagccggctgttcgccggatatcacatgctgatccccggatatataggcactgattcccacataaccgctgtcggaagcttcactacagcagctttccaacgtatcccgatccaattccatgatgcggaacatatcctgcctgcgagtgggcggctcctgcaatatctgttccaggcggaccatcgtgttcaaaatgggcaaaaaaccggcagcttccgccgctgcacaggccataaattcaccttggctgtatccaacaaatccagcgatagaagagagacgatttttcatgacacaatagactgcataacaatggaccgccagggcgatccccgtccaaaggccggggacgggctccgcccgataacaatacgcagcaaaatcccggtgaaaggcatcgccggccagctcgaaacaggcccttgcctccggatattcccgataaaaaccgtcgtccatttttttcgtaaaggcctcccggcccggaaaagctaaaacgatcttcgtatcagtcatgtcggaccgccccttttcgctgcataagtccgtctctgtcgaaggatggcacacagccgctcctgggcgttccggggatccgatatcgtacggtacaggccgagcaaaccatcttccaattcctgtaccgtcatggcacggggagaagcgacaacgtcccagagggtatagttatcccagcctttttccaaaatccggccctccttcagcatctcctcccgcagagccgtgccagggagcggcgtgggtacagtaatgttggcaccatagagcgcattttgcagaataaaatccgccgtacgctggaatatggataggtcatctccatccagcccaacgatgaatgtgccgtaaatgccgatcccttcatcctgtatccggcgtatgttggcgggataggccggaaggcgccgtttcttaaatgaacggtcttcgatccctttcaggctgtctggggatacgctctcaaatccgacaacaatccactgacatccggacgccgccatcagttcaagcagttcgctgtcttccgcgatcgatatctctgtttgtgcgatccatcggacgttcaagggaatcatttcccgtaaaagctccttgctttccctgcgccggacaaaaaggttatcatcggcaaataaaaggagctcgtccgggaaaagccgggtaatttcgcgtatttcctctataatttgagcgtttgctttgcggcgataggccgtcccataaacattggatgcacagcagaagcggcaccggcgggggcagccccgcgtggtatacaggttaataatcggatagttccacccctttaaaagcgcataacggggggaaatgcactgctttaagtcgtaacttccaggcaatgcctcccgatacacccgccgtgtttttccttttgcataatcctgcaaaaactgtgggaagagcggttcgccctcgccggcaatcaccacatctgcgtgtgtcatcgcttcctcaggaagaagcgtggcgtgaatgcctcccataaccaccttcgcaccacggcggcggaactcgtccgcaagctgataggcccgcaccgcctgaacggtcatagcgctgataaaaacaaggtcatagtctttctcaaaggagaccgggcgctggttttcgtcgaaataatccagttcccagtcaggaggaaaatatgcggcgatggatagcagccccaaacaaggcgcggaccagaaatgccgaaaacttcccatggtgacggactgttccaaaaagacggccaacgatggggtgcggctgaacagtgcccccttgggatttatcagcgccgccctcattcgctgtccttcttttgtacgcgggcgggaacataccattgcccctctccccatccgccgctgtcgatgcgtatatataccatactgtcacaacggccggcgtccatctgtacggcggcgtacagtttcgcgtccgcgccgtttgtatcggcttcagtaaagctggctgcggggccatgtatgccaagctccttggtcaaggcagaaagggccgtactagccatcacattggggaaaaagcttggattcatctgccggtagtcccctgtgcgcagttgcagggcagtttcccgcagcgattctctcggcccgatgtcagtggaaatgactatgcccgtacggcttttgtccagctgtccgtagccatcctgaaacaaacggcggactagcagcaacgctttacgggtaaagaggtccgctgtacgcagagctttatccgaggaaaaggcactatcgacagcctctgcagacgtaaaaaccatatatttccacagacgcgggtgtatccgtccggttgcggtcattgtttgtcccccttttttcaatccgcatgcatgctatccgtattccggctctcacgctccagcacataccatgacaacattggtcccgccgaatgcaaagcaattcattagaatgttccggagcgttttttgttggactttatcttccaagagcacctgcggctcatcttcctccatcaaccaacgggagctgtccggcaggcgttggcgcctcagcataccgagtgccgacagaaggttgaatgcccctgaagcgccgcctgtatgaccaatgcgtcctttcggtgccgtcagcgcgaccgggccgaacacctcataaagcagacgggcttctatccggtcattctgtcgggttcccgtcccatgggcgaccaccgcatcgatggatggcggggatagttcggcttctttcagcgctagccggatcgcacggcgtgcctgtctcccttgcggttccggggtgacgatgtgataggcatcgttggtaacggcacagccgcgtatctgcccatacacccggcgggatttatcgcgggataagacgaagaaggccgcgccatcccccacgccgatgcccttccgatccgggtgaaaagggcggcagccttgcgggtccaaagagcatagccgctgaaatccgctgtaaaccaaataggaaaacgcttccgctcctcctgcgataacccggtcgcagtacccgtttcgaatcaagtcaaaaccataggcgattgcctgtgcaccggcgcagcaagcgttggagagaaactgcaaaggcatttttgttcccaaacaggagcagatccggtggataaccttcgtttgaaaatccggggaaagataggaattttccagcaacgcatcggctgctcccattccggaaccaatcaggatgcatgtccggtccggtgaaaacggcccgccgtcctccgccattgcctgggaaatggcgtgggtgcacaaaacgatgaaatactcctgcaccgatctttggaaatcgtccggcgcagtaatgtaggcggtgacgttccgtgctttccccgcgacggtaaccgccgacgtatccgccgcacgggccggcccaaacagggcgctccaaaaggacacgggcgtattgccaaacggcgatgctacccctatcccggtcaaatagacggggatcttcatgttttcgaaaggcagtcctcagtcaagtggatgacttcgtcgatacaagtcattttcgccagattatccgggtcaatggtgatgttgtaacggttttccaccttggcgagaatctccagcgcccgcaaagaatccatgccgtattcgtcaaagaaggaggcggacgtgtccagctcttctgccggtatctgcaaaatttcggctacaatttcgcgaatctcgttttcaatattcatacgtattacccatcctttacatttcgatattgcaccttaacggaggaataccgcagcccctccgccgccgtgaagactctttcattttccctgttatcccccggcgcgttcaggaaatccaacaattcccgaaagggtgccacacagccatagggggaggcttccccttgtccgggagtgttcaaacaaccaaaccgatattccaaaagttccatcgccgcgggccggctgcagagaagtaccgccccgccgctggacaattccagagatggagacatcaagcgggtttccggcgtggctgcttccgccgcacaagcaatggcttcttctgccagtccgctggaaacttgcaggtaagcgtagcccagtgcatccagtccagaggcggcgccgttggaaaaattatacaacggcccggtcaatctgtgccggatactcgcatgacatgctggggcattcaatacggtacttggaaaataggaggggctgactcccagagcaccttgccgcacgctaaccttgtcaaaggtatggagattttgaagcacaccataagcggagccaaaacagacgggaatccccttatcgtggccgggaacctctgcgagcagcgtggtgatactctgtacgcaccacccacttaccgcatccatgcctgccgtctggacatccggatccttcccgccctgccatacaacgcgacgaatatatacctttcttttcattatcggtctcctcaacaacagggggtttccagtgctatgcagctcgtctgtcccccaaaggcaaacgaattgctgagaagatgccgtatggcagcctctcgcggcttattgggaacgacgtcgagcaggcattcatcatccggggttcgataatggatggtcggcaggaggacgccgctgcgcatcatcaaacagcaggcgatgagctcgagaatgctggcagcccccatcgaatgcccgagaaccgatttaatggaactgaccgggggggctttcctctcgccaaacaagcggcggatgctccgggcctccaccaggtcgttcgccctggttccggttccatgggccgaaatatagtccacctcgtcaatccgcagccccgcgtcggcgatcgccttatgcatggctttccactcaccctcgccttctttatgaggtgcggtcatatggcttgcattggaggcgaggccggcacccaggacacggccgtaatggttttccccgagcctttcgctttccctctccagaacaagaaatccgcatccttctcccaacaccagccctttcctggtcctatcaaacggacggcagcaatcgggggctaaggaaagcagacgctgaaaaccggcgaacgccacgcgggagaatacatccacgccaccgaccaacaggatatcggcatatccctcttgcagcagctgttttgccatagcgacagcataatttcctgcggcacaggcggcgggtacgacatagcagggaccggcagcgtggtaatactccgccacggcatgggcaatttggtacgcaggataacgttc

SEQ ID NO: 265 - DNA, 2385 bp, Unknown
  16S sequences of unknown bacteria
gtgtttttgttcatggcgctgctctcttttctttttctcgtcgccgacggcgaaattttttttattaattgttctcacggcaacagacaatgccgcgcggatatgctataatattatcacaagggcgaaaaagcccgattaataagtgaggtatgaatacaatgataagaaaaatcattaaaatagatgaggaaaaatgcacaggctgcggactctgcgcgacggcgtgccacgagggcgcgatcggaatggtaaacggcaaggcgaagctcctgcgcgagcatttctgcgacggtctcggcgactgtctcccggcgtgtccggcgggagctatcagctttgaggagcgcgaggctccggcgtacgacgaggcggcggtgatggcggcaaagcaggcgaaggcgcccgagctcccgaaggcgcaccgtttcggcggctgtcccgggtcgatgccgaggaggatttcccgcccggagagccagatgcgcgtggtttccggaaacgtgtccgagctgacgaattttccggtgcagataaagctcgcgccggtgagagcgccgtttttcgacggcgcggatcttctcgtcgcggcggactgcacggcgttcgcgcggtcggatgtgcatgagcggttcattaaggggcgcgtggtcctgataggctgcccgaagcttgattcggtcgactacaccgagaagttgtcggcgatactgtcgtcgaacgacataaagtcggtgacgattctccggatggaggttccctgctgcggcgggattgtccgcgcggccgagggagcggtcggcgtctccggaaaggatattccggtgaggacggttatcatctcgacagacggtgagataattcgataaagtcacaactcgtttacaattaatccacacaattctgcggcagatgtggtataatatggttatatcacatcccccgcggaggtatgtaatgccgaatttcacgaaaaaggcgatacgagaatcattcataaagctcctgaacgagcgcccgctgaacaagatcacggtaaaggacatagtcgaggactgcggcgtcaaccgcaattccttctattatcactatcaggatctccctgcgctcctcgaggagatagtctcggacgaggtgaagcggatcgtcgaggagtatcaggagataggctcgatagaggactgcttccgcgcgacgatatccttcgcgctgaagaaccgccgcgcagtcctgcatatctacaagtcgatgaaccgggagtattacgaccggtacacgatggaggtctgctcgtatcttgtcgggctctacctcgaccgtcttgtcggcgaccgggcgatctcgaagagcgaccgcgagctgataatcaaggtctacgcctgcgagtgctacggtctgacctgcgagtggctgaacgagggaatgccggacacgataaatgagtctatcatgcgcctgtgcgatttgcgttctggattgatagaatcgatggtcgagaaagcgtgctccgaaaaacactgatatatcggcgggagaaatcccgcctttttattttattttccggcgcttgcactatttgtgcttgagagctgtctgcccttctccatctgtgcgagctccttctcggtcaatggcgctgtagcgtgcttgtaaatcacgaccgcggagatgatggcacacccgagcgcgactgagatcatcccggtcatcaccgagtaaccgcccgcaatgagcgcgaacagaatgaaggtgagtatcgaccgtctccggttcggatatatctttataagtgtagaaaacagaatatagagcgccgcgagcacaaacaccgccggactcatcggcttcgcgaacagaagcccgaccagagccccgaaggaagcggcgatagccttcccgcctttgaacccgcggaagattcccatggcgtgcccgacgaccggagccgcgatggcaagtccgaagcgtatgtcaaacgcgtccgccccgaccgtcgtcagcgccgggggcggaaacgccgccatcattctttccgacgcgaagaccggcagaaatcctttcccgaggtcgcagacaaggcagagtatccccatcggaaccccgcagagcttgaacacgttcgccgcgccgggattcccgtcgtccgagagcgcgcagatgtccttccccatgaagacccgcggcagcaggtgacagaacggcacgctcccgagaaagaacccgagcgtgataacgacaaaccacccgacccgcggcgaaacggcaggcagaagccagattcccgccatcaaaaggacctccagttcaaaaagtaagtttccggaaccacataaaggttacagatacacaataaatttacaaagtgtcaatcagtgcgcacgcggc

SEQ ID NO: 266 - DNA, 2005 bp, Unknown
  16S sequences of unknown bacteria
aaagtgcatgcgcagttgtccgcagcaatgcatctgcgcaggcagcccttatcagattgcgcaggagcattgcctgcactgcggactgtgtgtggaaacttgtccggtccacgccatccttccaggaggtgagcacgcatgatccaggaagtctggacgttactgagcgaacgcgcatccttctttctcgggctatgcggggaacatctcgccatttctctgattgccatcatcatcgccgtcttgatcggcggcgcgctgggcatcttcatgagcgaataccagaaaagcgcgcgcctggtcatgcccatcgtcaattttctgtatacgatcccgtccatttccatgctcgggtttctgatcccgctttccggcatcggcaatctgaccgccgtcatcgcgctcacgctgtatgcactgctgccgatggtcaggagcacctataccggactgacgaatgtcgatgccggcgtcatcgaggctgctgagggcatgggcagcaccggagggcagatcctgtggaagatcaagctgccgctggctatgcccatcatcctctccggcatccgcaacatggtcgtcatgacgcttgccctggccggcatcgcctcgttcatcggcgccggcggactgggcgtggccatctaccgcggcatcacgacgaacaacgccgccatgaccgtgaccggcagcctgctcatcgccgcgctggcgctcatcttcgaccttattctcggcaaggtcgagaaacgatgcgggcagcaccatgcaccttcatcgaacaagcggcgcagaagacctgctgtgatcggctgtgccgccctggctgcggtcatcttatccgccgccttgttcctgcgtgccggaaggacacagaccatccgcatcgcgaccaagccgatgagcgaacagtatatcctgggcgagatgctggatatcctgatcgaggaaaacactgatctgaatgtggagatcacccagggcgtaggcggagggacatccaatatccagcctgccatggaacagggcgaattcgacatctaccccgaatacaccggcaccgcctggaacatggtgctcaagaacgacgatctgtataccgaagagcgcttcgatgagctgcaggacgcttacgcgcaagattatgatatggaatggatcggcatgtacggcttcaacaacagctatgcgcttgccgtgcgcagcgagatcgcccaacagtatgatctgaagaacatctctgatctgcggggcatcgcggaagagctgaccttcggcgccgaatacgacttctacgaacgagaagacggctactccccgctttgtgagacttacgggctcaccttcgccaatacggtcgatctggatatcgggctgaaataccaggccatcgcacaggatgagatcgatgtgatgccgatcttcacgacagacggacaggtcagcgtatctgatctggtcatcctcaatgacgatctgcacttctatccctcataccagtgcggcaatgtggtccgcagcgagatcctggaacgatatccccagctgcgggatgtgctcggcatggtcgaaggcatcttgagtgaccgggacatggcccatctgaactatctggtcgaaagcgaaaatgtcgaaccgcgggacgccgccaggcagtatctgcaggaaaacggactgatcacggaggaggaatgatcatgagcacagccatccgtatggaaaacatcgtcaaaacttatggagagacccgtgtgctgaacgggctgagcctctcgatcgaagaaggcactttcctgaccgtggtcggatcctcaggctgcggaaagaccacgctgctgaagatgatcaacgggctgatcaagccggacagcggaaagatcatggtcaagggccaagatctcgagcaagctgatctgatctccctgcgccgcagcatcggctacagcatcccgggcagcatcctctttccgcacatgagcgtcgaggaaaacatcgcctatgtgcc

SEQ ID NO: 267 - DNA, 17444 bp, Unknown
  16S sequences of unknown bacteria
ggcagcccagaactcgggatacgggagccattccggccacggcgagagcagcgcgaccacgaagatggggatgagcaggatcctgacgagggtcacgatgttggcaggtgtccagacccgcgctttcgtcgcctgctgcttgctcgtatccatgtctaggccagctctccttcgagttcgtagtagaagctgtcggtaatcgtgacgggcaccacggtgccgatgggaagcacgtcttccgaggcgatgggaacgtggatctgcccgtcgacctcgggggcctggccctgccagcgggcaagtgcctcgacgcccgcatcggtatgctcgtagccctccacgagcgcctggaccgtcttgcccacattgcgcgcgatgctcgcgtgcccgacggcatcgcagacgtcgagcaggcgctgggcgcgagctggcaatcgaagctgccggcagccgagccgtcttcctgcgagtacgggaagacgacggcgtagtcgaaacgcgcctcttccgcgaaatcgaggagctcctcgaactgctcgtctgtctcgcccgggaagcctgccatgaacgtcgtgcgcgtcgtgatgcccggtaccttatcccgcacgtgctcgagcacctcgaggtattccgcaggagagccctcacggttcatggccttgaggacgtcggcgtcggcatgctgcaggggcatgtcgaggtacttgcagacgttgtcatgggcgttcatgacagacagcagctcgtcgttgatgccggcgggctgcaggtacagcaacctgaaccaggtattgggaaacgcggatgccgccgcgtcgagcagctgtgcagtcgactgggcgggagaaaggtcacgtccccagatcccggtgtcctggccgatgaacacgatctcgcggacgccgccctccacgagctcggcgacctcgtcaaagatctgcttttgcgtgaagctgtgatagcggccgcgaatatagggaatcatgcagtacgagcagaagcggtcgcagccgtcggagatcttcacgtacgcgctgggcccctcgttgctgcggatgctcgcaccgtgggccgcaagtccggcgggaaggctcgaagggtcgatacccagcagctcctccgccttctcgacgatgttttcctcgtctgcagcgctcaggaaacccgagacctcggtcagctcggactcgaggtcgtcgccataccgggcgggcatgcagcctgcgacgagaatcttggccttgaccgggcgctctgcctgctgattgaccaggtcgaatatgacttcgaggccctcgtcgactgcgctcatcagaaacgagcaggtgttgaccacaatgagggcggcatccgcgggatcgtccaccatcgaaaagcccgcagcggcgagccgcgccttcatcttgtcggtatcgacttcgttctttgcgcatccgagcgtgacgaatgcgacgttcatgttctgcggcacgtgcgttcctatctgtagttcgtgaattggaggggcaggccgtaatccttatcgcgcaggaaggcgatgacctcttgcagcacgtcgcgcttggggccggaaacgcgcagcttgtccccctcgatctggactttgaccttgaacttctggtcgcggatgtccttgctgatcttctttgccacgtcctgctcgatgccctggacgatggtgcccttggtcctgatcatggagcccgacgcgtcttcgggcttgccccagctgacggacttcagatcgaccttgcggcgaacgaggtgcgtgttcaggatgtcgatgacctgggagctgacgaagtcgctcggggccagcacggtaagcgtgctcgatgccttgtcgtagctcagctcggcacccgagtccttcaggtcgtagcgctgcttgagtgccttgacggcgttgttgaacgcgttctcgacttcttgcgcgtcggtctccgacacgatgtcgaagctgttttcctttgccatgaaacctccaaaaggttgatgcggcgcacaccatgcgccacgcttgctagctagacgaatcggcgctgttgaccgtgttgctcgaggtggtctggatggtcagatcgaggctgccggtgccgtcgtcgttcttgttcacctcgacctctttgccgttttcggtcaccgtgacggcatcgggcgtgccaaacgtggcggaaagcgacgaggtcacgaggaactcgcggctccagggcccgactgcggtgccgctgtacgcgttgtcgtcatcgtaggtcacgttgatgagcgaggtcttgccctcccccacctcgatcttgatgttgatcgggttgccgttcgtcgtggtgacggtggccgtcgccgtgttcgagtcctttgtcgtggtggtcgtgtcctggacgcctccctgcacctcgatcacgccgctgttggagctgcccgcagtgctgatcagcacgcccgcggcaatggcgatgagcacgacgatcgtgatgagggcgatggcgatggcgcgcgtgcgccgctcggagaaaatcgccttgagggcacgcagggcacggtcgaagatgtttttcggctccgcctctgcggcctttttcgcattggccatgcggcggtcgtggtttttcctgcgtgcggtcttcttgcccgtgtctccggtgctgaaaaagctcagctcctcgccatcgacctcgatctttcccgatttcgagggagaggcggcggcagggcggctcgaagcatgagagcgcttcgcagggcgcgccgtgcgcgttggggcagacgaagggccgtcctctcgcgaaggcacgccacggcgggcgggctggccggaccgcggttgcgaagcgggccgcgataactcgtcgccgcgcgtgcgtgcagaacccgcagcagagacgcgcggggagcccaccttgccaaaggagccagtctggcgcgtgcccacgaccttcaccgtgccgctcttgtagcggtcgtcttgctcggcggcgagttcgtgctgcaggctctcgctgagcttgctgttgggcgcctcttcgctcgcacggcgacggcgcgtcccgcgctgctggccggcctgtcggctggcgccgcgaggcagcggcttgtcctcggagttgacgcgctctccgtagcggccgacaccgcgcctcgtcctgtcggcgctcgtcgccatctccgaagaagactcgaagcgtgccaggtcgtcttcgagctgacggagcaccgggtgcgggtcgagccccaggtagcgcgcatacgacgagatcatccctcgcgcatgccccttgggcggatagttcttgaagtcgttgttctcgattgcctcgaggacgcgctcgcggatgttcgtgtccagcgcggccttctgcaatggaatcctcagttgttctcttcgcgatcggagtatcgatccgacatgctgttgaggcatacctacctcgtctcctggtcttgttcttcgaaggccctgagcgcctcgaggtcctccaccgtgtcgatgaggacgtcacgggcacgcgagccctcctgcgggccgacaatgcccttgagctcgagctggtccatgatgcggccggcgcgtgcgtaacccaccttcaggcgcctctgcagcatagacgtcgagccgagcccagcggcgacgacggcgtctgcagcttcccagatgagcggatcgtcgctttcggaagccgatccccccgaggaggagccagccgaatccgagccgacggcctgcttgagaatctcattatggtattcgggctcgccttgctgcttgagatgctcgacaaccgacgaaatctccgcttccgagacgtagcagccctgtatgcgcttgggcttgttccactccggcctcacgaacagcatatcgcccatgcccgtgagcttttccgcacccgcctggtcgatgatgacgcgcgactcgaccgcctgcgagacggtgagcgcgatgcggttggtgatgttggccttgatcataccggtgaccacgttggaggtcgggcgctgggtggcgacgatgaggtggatgcccgcagcacgtgcgagctgcgagatcctgacgatggaatcctcgacttccttgcccgcgaccatcatcaggtcggaaagctcgtcgatgatgacgacgatgtagggcagctcgtcggggtggtcgccgttgtcgtcggtcagctcgcctttgcggatcatgtcgttgtagaggccgatgtttctggcccccacctgctcgaagatcttgaggcggcgctccatctcggcaacggcccatttgagggcgctcgccgcctccttcggctcggtgaccggggggacgagcaggtgcgggatgccgttgtagagcgagaactcgacgcgcttgggatcgaccatgatcatgcggacctggtcgggcgtcgcgcgcatgagcatcgtcatgatcatgccgttgagcgagatcgacttaccggaccctgtagtaccggcgaccaggaggtggggcatctttgccaggtcgacgcagatcttgttgccgtcgacgtcctcgccgatggccatctcgagcggggccgggccggccgcctcgacgatgtcgccgagcaggacgctcgtgcgcgtcttgttcggaatctcgacgccgacaagcgaagtattgggaatctgggcgatacgcaccgaagacgccgccagcgaaagggctatgtcgtccgccaggccgaccaggcgtgcaaggcgcacgccactcgggagctcgactttgtagagcgtgaccgtcgggcccgcctgccagcccacgacacgcgcgggcaggctgaactcgcccagggtctgctgcagcagagacgcggtctgcttgagctcgccgaccggcacgtttcgctttgggccggcgatcttcaagatgtcgagcggcggcaagacgaagccactggggtcgacgcgaggctgcgcatcgtccagcttgacagtcttggaacggcgcgagggcttcgagacctttgcgccacgcttcttggacgtggacaggtcgaccgtctttgacgcgtcgtcggcaaactgcccgtcggtaccgaccgcggcgaggtctatggtctgctgagttccgtcgtacgcatcggagaagtcgagaggctcggtctgcgcggcgcgcttgcgggtgcggggcttctttgcgcgcagcggtgccgtgtcccccgggctggaaaacgccacggtgtcgcctgcgtccgcgtcggcagagccgacgttgccgtccgtgccgagccctgtctgctcgaggtcgtcttctttgccctgctcgatgaagttctttacgaacaggaacggaaccgagatggagacgcccgcgagcacgaggccgacgatgatgagcgccacgagcaagatgcatgcgatgatctgcccaaacaggcttaagaacacccaggcaagaccgccgcccagatatcccccgcccgtgacgagcgaagagtcgaggaacagtgtgtcgggtctggtggcgtcgaccgtcgggttgaagagcgacagcagccccatgacagcgagcaggataagcgagacgccgatgatgagcctgcccaccttggtctcttctgccttgaggaagtagctggcgccccacaagacgaacgcgagcgggacgaggtaggcgccgagtccgaacatgtgcttgagtgcgcccgagatggcgctcgtgaccggggcgtccgagggcatgatgacggcgacgaacagcacgacgccgatgagggcgagcgcgatgcccgtcaaatcatcgcgcatccccccatcgagcagggggctgcgcgatgtcgattcgttattctgtgccactctcccgcgcgatgcgcccgaagaggacctgtttccagaccgcgagcctttcttgttgttagctgcgtttctcgaacccaaacctacctccgatatgcctaaagcatataggatattccacttagatttctatgacaacgggcatgatgacgggacggcggtgcgccctgttccacaggaacttggacagcgcgtcgcgcgtgaccttcttggcccggttcgtctcccccttgtgcgcgtcgagggcgccttgcatggcctttttcaccgtcgcgcaggcgtcctcgatgaagtcgtcgttgtcgaaaccgggaatgccgcgcatcatgatggtcggctcgcccatgaccttgttcttcttgcggtcgacgaggaccaccgcgacggcgacgccctccgaagacatcgactggcgatcgcgcaagacgtcttggtcgatatcgccgacggaggagccatccacgtacacgatgccgctttcgaccggagcgtcgcgcttgaccaccccgttttgcatcctgagcgagtcgccgttgtccaggatgaagatgtggtcgggatcgactccgactgcctctgccaggcgggcatgcgcgcgcagatgcgtcgcctcgccgtgcacgggcaagaagtacttgggcttgacaagcgacaggacgatcttaagctcctcggcgcccgcatggccggagacgtgaacgagcgcgcggttcttgtcccagacatcggcgccgatcttggcgagctggttgacaacgcgcgtgacggacttctcgttgccgggaacgggcgtcgcggagatgatgaccgtgtcgccgcgctcgatgctgatggacttgtgctcgcccaccgacatgcgcgcgagtgcggacagcggctcgccctggctgcccgtgcacagcacgacgatcttctcgggagcgtagtcggcggcgtcgtaggcatcgatgatcaggtcgtccggcacgttgaggtagccgagctcgcgtgcgatgcgcgtgttcgtgagcatggagcgcccggtgacagccaccttgcggcccgcgagctgggctgcatcgcagacctgctgcacgcggtgaatgtgcgaggagaacgaggccacgatgacgcgctgcttggccgcgccgatgacgcggcgcagcgtgacgccgacctcggcctcggacttcgtgaactcatgcttcgtcgcgttggtcgagtcggacatgaacaaatcgacgccctgggcggagaagcgcgcgagcgcggcaaagtcggtcagctcgccgtcgatgggagtctggtcgagcttgaagtcgcccgtgtgcagcacattacccgccggcgtgtgcatgaagatgcccatcgcgccgggaatcgagtggttgacggtatagaactcgagttcgaagcatccgagcttggcgctgccgccacggtgcacctcgcgcagctcgggctgcttggtgagacggtgctcctcgagcttgccctcgatcatgccgagcgtgagcttggtgccaaggatcggcacgcggcggtcgaggtccttcagaagatacggcaacgcgcccgtgtggtcctcgtggccgtgcgtgatgacgatgccgcgaagcttctcggcgttctcgagaatataggtatagtccggcaagatgaggtcgacgcctacgtgctcgtcgtcggggaacatgaggccggcatccacgaggatgatgtcatccccgcactcgaatgcggtcatgttcttgccgatggcgtccagaccacccagcgggatgatgcgcaaagaaggcgatttcttcttgtgcgatccgttattgcgtcctcgcctgcgggatcccctgcgccgcgagctgctgctcgtgcgctgcggggcctgttcctctgcgggagactttgttgtatcgggcattggggaagtactcctttgccctgcgatcatgtacaggtatagctagtgaataggtgcacactgacgcatgacttctgcaagctccgccgactgctcgggagtagcggggatcagcgggaggcgcagccccccgacggggaatcccacgagcttgagcgcctctttgaccatgatggggttagaggtgatgaacagctcgtccatgagcggaagcagagcttcgtttgccttgagggcctcttcatgcttgccggctgcttcgagctcgacaatctctttcatgcgtcttggcgccacattggcaatcgtagaaaccacaccaacgccgcccaagcccatgatctcgagggtcgcctgatcgtctccagagtaaacgctgaagtcgtcgggcgttcccttgactatggcggcaatctgatccattttgccgctcgcctctttgatcgcgatgatgttgtcgtaatcggtggcgagcctgatggttgtctcggcagtcatgttgatgacggagcggccggggatgttgtagagcatgatcggcttgtcggttgcctgggcaatcgagccgaagtgccgatacagcccctcctgcggcggcttgttgtaatagggcacgacgcacaggtagccgtcgaagctcatgggattgaccttcttctcgaagtcgatcgtgtcctgcgtgcagttgtcgcccacataggcgatggtcttgcaacgtccgtcgaccgcctccaagactgcctcgaagagcttgatcttgtcatcgtagaacaccgtcgggcactcacccgtcgtcgggcatacggcgatggcgtcgatgccagcctcgacgaaacgatttgcaagctcctgcgccctgttgaggtcaagattcaaatcgtcgtcgaacggggtgaccgatgcgacgatcgtacggccgaaaaatggctctgacatagcaagctcctatcggaatggaaaaatactagatgaatattaatccatcaggttctcaagtccaatgacaagtccgtccaaatctccgaccgcacgcacggccatgagaatgccgggcatgtaggaggcgcggtcgatggagtcgtggcggatggtgagcgtctgccccatgctgccgaagatcacctcttgatgcgccacgtagccggcggtgcgaacgctgtggaccggcaccccgtcgacgagcgcgccgcgcgcgccctcgaagccctcgagctcggtctctttgccgggggcggtggacgcctcgcccttgttggcggcgatcatgcgcgcagtgcggatggccgtgccagacggcgcgtccttcttgccgtcgtggtgcagctcgatgacctctgcgtcggggaagtacttggcagcctgctgcgcgaacagcatcatgagcacggcgccggtcgtgaagttgggcgcgtggaacaggtgggcgccgtccgccgccgcctcatcgtagatggtctggagcttttcctcggaaaggcccgtcgtgccgagcacgcagtgcacgcccctggaaagcgccgtgcggaggttgccctctgcggcgtcgggacgcgtgaagtcgatcatgacctcgggctgcgcgtccgcgatggcgtcttcgagcttgttgtagaccttcgcggcgtccttgccgcaggtcgcgtcctcgcccgccatgatgtcgacgccgccgacgagctccatgtcatcggcgccgtcgacggccctgcagatctcggaacccatgcggcccagcgcgccgctcaccaaaaccttgatcatttagatcatcctttctatatccccctgcgaatgggggctcaccacagcgaccgtgggctgctgcgagagcagatccccagccacttcgtttacctgttgcagcgtcacacagcggtagtcctcgagcgtctgctcgggcgagcgaacttccagtccgagcacgaacagccgtcccaggcgcgtcatatgcgcacgcgtcgattccatgctgaagacaaagttaccacagatcagctcgcgcgcacggtcgagctcctcttgcgtgatgcccttggcggcggcgagcgcaaactccttttgcatgacgtcgaggacttcgcgcacgttgtcggggcgcgtgcccgcataggcggcgaacacgcctgcatcctcgaagagctgggtcgtcgtgtacacggaatacacgaggccgcgtttctcgcgaatctcctggaagaggcgcgagctcatgccaccgcccaacgcggtatcgaggatgccgagcgcgaacctgcgcggatcgttcgtgtcgaaggcgggatagcccatgaggacatgcgcctgctcggtgtctttctgcagacaggacagctgcacacgatgctgctcagcggcaaacgcgcgatgctgccgtgtgccggtcttcatcccggacaaaaacctcttcgagagctcgacgagctgttcgtgcgagacgttgccgctcgcggcgacgacgaggttgcccgtcgtgtagtgggtgtcgtggtactcgcgcatgtccgtagactcgaagccgcccacggtcgtgcggttgccgagcacgggacggccgagcggatgcgtgggaaacatcgcgtccgcgaacaggtcgtagacgtactcgtcgggagaatcctcgttgcgcgcgatctcttcgatgacgacctcgcgctcgaggtcgatagcgtcttggtcgaagctcgcgttgacgaccatgtcggcgagaatctcgaatgcttcgggcaggtgctcgtcgatgacgcgggagtagaagcacgtgcactcgcgcgaggtgaaggcgttgagctcggcgcccatcgcgtcgaatgccgtcgagatgtcaagcgcgcttctggtaggcgtgcccttgaagagcatgtgctccatgaaatgggacatgccgaaaaagcgcggggcttcgtccctggcgcccgcataaacccaaaagccaagtgcaacggagtgcacggaatccatatgctccgagacaacggtgatgccgttgtccagaacggtcttgtcgcagtacataaacctcctgtacgcagcagatgctgcacgtccacaagtcaagacattgtactcgtggagcgtccctagaagtagtccttgtagatgatctgcccgtttatgggatcgtccgggtagagcttgcggtacaggtcgatgaagtagtcgtcagtcatagaagcgatgaaatctaccgcgatgtcgtcgacgcggtgcgaaagctcccattcgtagtcgtagcgctgcatggaagagcgcaggtagtgacggtagataaccgaatcctccctgccggcctccaggtcttcgacgaactgcccgtacatgcgcgtcatcatctgctggacgaccttgatgcggtcgacgacgaggtcgctcttgtagatcttctcgtagttctcgcgccgcaaggcgtcgatgccctcgaagacctcctcgtccatggcgaggtagtcctttccgagcgagttcttgatgatgttgtgcgtgacgttgtagatgatctggtggttgagcttgccgacaacggggctctcgtcgtagtcgtcgacgccgcggagcttgatgcgcgcggcatcctggcggtctttgcccacgtaggcgatgatgtcgctgatgcggacgacgcagccctcgagcgtgctcggacgcaggtcgcggatgttgttctggtcgacgtagcactgctcgaccagcgcgtcgaggtcggcgaacgtcgggcagggcttggggcggtactcgaggaaggtcttctcgccgcagtgcgtgatgatgccgttgtaggtctgcaggcacaggttggtgcccgcgatggtcttgagcagccgcacgctgtggacgttgtggttgaagtagcgccccgtgcgcgcatggtagagctcggacaggtagtgctcgccctcgtgaccaaacggcgtgtgcccgaggtcgtgcccgatggcgatggcctcgatgaggtcgaggttgaggccgagagcggctccgatggtgcgcccgaccctgctcaccacctgcaggtggaacgagcggcgggtaatgtcgtcgttgcggacgaagctgaagacctgcgtcttgtcggcgcagcgtgaatagaaggggttgtggacgatcttctcgacgtcgacgacgaagcacgggcgcccgaggtacacgtcggggtcttggtagtgctccatgcgctcgcggatgccctcgctgtccttgcaggcgtattcggacagcagcgcctgctgtgccgcgtgcctctcgcgcaacagctgcttttcttcttcggtgaattcgaagagccttgggtcgaagtccatgttcgcaccctcccctcgtgcttgaaggtttgtagctgtgcacactttactgcatgcgtgagacacagaaacgctaaggtatccgacttgaaagaaagcgggcggcaagcccctcaaggctgaccgcccgctttgcgcactcattctttgcagggaatcgagtgccaaacgtatgtgagtgccgctccttcctctgaagtgccttcgtacgagcaggcgcgctgtcccaaaatggcgcctgctatcgtttcaacgtgatcaccataaactatacggttaccgtatactcaagcgaaacggcggagaattctggagaaaaaaatggctgagcagttctacagcacggggcagttcgcgaagctgtgcggcgtgaagaagcagaccctgttccactacgacgacatcggcctgctctcccccatccagatcgcggacaacggataccgccagtactcgtatcggcaatacgaaacgttcctgctcatcacctgcctgaaagaggcgggcatgagcctgaagcagataaaggcgtttctcgcgctcgaagacgataagacgcgtagcgcgcggattgccgaggtcatgcgggtgctcgacgggcgcatcgagcacctcgtcaacgtgaagcgcgtcctagagagcacgtttggcgccatggaccctggtgcgagcgccgacgagggcaagccggacctcgaagtcgtctccaagcccgcggagagcttctggctctcgaggcgcctcgacacgctcgacgaccgcgagctcgtcgagaccatctcccagctcatcaagcgcttcgagcccgtcgccgtttgccttgcgagcgccgacgtgcagcgcggggaagtcgaccggcagcgctacctgctgattcccgacagcaagctcatggatgcaggcgaggcggcagggttcggcctcatgcgcttcgagcgccccgcaggagactacctcgtggcgcaccagcagccggacgaagacgtctcggcgctctatcggcgcataaacgcggagctttccgcgaaaggcgcactgcccggcgtgttctactacgaggagttcttcggaatcgatgccactgcggcgccgggcctttcgaccgtgatggtgcagatggtgcagaaacagtaaggcgccccgggaataccccggagcgcctttgcagatgcgatgaagctatcgcctgagccgaacgctaactacttgaagttcaggccgccgaccgactgcgagctgtctttgagcatgacgtcgtgcgcgccgccctcgacgatggagacgctggacacgcgcgtgatctttgccttctcgcgcagctcctgcaggttgagcgcaccgacgttgcacatcgtgtgcttgaccttggaaagcgagagctcgacgttctcgtgcagcgagcccgcgtacgggacgtagctgtcgacgccctcttcgaacgcgaggcccttgccctggccgtcgtcgtagcgctgccagttgcgggcacgtgcagagccttcgccccagtactccttcatgtagctgccgtttacgttgacgcggttggtggggctttcgtcgaagcgtgcgaagtagcggccgagcatcatgaagtccgagcccatggcgagcgcgagcgtcatgtggtagtcctgcacgatgccgccgtcggagcagatcgggatgtagatgcccgtctccttgtagtactcgtcgcgtgccttggccacctcgatgacggcagttgcctggccgcggccgatgcccttctgctcacgcgtgatgcagatggagccgccgccgatgccgatcttgatgaagtcagcgccggcctctgccaggaagcggaagccgtctgcgtcgacgacgttgcccgcgccgaccttgacctcgtcgccgtactccttgcgaatccactcgagcgtgaacttctgccaatcggagtagccttcggaagagtcgatgcacagcacgtcggcgcccgcgtcgagcaggacggggacgcgctcggcgtagtcgcggctgttgatgccggcgcccacgacgtagcgcttgttggcgtcgagcagctcgagggggttttccttgtgggaatcgtagtccttgcggaacacgagggaagacaggtggtcgttcttgtcgacgacggggagcgcgttgagcttgttgtcccagatgatgtcgtttgcctcggacagcgtgcagccgtcctgcgcgacgatgagcttctcgcgcggggtcatgaactcgcgaaccttagtggagccgtccatgcggctcgggcggctcgtgacgatgcccagcagcttgccgtcgggagcgccgttgtccgtgacgggcatggtgctgtggccggactggcgcttgagctccatgacctcagccatcgtcatgtcgggagtgatggtggaatcgcttttgacgaagcccgccttgtaggacttgacctcgcgcaccatggcggcttcggactcggcggtctgggagccgtagatgaacgagcagccgccttcgcgcgcgagggcctccgccaggcgcggaccggagacggactgcatgattgcagaggtcatcgggatattcagatactgagaaggctcctcgcccttcttgaatttgacaagaggagtcttgagcgaaacgtcgctcgggatgttcttggaagaggtgtagccaggaacaagaagatactcgctgaaggtatgtgaaggctcgtcgtagtagaacgccatgcttcccccgatttctaatccgaaatttcccttttgcgcagtgtactacaacgatttggcgggtggaaacgaagcgaaaagattgtcagcgcgtgcggcgaatatcgtctccgaaatgaaaacggcccgcctaaaagcgagccgtgatgttcttggtggagataagggggttcgaacccctgacctcatgactgccagtcatgcgctctcccagctgagctatatccccgtgggttgtcttgcaacgagaacgtagtatagcagttacttcgcgccgtgcaagaagaatttatgcaagaaattccgatccgtccaccacgagatcatgcgagggcaactttgcccaggcaaactcccctatcagctcgtctggcctgcacggctcgggctgctcgatgatgccgagcatgaaggcgagcttgcccacgagcctctcgggtgccacatggcgtgcgcgcagctcccccaagtcgaggtcgcggtcgcgtttggacaggcgcctgccatcggggctcagaagcatcggatggtggaagaactgcggcgccccatagcccagccgatcgtagaggaacagctggcgcggggtggacgaaagcaggtcgtctccgcgcacgacctgcgtgcagccggtgagggcgtcgtcgaccacgcacacgagctggtaggcgaacacgccgtcgctgcggcgcaacacgaagtcgccgcactccgctgccagcttctggcgaaccggccccagatggccgtcggtgaactcgattgtcttgtcggggacctcgatgcgatatgccggttgcctgacgcgcgatttctgcgcaacttgctgcggggtcaggctgcggcaggtgcccgcatacagcggcgttccgtcgcttgcatgcggcgccgaggcggcatgcaggtctgcccgcgagcagaagcaggggtatacgtggtcacgcgagcagagtgtctcgaatgcggattgataggcggagatgcgagcggtctgcgtcagctgctcgtcccagtcgagaccgagccaggcgaggtcatcgacgatgagacgggcgttctccgcgctctggcacctgtcgtcgaggtcttcgaggcgcagactgaacgcatcgtctgcagagcgcgccgaaagccacgacacgagcgccgagcaggcgtttccgaggtgcatcctgccgctcgggctgggagcaaaccttccctttcccattgttgcggctcctagtctgaaatgctgacgttgacatcgtacggaagcccttctggcatgggctcgtagacgatgtcggattcggacatgaggtttttcatccagtcgttgaacagcgaggtgcgcttcgccttttccgcatcggacgtgagctgcgcctggatttcggcgggcaggcccttgaagtcgacggagtctcccttctcggggatgtcgagaacctggtcgcagaagacgagcagatacgccccgtcttgctgcacgggcgcagagacctgcccggcggtaagcccgttgagcgcctggacatactctttagacatattgtcctggtctgtcttgagcgagctccacccggcgttttgcgcatcccccgcaactgacttgaactgctcgagcgaaagctcggcgccaagcgagccgagcttcgactgcgcctctgaggcctcctgctcgcttgcgtagctccggaagaaggaatgcttgccgttgtagtcggaggcatgctcgttggcctcgagttggacttcggactccgacggcgtcgcgtcggtgatcacggcggcctcgagctgctgttcgagcaggcggtccgcctcgttttgacgccaggtctgctcggtgtagccgtacgagctgagcacgctgtcccacgagttcttgccgtagcgctgctcgtagaacgcctgctcgcgcgagatgacctggtcgagctcgttgtccgtaagcacgatgtcgcgctgctcgcactgctgcctgatgaggagcttgggcacgaagacctccttgagcacgtactcgcgcatgctctcggccgtcatgccgttcgcgttcaggaactgcgcccagccggaatcggtctcgtatgaggggttgttggagcggaagccctcgatgtagtcggtgacgtcgctttcgtagacggcgtcgctgcccacgcgtgccgcaaccggcttttgcgcgggcatgccgaagcacccagtaagcgacaaggctgccgccacgaggacggcggcagccaagggcacgagagccttacgcacgaccggccttcctgccggcctcgaaggcggcgaggttggcatcgacggtcttgggcgggacgcgctttgagatgacgtctttccacgtgtcctcggcaaagggcaacgccgtggaaagggcgcccatgagcacgacgttcgtggatttggggctgttggcctcgcgagcgattttgcccgcgggtacgagcacggaattgacctcggaaagctgcgcgcgcgggtcttcgggcatcgtggcgttgccgatggcgaccgtgacggggacgatctcctcgtcgttcacaaacatcgtgccgccctgcttgaggaactgctgggcgcgcagggcctcgaccagttcgaacgagacgatgacatctgccgtgccggggtcgacgaccatgctcgaaaccttgtcgccaaagcgcacgaccgtgctcaccgagccgccgcgctgcgacatgccgtggatttcggagatcttgacatcgagcccctcggcag

SEQ ID NO: 268 - DNA, 32759 bp, Unknown
  16S sequences of unknown bacteria
ctttttcattcatcatctccgcaaaactgtccacatccccggcgcacgcctctgcgagagcgatggccgcatcgttggcagatgccagaagcatagcgtaaagcagctgttctaccgtcacctgttctccttccagaaggaaaatccggcttccctcggtgtacgacgcatcatgactgatggtgcagacctgatccagatccaggtgttccaacgccagcagagctgtcattaccttcgtcgtactggctggataagtctgaaaatccttgtatttgtcatacagaacttcacccgtatccgcattgattaaaatagccgactgaccggtgagctcgggaagatcggttaccgccgcataagaaggcacagctgcaaagatacagctgaacaaaagaatcacggtgagcataatacctatacatttctttttcattcgttacctcatttacctcttcgtcactgcagagccgtctctcccggccccgctccgctgcacatccattgataaaatgattctcttttcataactctccgacctctgcctctctcagaacggagccaaaccgacggcagcccggcctttggtctctgccggcgtccatacaggatattccggcggcgctccttcgacctcccttttccccgcaactgctcagctgccggggatatccgccgtgtgtgcggcatatcgccataccgcagaatttcgttataaatctctaaaaaaatgttccgtcagctgatgtcccgcttcgaaacagcgatttgtccggcggccgcaggcctctgtataccggttttcacggcagccgctgtcttttctgctgtcataaagcacgtaaggcacgggatccgcggagtgagtcctcaggcagaccggcgtcggatgatccggcaacaccagcaggcggaaatcttccccggaggattccagataatcggttaccggttttacgatctttcggtcgatcagctgaagactctcgatcttctcggaaagagagccctgatgagcgcattcgtccggcgcttcgagatggatatatacgaactgccggcctttttttaacgcatccactgcggccctggccttaccttcaaagttggtgcggatcgtccccgtagcgccctgtacatcgatggattccaatccggaacacaccgcgattcctttgatgagatccaccgctgagataacggccccgtcgattccgtatttctctttaaacggcgtgagagacggctttcttccctgaccccagatccatatcgtattcgccggattgagacctttttctatccgggccagattgaccgggtgattcttcagaagctcgtaactttttctcatcagttctgtaaggtattccgccccctctcccttcggaagattcggtcctactctctgttccagtacatcatgcggaggcgtcagatcgtaatccgtggaaccgccgtgaacaaccatgacatggcggtaactgactcccggataaaattgaatttcatctgtgctcagattttcaccgataaaccggatcagttcctccgcctcttcattcgagatgtctccggagctgtgatcctttatcgtcaggtcgtcataagctccgtctcccgtcacagtaatgagattacagcggaaagaaacatccgcaggcgacatatcgattcccatgctggccgcttccagcggcgatctgccggtatgataaacctccggcgcatatcccatgacagaaagattcgctacgtcgcttcccggcgccataccctcgggaacggtctttaccatccccatctctcctctcgctgcaaaactgtcgatacatttcatatccgccgcttccagcgcggtcttccctccgatttcatccaccggtcttcctgccgcgccgtcggtcaggacgattaaatatttcatagcaaaattctcctcacatcagttcacagattatttcggtcgaatgcggccaaacagccggctgaaactccggccgatcgtttttcttcgatcttgcgatatccgcgtccggcacgctctgcggcgggacgcggatattccgttttcactgcagctttttggaaagccgtatccgccgcttcagcgcagagtcctccagccggtgcgcggccgtcgtcatcgcctgccgtccgcttcctgcggggcttcaggctttgtaaatactcgcatttcagtaatcaagtataatatccttttactgaaattttctttactattttatcatagtagagtataattgtgtacaaaattatggagtgaaataactcgcaggctgccatcatttttacggctttttgttaaaccgtttcccggaccgctctgcgtccgggaatcacaatataaggaaaaatggagaacaagaattatggacagagtatttaacttttcggcaggcccttccggcctccctctcgaaattctgcagcaggcgcaggcagacatgatcaattacaaaaactgcggcatgtccgtcatggagatgagtcatcgttctgaagactttgaagaaatcataaagacggcagaatccgatctcagagatctgatgaagattccggaaaactacaaagtgatgtttcttcagggcggcggaacgcttcagttctctatggtaccgctgaatctgctccgcagctcaaaaaaagcggactatatcgtcacaggccagtgggcaaaaaaagcggccacagaagcgcagaagttcggcgatatccgcattgccgccacatcagaaccggatgtctatacctacataccgaaactggaaagaaaagatttccgcccggacgccgattatgtgtatatcaccaccaacaatacgatctacggcagccgttacagctacatcccggataccggggacatcgtcctcgctgcggatcagtcctccaacttcctgtcggaagtatataatgtagaggacttcggcctgattttcgcgggcgcacagaaaaatgtgggtccggcaggggttacgatcgtcatcgtcagagaagatctcatcggcagctgtccggctgacgcgccggtctatctcgattacaaaatccatgcggagaaaggttctatgtacaacacgcctccgtgctactcgatctatatggcgggactgatgttccagtggataaaaaagcagggcggtgtgcccgccgttcagaagcacaatgaagaacaggcggccgcgctttatgactttatcgacaacagctctttttataactgcccggtagcctttgaagaccgctccctcatgaacgtggtattcgtcacaggcgacgaagatctcgacaaaaaattcatcgcagaagcgaaaacccgagggttggtaaatttggctggacacagaacagtaggaggcatgcgcgccagcatctacaatgcgatgcccgacgaaggcgtaaagaaactcatcgactttatgaaaaaatttgaaacagacaacagataatttagcagagggatcatctaaaatgtataaaattgcaacattaaataaaatttccccggtgggactttcggaactcaccgaccgttatcaaatcatcgaagaaacggaaaaagccgacggtatcgtggtcagaagccagaatatgaaagaaatggatttttctgaaaatcttctctgtatcgcccgcgcaggcgtaggcgtaaataatattccgacggacagatgtaccgaaaaaggcatcgccgtattcaacacccccggagcaaatgccaatgcagtaaaggaaatggtcatcgcggcgatgctgctggcgtccagagatatcatcggcggctcgatctggtccgccggactcacaggcgacatcgccaagcaggttgaaaagggcaagagccagtttaagggctgtgagatcatcggcaagacgctgggagtgatcggactgggaggcatcggcgtaccggtagccaatgcagctgcgtcgctcggcatgaaagtcatcggttacgacgcttatctctcggtgaaaaacgcgcttcatatttccgacaaagtacaggtggtggaaaaactggacgatatgctcccggaatgcgattttctcacagtacacgttcacgccaacgatgcgaccaacggaatgatcaacggcgacactttcgcaaagatgaaagacggctctgtgctcctcaactatgcgagggcctccatcgtggatacaccgtctctgaaagaagctctggaaagcggcaaactcagaaaatacgtgacggacttcccaaatgaagatatgcccggacttccgaatgtcattctcacccctcatctcggcgcttctaccatggaagcggaggacaactgcgccgtcatggccgtagaggaaatgatggattacatcgaaaacggcaacatcacaaattccgtcaatttccctgcatgtcacatgggagcctgccgcggagcaaaccgcttagcgctgttccacaaaaatatcccgaatatcatcgctcagatcaccaatgcgatcaccgagctcaacatcagcgatatgatgaacaagagccgcggcgattacgcttatacgcttatggatctggattcgccggtgaccggtgaaaccatcgaaaaattgaacaaaatcaaaggtctgatccgtttcagagtgatataacaaaaactccgcactttcagaaaatgaaagcgcggagttttttaccattcccggcgcagttccttcaccagatcgcggatccttcccaggcctctgagaagcgtgtccttatccgcagcgtaagcgatccggatgaacccgtccattccgaacgccgctcccggcgctacggcaacgtgtttctcgttgagaagcttcatcgtgaaagccgtgctgtaaggctgttccctctctccgaaacaatctttcaggcttgaaatatccaggaacaggtaaaacgcacctttcggttcgataaaggatatctgcgggagctcctcccttaaaaaggccacggcaacctccatgcgttccctgtatgccgctgccatcatcgacgtattatctccgcagtgtttcagagcttccacgccggcccactgagataccgtagacggatgagaggtgatatgtccctgaagagcaatcatcgccctcgtcagttcctttgaagccgcggtatagccaattctccatccggtcataggaatcgatttggaaagaccgttgacgagcacagtcatttcttttatttccggcgacagggaggatacgctgacaaactcatcggcaaagcagattctctcatagacttcgtccgccatgatataaataccgcggcgaacgcagacttccgccgcggcgcgcagttcctcacgggtgtataccgttcccagcggattggacggattgcacagaatcagcatttttgtgcggtcggtcgcacagcgttcgatatcagccgcggtgagtttaaaatcgttctctctcttcgtttcagcgaacacgggaacgccgccgcagattttaacgatctccggataactgacccaataaggtacggggatcagaacctcgtctcccggattcaaaagggtcatgcaggtgtttaaaatgcactgcttcgctccgttcgataccacgatctggtcgatatcatattctacgccgttttcttcccgcagcttccggcagatctgttctcttaattccaccagtcccggaaccttatcgtatctcgtcctgttatgctccatcgcccaggcggcgcctttctttgcgggctccggcgtattgaaatccggttcccctacgctgagattgataatctccgttccctcgtccatcatctccaaaactctggcattgatcgataccgtaccggaaggcacgatattttttacagtattcgataacatattctctcctccagcaaaggctgccgcagttcagatcagccgccttcatacagatacaaaatccgcgcatgatcgccggcgccgtaacggagcggtgccgctccgttacggcgcgccgaaaagcgcggattcctatctgaattattttcttccgatccgtccggcggacagaccgtagcgggaaactgcgcagagctccgctgcaaatatatcattgccggcttccgcaccggacaacccgtttttattttctccagcccaaaacatcggtaatcttatgagaaaccattttccgtatcgcgtctctcgcaggccccagatattttctcggatcaaaatcagcaggatgctctttcagataacggcggatttccgcagttatagcaagccgcagatctgtatcgatattgaccttgcagacgccgtattgcgtcgccgtgcggatcatttcctccggaacgccctgcgctcccgggatttcgccgccgtactcattacagcgagccacgaattcaggaagaacggtagacgccccgtgaagtaccagcggcgtacccggaatcagcctatgaatttcctgcagtctctcaaaatcgagatatggctcgcccttaaatttatacgccccgtggcttgttccgatagcgatggccagagaatccacgccggtacgctccacgaactccgcagcctcttccggatctgtaaaggtcgcggagcgggcgtcaactttaatatcgtcctccactcccgccagcttgcctaattccgcttctactaccacaccgtgagcgtgagcatactccgtcacctgttttgtcagggcgatattctcctcaaaatcgtgctttgaaccgtcgatcataacagaggtaaaaccgctgtcaacgcagctcttgcagatctcaaaatcctctccgtgatccagatgaagcgcgatatcgagaccggtatcgagaatcgccgcttctaccagtttcataagatacgcaggtttcgcatattttctcgcgcctgccgaaacctgaagaatcagcggcgctgcttcttcctttgccgcgtccacgatcccctggataatctccatattgtttacattaaacgccccgaccgcgtaatccgcattgagagccttctcgaacatttctttcgtcgtaacgagtgccataagataaacctcctaaataacaggtatgacaatactcacttcaggaactgatgattatagtaaaacgcataactttctgttccgtcataattttactacatcggggcagatctgtaaataatggcgccttcgtgttttcttgcctgtcggcggcaaaactggtaaaataaaaaaatatattaattttcagcgcatcgcctcaggaaacctgcggctgatccgaatcccgatatatcatttttgcagacaattcggatagcaaatccgcgctccgttaaaaatatcgtttacagaggtttttcatatgaacaagaattttaaagataccacgattgtagccgctacgggcaatcgccacaaaattatcgaaatcgaatcgattacaaaactcttcggcatgaaagtgatcgcgaaaggggaaaccgccgctgcggctctcgaagtggaggagacaggtaccactttcgaggaaaattcaaagatcaaagcagaggaaatcatgaaagttaccggcatgcctgctatcgcagacgattccggactgatggtcgaagctctcggcggcgcgccgggagtatactccgccagatttgccggagaacatgctaccgacgaggaaaacaacgaaaaattgatgtcgctgatggaggaaattcccgacggcagaaggcaggcgaaattcgtatcggtgatcacgctgatgtaccccgacggcagaatcctgacggcacgcggcgaatgtccgggtacgatcggacgcgttccggaaggtacaaacggtttcggctacgatccccttttccttccggaaggatattccgtcacctacgcgcagctgacagcggaggaaaaaaaccggatcagtcaccgcgccaaggccctggaaattttgagacgccggctggaatcggaggaatgacgatttgggcagaaaattattttataaatccatgtcgctgatcaagcgtcttcaggatccgtattatcagggcgccgctgcggagatgggattttacttcatattttctatcgtgccgatcatcacgatactgacgcagattctgggctatgcgggagtgacgggaatattttccgagctgctggataccgctttcgcaaacaacagttttatctcatcttttctgcgctcctttgaaaacacgctgtccggaggaatcaatttcgtctttatcatcggcgcgctgtgggcttcatcgaaaatcgaattttctctgatccgtatctccaattacacctataaaatcgacaacggaaatcagatcaccggttactttaaagtgcgtttccgtgcggttctcaccgtagctttactgattcttctgatctttgtcagccttttggtactggtatacgggaactccatcaccgcgctgctgtcagagacgctaagcgaatatctgaacatcgattttcacatcgacaaggtttatatgctgctgcgctggccgattatttttgtcatatatttcctgtttattgcagtgaattactcgatcctccccagccgtaagattcctctgcgccatacgctgccgggcagtctcttcgcttccgtcggaatcatcatatcgagcctgggatatcagatctatttctcatatttttccaacctcaacctgatctatggaagcctggccgcccttatcgctttgcttctctggttctactggctgagttacatcctgctggtgggactcgtactcaacgcggtttggttcgacgaggatacctctctatgacaaagagaagaactgcggacgcaaaaacagctcgtccgtttccgggccgttctcctgcaggagaacggcccggctctgcgaattgcagaaaagaaggcccgtaagggaaagatcctgtgatcttccccttacgggccctttcttacacggaatttttcaatttttcatctgcttcgccgctgagccgcagacacggcatcctcccctacaggaagaagacgatcgtatcaatgataaatacgggaatcagaataccgaaagaccacgccatatagccgaagaaactcggcatcttgatgcggttctcctctgcgatggattttaccataaagttcggcgcatttccgatatatgtattggcccccataaacaccgcgccggcagagatcgcctccagcataagctgagaaaccgaaccgactgtggtttcaatcccggcctgaccgagagcgccggctgtctgcagaaacaccagataggtcggcgtattgtccaggaaggaggacaacaggcctgtgcaccagaacatctgccaaggctgatcgagacccagctgaccgccgtgcaccttcagaagagccagagccggaatcatcgtaataaaaataccgatgaatagctttgccacttcttcgatcggcgcatagctgaattcgttcagttctctcgtagactttttcgtcgtcttgagagacaggaagcaggccagaagaatcagaacgatctctacgattaccgcataagggaatacaaccgcgtcataaacgtggatacccgctccgtcagcgaagaaatcaaacatctgaggaagtacgccgctggcgaccacgcccagaatgatcatagcgatgaagatgagattgtgcgcgccctcgatccggatcggttcttttgtgtcatttccgatcatatcctgcggcgatctgcccgcagcgatttccttcttataaaactttctgtcgataaaaataaaaataccgaatacaagaaccagatttaagagcagaatcggcagcagatggaacgtccacgtaaacggcacgcctctctggaaccccataaagagcggaggatcaccaagcggcgtaaggcatccgcccatattcgccacgaggaaaatgaaaaatacgatgacgtgcactttcttttctctccacgcatttgcccggatcagaggacggatcagaagcatcgccgccccggtggttccgatccagctggccagtaccgtaccgatcagcagaagaatcgcatttactttcgtcgttcccaccagagtgcctttcaaagcgatacccccggcaaccacaaaaagccccagaagcagaacgataaacggaacgtaatcgaggagcaccgattcgaggaatcggtacagagcctcccccggaccataagcgacggcaaacgggatgataaataccgcagaccatgcgagagctactttcagcatgttgtgctcccaccactccggttttaccagcggaatgacagcgatcgacagcagcatgcccgcaaaggggatgatactccagatcggcagagctgcgctgacggcatcatgagcggcgtgggcatccgtacttgcaaatacggccggagcgctcagaagaaacaggctgagagcgctgagaagtgttttcataatctttttcataaaactacacccttccacaaaaaactaaagataagaccataaatatgacgaaaggacagcaatctgtctgaaactgtccttgcgtaattactattttataacatttttgtacggtgtcaatgcgttgaatcatcgatacttttttaactaaattataacttttccggccgactgcaccggacagccccctgcaaaccgatccggcttatgcctgcgccatctttttcagcacttccacatccagacctgtgataccggcgataaacggcagatccaattggattttctgcttgatctgcatatagatggaaagtccctgttcctgtgtgataataccgttttccagacagaaattaatgtagcacgccgcgtcctccaccgggccgctgcctacatccaacgcctcctccggatccagaccggatataatatcgttgacgagatcgcaaagagccaaacgaaccagacttgcacggacataatcttccggttcacgcgctttgaaagcaaactcgtttttctccacctgatagacgggaattccggtaaactcagcgacctcttccgccgctaccggcatgtgattttttccgtcaaaccatttttctttttcctccggggtaataatttgcgccaccgtacaaaaatgcaccgctttctcatatttgttctgatccacttccggactccgccccatggacggatcgacttccggcatattccggtagtcgcagagagccttgcgaaagagctgatcgacgttaacatactttacgacggtcttataattgctgttttttctcgtttttttcctgatattttttcctgacatactatattactcctgtcgttttccgtcaaactgcggcgctgcttcgggcggtgcgccgcgtcgcgacctgataccgcattttcagaacgccgaaccggactttaaccgttcacacgttttatcgccgcagcgattttcgccggaaccatacggcatgcggtttcactgatagcggagatcgcaattcgaattcctccgccgatagcgatggcgaaaattctgtctttttgaagttcttcgttgacagcgttatcgttatcacacggaatcgtaacaaaaaaaccggcattaaacggacaggtggtcagtcccgcttcctctgcagcctccttaaacgctctgcatctccgtgacagcagatcttcatattcttttctttcctcgaacaccttctgtaaaagctgcggatctctgaagacttttgcgatagcggcctgtcccgctctcgctgtattcgaccaggacgctctgctggaaaaagacgcgactcgtttaaattccgcagcgatttccggattctgcgtgatgcataacatcgcgccggtacggagaccataaaaagtgaagccctttgaagcgctgaaccccaccacagtcagaatattgtccggcatatggccgaacttgggaagaaactgtctcgctttatcggaatctccggcgaaatcgatataggcgatgtccaggaaaaatgtgattttttttcctgaaacggcgcattctttcaaaactctgatgatttcatcccaggtttcgtcggaaggagtataacctgtcggattatgtgccggcgcattaaacagaatcacgatactgtcttgttctgtcagaacagactgaatatgctcgcgaaaagacgccaggttgaaatcgtttttttcgtcaaacatctgatacgtctcgacgctgcgtccgatctccgatgcgatgacctggtacggactccagtgccagtttgaggtcagaatcttatctccgggcctggaataattggaaatcacatttcggatagaacctgtgccgcccggcgttgcgcaggcttcgatactgccctgcggtatataatctccaaaaaccacatcctttatgacatcgagatattccggcgtaccggcgataggcgcgtattccgcaaattcttggggcgtcatacttttcagcacgtccaccatggaggacagcacgatgagttttccgtcgtcgtcgagaagcgctccgatcgtcgcattgacaatattttctctgccgtactcgtccgcggcctttttcgccagctggctgatgctgaaaatcttgtccctgcctgtaatctctcgtccgttgccctccgcaaaaatataatccatttgaatgcacctctgtttcatctgagttaaaaaattacatacgatattatattattttgcattttctttatcaaggcgaaaaaagtattttgatttcaataatgaaaattcgaatagaaaagcctcggcttttatcgtatgtttgatctgtatcgaggcaagaataaggatggaggtggtacgaattgaataatcagaacgacaaaaacggcagcttctttaaatcagctgcatctttaaaaatcattatcagtcttctggccctgtgcctgatgggcggtctgatgatctatgcggttacgagagccgtggaaaacacatctatgaccgatacttcctacgaagatatcgacggttcctatccgccggataccagcgtttccgcggagattcccattacggacagtctcgaaaacccggatacatccggcagccaggaaaacgccggggacggccagtcgggttctgccgaaattatgcctgttcagggcgagatcatcaaaccatacagcggagacagtcttctctactccgagacactggatcagtatatctgccataaggccattgacattcaggcgcctgccggcagtccggtctgcgctgtgatggcgggcacggttacagaagtaggaaaagacgaccgctacggttcctatgtcctgatctctcacggaaacggtctggaaagccgctactgcagccttggagatattaaggctgcggaaggcgatgtggtaaaaaagggcgataccatcggcggtgtcggtgaagacgcgctctttgagaaagcagaaggcacacatctgcactttgaagtcacaaaggacggagaactcaccaaccctgatgtaatcacacagcagtaagtctctattccatgacgcggtctttctcagaagaaaaattgtaaagaggaatgtcctcccatcaggacattccttttttgctcatatatttttttctcgtcgcctgccctcctctgatatggcgttccgccttattattgtccagcacgtgcttcacgtctttcgccagcgtcggattcagctccgtgagccgctctgtcagatccttgtgtaccgtggatttgctgattttgaaatgttttgccgccccgcgcaccgtggtctgcgtctccagcacataagccgccagctccagcacgcgctcttcaatataatccttcatatatttttaacccctttcgagacggaaaagtctataggaaaatatatgcggaaaatatttatgttatgatatacaaaagagcaaaaccgaacggctcttcctgagaaaaaaacagagtgtaaaaatgatatatgcgattcagatataaaaaaggaggccgtcatgtacatacgacaattcgactttcccggagaatccgcggaaatcaaatatatctccggctttaaatacacctgctatgattctttttatcccttctggatttttcccgacagggggttggagacgattgactttgaaccgataacgattttctgcggcggaaacggttccggaaaaaccacagcgctcaatattatcgcggaaaaattggggcttcacagagactcggctttcaaccggacttcctttttcagggatttcaccgatatgtgccgctgccgtaccttcggcgcagttccagaacacagctgtattatcaccagcgacgatgttttcgactacatgctggacatccggactctcaacgagggaattgacatcaggagagaagagctctttgcagaatatacggacgccagatattccggcttcaaactgaattctctggacgattacgatcagctgaaaaaagtaaacaacgcccggcgtctttcgaaatcgaagttcgccaggggcggcgtgatggacaacgtgaggggccgttccaacggagaaaacgccttctcctatttcgcggacaggatccgggaaaacgccctctatctgctggacgaaccggaaaacagcctttccgcagaacgccagctggaactggctcgttttctcgaagattccgtccgtttcttcggctgccagtttatcctgtccacccattcgccgtttctgctgtctttgcgtgacgccaggatttataacttcgacgcccgccctatatcggtctgccggtggaccgaattgaaaaacgtccgaacctttttcgatttctttatgacgcaccgtgaggaattcggataaagaaagagcagtgcgactctgtttcacactgctcttccgcgtcattcttcatttttttcatcctccgatgccgtaatccctcctgacgcactgcatccgtacctcaccctgcagtaataaatcggattcccccgggaggaaaatttctcctcatattctgtcatataatttttggattcatacccggaagcatgaaggtcttctgtgtattcctctttcaccagagaattcaaatcgaattcctcagaggagaaacggaacagcgcttcattatccgttttaaattccagcgcgctgcccggctttaagactcttccataccccttcagataacaggtatgcgtcagccggcgcttcgcgtgacgggctttcggccacggatcgctgaaattgagataaattccagacagttcgttttccgcaaaacaatccgtcacttctctgatatacatattggcaaagatcagattcggcgcggcggcataaatagttccaatagcttccttatccgctccggctccgccttgcaaatcttttggatcatttgcatcgtctataagcaattcgctttcagacttcgtctttgctgcgaaaatcccgggattcaccgcctcctcaaaaggtttttcactgccgtccggcgatctcaaatcctcgtcggaaaattcacagaaaaaacgtgccgctttctgcagagcccgaagcatgacgctggcatttccctccactgcgataaaatttctctcgggaaacgctttggccagcgacaggataaactgccccttcccgcatcccagctccatatagatcggctgatctctttcaaaaaactcattccatttccccttctgcgccgcaggatcgatctgccggcctccggaataaacgctgagtttttcttccagtcctttcagcttcctctgtctcattaccaaaaatttcctttcttttatgaattcgcctgcagcagcttcgcttctgtatcgatcttttcagccggacacaggggacggctgccgtattttgcgaaaaaatcctctgccacgatcagaacatcgcaagcaacatatcaaataggtacggctctgcaataaccgcggcggcaaagagaatcagcgccgccgcagctcccgcgtcgcatctttgcagcttcatcacgtgaagtctcgtccgtccctcgcctccccggtagcaccgcgcttccatagccatcgccagatcctgggcgatccggaaagcgcctataaacagcgggatgagcagcggaatcagactcttcatcctctgaatgaggttcccgctctcgaaatccgccccccgcgcctgctgcgctttcatgattttatccgcttcctgaatcagcatcgggataaaccgcagtgcgatcgacatcatgatagcgatctcatgcgccggaaaaccgaaccgggagagagggctcagaagagattcaaagccgtcggtcagctgcatcggtttcgtggtatacgtcagaagcgacgttccgaatacgagcatcagaagccgaaaagccataaaaaaggcctgccgtacgccctgctccgtaatcttcagcggtccggccgataccagaatcgttcccggatacataaacatatttataataaatgtaatgattaaaatcacggcgatcggtttcattccccggagaataaagcgaaaaggaacgccggaaaccacgatgaccgccccgacaaatacggcggctaccgcatagccgaagaaatcccggatcagaaacagcaggatgatgtatacgataaccgcgatgattttcgtcctggcatccagacggtgaataacagaatctttcggataatattgtccgagggtaatgtctctcagcatttttcttcctcccgcctctgtttgtcttccggcggcgatgcttcggaagacatcggccttatgaagacgcggagagtgtcggtgtccgcccgtgcggtcagggcgcttccatcccgcagtttcgcgtcttttttaccggtatccctctgaaaatatctttcgatgacatctgcggcttcccgggcgaataacaccccttccccgacagaaacgccgttttctctcatgagatccaaaagttccgcggcctccggcaggcccaaaccgacgcttttcagcagaccaggttcggaaaatacctcccgcggcgtaccgcaccggagaagacgcccctggtccatcaccagaattctgtcgcacaatcgggctgcgtcatccatattatgggtgacgagaatcaccgtagttccgcgtttttctctgatccggcagaccatatccagaatttcacggtgcgtttccggatccagccctgcagtaggctcatccagaatcagaatttccggctgcatcgctaatacgccggcgatagccgcccggcgcttctgtcctccggacagatcgaagggcgaacgcctggcaaaagtctcgtaagaaagatccactaactgcagagcttcttttactctccgcagaatttcctcttcgctgaaaccgatatttttcggtccgtaggctacatctttttccacggtttcttcaaaaagctgatattccggatattgaaagacaagtcccacttttctccgcacatctcgaagcaccgtattttttgccgtgatatcgcagccgtccacgacaatggttccccgatcaggtttcagaagcccgttaaaatgctgtatcaacgtagattttccggaaccggtatgaccgataatcccgataaattctccgcgcttcacagaaagagaaacatcctgcagggcgtatgtctcgtccggctgtcccttaccgtatatataatcgatatgttccgccgtcagcacagcgtctgtttcaccctgcaccgccgtacgatcggacggcttgctgccggataaaaaatcctgtttctcctgccgaggtgtaaaactttccgcgggcagactgcacagataagacgccagcccgctgatggagagcacttcctgcggtatggagaatcctttccggcgcagatgctgacggatatccaccgccgccggaagttccaaacccagttcacgaagtctctgctcattttcaaaaatctgcggaggagatccgtccataacgacttttccgccatccatgacgatgatacgatcggcttctacagcctcttccataaaatgagtgatcaggatcacggtgatcccgtcctgtctgagagaccggacgatctccatgacctcccggcgtccttttggatccagcatcgccgtgggctcgtcaaaaataatacactgaggacgcatagccacgacgcctgcgatagcgactctctgtttctgaccgccggagagcatatgaggagatttcttccgcagttcatagattcccacgcgcttcatcgcatcgtcaatcctgcgccgtatctcctctgcgggaattcccaggttttccggtccgaaagccacatcatcctctaccacggcagagatcagctggttatcgggattctgaaagaccatccccgcgctgctgcggatttcccatacccgttcttcctgacgggtattgattccgcagacgatgacatcaccttccttcgggatcagaagcgcgttcagctgctttgataaagtcgacttcccggatccgttgcgtcccagcacagcggtaaaagaacccttttcaatttcgaaaccgatcccgttcagagcctttaccgcacccgcgccctcttcctccggcggatactcgaaagtcagattctcaatgcgaatgatcttttccacctaacgcacctgctttttcgctttttctgcttcccggacgtcctctccctgagaaacggcccgctgctttttctcctgctgttcttcgaccattttttcctgcattctccggctcacctccatcatccgctgaaagagggccgccgcataatcgccgtatgcttctcctgcgcgcatccgcgcccgatcgaggatactctgttcccttcccggatgaaacacgggaatactgttctcgattttatattccgcgacgttttttaccagatccatccgtcggcaaaacagatctaagatctgagcgtcgatttcgtcgatctgttctctgatttcgtccagattcataaagattcctcctgctccaaaatcatatctgtgataacaacagctgccaccgcctcagcaaccgggacggcccgcaccgccacacagggatcgtgacgtcctctcactcccatcgccgcctcttctttctttcggtaatcgatacttttctgaggttttccgatggacggcgtcggcttaaacgccattctggcgatgacaggcataccggaggaaattcctcctaatacgccgccgtgatggtttgtcctcgtctttacgccgccatcttctgaaatatagaattcgtcgttgttttcgctgcctttcagcagggctgcggaaaaccctgcgccgaattccacgcctttgaccgcaggaattccgtagaatccataggcaagccgcccctccaccgtatcgaaaataggcgaaccgacgccggcaggcagaccgacgatgcccaattccaccacaccgcccacggagtccgcattttgccgcgcttcttcgatgacattccgcatttccatttcgctttcttcccgtatcaccggaaatttcctttttcccggagacaacagttgctccgccgtcagatggacttcgtcgaaccgcaggtcctccgcttcgcctaccgctaccagatgcgctccgatgtaaattcctctctctttcagatactgcctgcaaaggcctccggcaaagacgaggggcgctgtcagacgcgccgaaaaatgacctccgcctctcacatcgttaaacccccggtaccgcacaaatccggtataatccgcatgccccggccgcgctaccgaaactacatttttataatccgccgaatgctgatccttattggcgatcacgcaggcgatcggtgttccgcaggtgacgtcgtccagtacgccggacaaaatctgcggcagatcctcctctctccggggagtagccgtcttatctctgcccggagctctccttttcataaaagtcagaagctcgtccatatcgatcttcatacccgcggggaaaccgtcgatcaccgcgccgatccccctgccgtgagattctccgaacaccgaaactttcaatttattacctatctgagatgacatctgctcttcctcccaatcttctgaattcatcaaaaaagtcaggatagctcttttgaacggcctccgcttcactgatgacgaccggctcctcgcaggaaagagccgcgacggccatagacatgacgatccgatgatcgttatagccgctgactctgcagccgcctctgcgccgtcctccggttacggtcagctcgtcctctttctcctctgccgtcacacccaggcgggtaagacaatccgccatggcggaaagacggtcgcactccttgatgcgcagtctcgacgcgttatagaaacggctggtgccctctgcacaggctgcggctacagacagcaccggaatcacgtctggaatattcccgctgtccgcttccagcgccttcagtcccagaccgcttccttcgccgtatttttccggcgcccgaacgatcagatcaggatactcgcggatcacttcagcgccgaaccgctcaatgatattcgcagcctcccggtcgccctgaacgctgtcactccgcagaccggtgatcttcagttcagaaccgcaggcagcagccgccagccagaacgcagcctgggaatagtctccctccacagagatatccgtagcctggtatctctgatttccgggtacccgaaagccgtattccgtctcttctacccgtacgccgaaatcgctgagcatttgctgtgtcagtgcgatataaccgacggattccattttccctttgacgcgaatctcgctgtctcctttcagcagaggcagcgcaaacatcaggcccgagaaatactgagaactcacatttccgggaagttcatatacgccgggcctcagccgtccgcagatctcaaaaggcagaaaatctctgccgtcgggcaaaaatgtgacgccgtttttcttcatttcctctgccagcggcgtcatcggacgctgaggcagctttcctctgccctcgaaagccgcgtctttccccagcgcggcggcgataggcaggacaaagcgaaaagtggatccgctttcattgcagtccagaacgaccggtgaaactggactgaccgggtcttcacattgcccggataccgtttcagctccgcctctgcctgcttcgccgcgcaattcttccgtttcctcctctgtactggtaaattccccgctttttccgtctcgacggacggcgccgctattttttccggaaattccgtcgaccgccacggcgatcccgtcgcctatgcgccggatcttcgcgcccagtgcggtcatgcaccctatcgtcgcttccatatctttggattccgaaattccccgcaccacagaccggccctccgccagagatgcgcagatcagggctctgtgcgccatcgacttggacggaggcacctgaaccgtacctttcaattttcccggatagacttttatatccataatcatctcctatatctcacacagcctccgatccctgccttccgcctcttttctccatcttaagttcaaggctgtcccgcatcccgccggtctgctgcactttcttttctccttatgcgattcgtttttcctgcttttccggatctatgcgatcatctcatctcttcaaagaaatctgtccttctccttcgaaaaacgactgcatctgatccaattttacatcgcaaatagacgatatccctattttttcaatatataccagactgacagaatcgcccgacgcctttttgtcatttgccgccaactgacacagccgcttcagatccgcacccggatacgacgtctcaaagccttttgacgcgatcagatcgaacaattttcgataagttcctttctctgtcattcccgccgcctctgacgcctgtgtcaccatcagcattccgatggccacggcctttccgtgactgatgcggtactccgaatccttttctatagcgtgcgccatcgtatggccgaaattcaggatctttctgagtgcgctctctttttcatccttttctacgattccgccctttatcttcacacagcgcgctgtgatatccggaagacaggattcgataccgctcttctccacaagctgaaggagagacgcgtcccgtatcgccgctgtcttgataatctccgcagttccgtccaatatcagatcgtcatttaacgattcgaaagtaccggtatcatagagaacgagagaaggctgccagaaggaacccatcagatttttgccggcggaaatattgacgccggttttacctccgaccgatgagtccactgccgccagaagcgtcgtaggaatctgaatgaaatcgattcccctcatatatatcgacgcagcgaagccgcccatatctccggcaacgcctccgcccagagtgataacggcgtcttttctggtcagatgatgttctgacataaaatccacaaacgccgctgctgtctgcatatttttacagtcctctcccgcgggaaagacaaagcggcatgtttcaaaccccgcttgtcggaaactttcttccacgatatccgcatacagcccggcgacaaccgaatctgtgaaaagtgcggcttttttcccccgcagcgtctccgccgccagatctcccgctttttgcagaagtcccggtccgatctttacatcgtatccctttcccgcattgattctgatggtttccgtcatctcttcactcccgtctttttctcttcttccggctccggctgtttttcgccgggctttattcgactgttttttctcgcagcgaaaaagcgctttcgctttttcccgctcccgtccggaaaatacttcctgtccgcttccgctccgcctgtcgaaacaaacgggctaataaatattttaacatatttatcagcccgttttgtcttaatctatcgctcctcttcaaaaggcggaaactctgtcgtcattcctgtatttcccggcttttcggactgcaacatccgcttatacagaatccccggttcaaaaaactcggatccgcccattgccgtacgaaagtaatccgctgtacttcagcctgtttctcagtccgtcatctccgctgccataaattcgtgcatcttcttgatcttcttcatcgtaccgtcgaactgcgccggcgtcagagactgcggtccgtcacagagagcttttttcggattgttgtgaacttcgataatcagaccgtcggctcccgccgctaccgccgcgatggagagaggttccacatactgaacgattcccgtagcgtgactcggatccacgataaccggcagatgcgttttttctctcaatacaggaatcgcggataaatccagcgtatttcgcgtcgccgtctcaaaagtccggatcccccgttcgcagagtatgacattcttattgcctccggccatgatatactcggcgctcatcagccactcgtcaatcgtattggcgagccctctcttcagcagaaccggcttgtcctgcttgcccagcactttcagaagttcaaaattctgcatatttcgcgcgcccacctgaatgatgtccacgttgtcaaaaagaggaagatgcgaagcattcataatttcggtcacgataggcattcccgtctctttcttcgcttcggacagcagttcgatgccctccgctctgagcccctggaaagcatacggtgacgttctcggcttgaacgcgccgccgcggagcagcgtcgctcccgatgccttcaccgcttttgccacctcgacgatctgctcctccgactcgacagagcaaggacccgcgataacctggaaattcccaccgccgattttgattccttctcccagatcgacaatggtaggttccggatgaaatttcttattggccgccttatacggctcctgaattctcttgatatcttctacaaaatcaaatcctctgatatcgtcctcttcgagggatgcggtgtctccgatgagcccgagaatcgtggtgtgctcgccttccgtcacactgacggatacgttaaatgcgtccagatactcgatcatctctattacatctgactgactcgttttgtcttttaaaattacaaccatgataagcctcctttactctgcagtttcaaaataaaaaaaccatccgatacaaattcggatggtttaaaaatcgggattgatttacgatacttcggtcgattccatgagtttgtattcgtcgaaaaagctctatattttttgtacgcaaaagcggcctgtaaagacgctaaacagaccaaaatagttgccgtaataaaagcttttccaaacctgattacacatagtattttaccttcatatcctaaaatttatgtttactatactcctttaaagtacgattgtcaatatgacttccataaaacataccgtttttctcacataaaaaaggtcctgccccgtcgggacagaacctttttctctcttataacgcagcgccgatatctccggcgccgtctcgcagccgtccgcacgttcccgtcaaagcgctcctcttaacagatgagttcctattgaaacagcggtgcgaaccgatttactgcggctgatctaaaccagctcgaggaataccatctcagcggtatcacctcttctctgtcccagcttaagaattcttgtatatccgccgtttctctcagcatacttcggcgcgatattatcgaagagttccgttacaacatcttcgtcgtaaatatatgccagcgcctgtcttcttgcgtgaagatcgccacgcttgcccagcgtgatcatcttttcagccattcttctcgtttccttggctctcgtgatcgtcgtggtgattctgccttctctgagaagatctgtcacctggtttctcagcatcgcttttctatgagccgtaggtcttccaagttttctatgtcctttcacctgtgagtccctccttcgctttagtcttcattcggtctgagactgagaccgagttcttccagtttgtgcttaacctcatcgagagatttcttacccaggtttctcaccttcatcatatcgtcttccgacttatgggtaagctcttcgacagtgttaatatttgcccgcttgaggcagttgaaggatcttacggaaagttccagctcctcgatggtcatctcgagcgctttttccttctgatcttcttctttttctaccatgatttccacggaatccatgctgtcggtgagatcgataaagagcttcaaatgctcctgcatgatcttcgcaccgatggaaacgctttcctcaggagaaatactgccgtcggtccagatttcgagaatgagtctgtcatagtcggtgatctgtcctacgcgtgtattctgtaccgtaaagtttacttttctggcaggggtatagatactgtctaccggaatgactgcgatcggagtgctttccgtcttattctgatcggcaggagtataacctcgtccatttgccaggttgatttccatcactaatgtagcattttcgtcgagtgttgcaatatgaagctcgggattgaaaatttccacatcgccgtcggagatgatatctgcagcggtaacttccttcgggcctaccgcattgataatcgctctcttcggcgtgtctccatttaatcgaaccgagagtttcttcagattgagaatgattgccgtcacatcttctttaacgcccggaacggtcgagaactcgtgaagtataccgtcgattttaatcgaagtcaccgctgcacccggtaaggacgagaggagaattcttctcaggctgttgcccagagtcgtgccatatcctctttcgagaggctccacgataaattttccgtagttcttatctgtatcggaatagatacattctattgttggtttttcgatttctatcactcgaatacctccttatataacccgcgaaatatgacgtttcttctgacgagctctatcatcggcttattacttggagtataattcgacgatgagatgttcagcgattggaacatcgatatcttctcttgaaggtaatgcaacgatctttccttcaagcttgtcagtatcgatcgtaacccacttcggagtcgtgatgaccatatctctgagctgcttgaacttaggagaatccttgctcttgtcttttacagtgatgacatcgccttccctgagttccatggaagggatattggcctttttgccgttgacataaaaatgaccgtgggaaactaactgtctcgcttctcttctcgtagccgcgaagcccattctgtaaacgacattatcaaatcttctctccaacatgagaagaagattcacacctgtagatccaggtctttttgccgctttctcgaaagtgtttctgaactgcttctcgagaaggccgtatacgaatttaactttctgcttttcattgagctgaatcgcataatcgctcttttttcttctgctctggttcgggtttcttcttgactgtttgtcaatccccataaatcctggttctacaccgagagttctcgctctcttgagaacaggctgagtattctttgccattttctattcctccttttcttctgaaatatttccgcaattacactcttcttctcttcggcggtctgcagccgttgtgaggaataggtgtgatgtccttgatcatagtaatttcgagaccggcggtctgcagtgctctgatcgccgcttctctgccggaaccaggaccctttacgtatacttcaactgtcttgagaccgtgttccatagcgcccttggcagctacttcagcagcgctctgcgcagcgaaaggagtggactttctggagcccttaaaaccgagggatccagcgctggaccatgctaaagcgtttccgctcatgtcggtcagcgttacgattgtattgttgaaggtagcctggatatgagcctgaccgcgttcaatatttttacgttcttttctcttttttctgactgtcgtcttctttacgggtttagccattgtttcctacctcctttactttttctttcttcctacggtcttcttaggaccttttctcgttcttgcgttcgtcttggtcttctgtcctctgacaggcagacctcttctatgtctaatgcctctgtagcatccgatttccatcagtcgtttgatattcagattgacttctcttctgagatcaccttccacatgatactctgtatcgataatctttctgatcttacctatctcttcttccgtcaaatcttttacccttgtatcagggttaatttctgctttagataagatatcattcgctgttggtcttcctatgccatagatataagtgagtccgatttcaactctcttgtcgttaggtaaatcgacaccggctatacgagccattcgcgtacacctctctttctgctttccttcgattgtagtcgaattcttgttataactcaaaaatagattttaccacacttttttcgttatgtcactaaaaaattgtcacaatattcaaaaaagtatcgctatatacagcaataccgcatcatgtctgaagcggtatatcctgtctgttgtgatgtttaaccctgtgtctgcttgtgcttagggtttttgcaaattaccattaccttaccgtgtctcttgataaccttgcacttttcgcaaatcggttttactgaagctcttaccttcatttttctgcctcctttgcctatttctcacgccatgtgattctgcctctggacagatcatacggggataattctaccttaactttgtctcccggaaggattcttatgaagttcatccgtatctttcctgaaatatgagcaagcacttcgaaatcgttatccagcttcactttaaacatcgcgtttggctgagcttccaacacagttccaaatacctcgattacatcctttttagccataattttccatctcctcctgattagctatagccagctgtatcgcgcctgacttttctaattctctttgcagatcaatattttcaactctctgaccggaatcaattttttccgcgatcgtcttattgattctgttatatggttgcagatgtttcactttctttttcttgggactgtcatatttccttctgccgccgtcagcaatcagaacatattcgtcatccagaacttcgaccacgaagaatacacagcctttatcgtgtcctgctttcgatttcacaatctgcccgggaaccaagtcgttttttataatagccatagttctcacctttataaaagcgttataaccagcggttccgcatcggtaataactactgtgttttcataatgtgccgcgagactgccgtcgcctgtcaccgccgtccactcgtcgggcagcactttcaccgcgtaagatcccgcgctgaccataggctctatggccagaaccataccttttttcagcttcggccctctgcccggtcttccgtaattcggaaccgggggctgttcgtgcatttccctgccgaggccgtgacccacatagtcgcggatcacaccgaaaccgttcgactcaagatgtacctgtatcgcatgagacacatcggacagatagttccctgcaacgcagtatttcagaccttcgaagaaactttcttccgtaaccctcaccagcttcgccgcttccggtgaaatttctcctaccgcataagtacgcgccatgtcgctgtaccagccctgataaatcgcgccggcgtccacacttacgatatcgccttctctgagttttttgctcttcgacggaatcccgtggacgataacttcgtttaccgaaacacatgcgctggcgggaaagccgccgtatcccttgaaggccggtatcataccgccctccaggatacgcttctcgacgaactgatcgatatcatgcgtcgaaattcccggctttataaaaccttccaggtctcggagaatctccgctgtaagcttcgccggtatcttcatcatttcaatttccgcatcggattttatgatgatcatttcggttattctcccagtaccttcgtaatatccgaaaatacgctgtccatggcctgatcaccgttgattgtcaccaatgatccggccttttcgtagtactctacgagaggagctgtctgagaaccgtacacattgattctgttctcgacggtttctctgttgtcatctgctctctgatatacttcgcctccgcaggcgtcgcagacaccttccttcgcggtcggctttgtattgatattatatgtcgcgccgcaggccttgcagactcttctgccggcgatgcggtcgatcagttttgcaggttcgacatcgatattgatgaccttcgtgatggagaggttcttttccgccatgatcttatcgagctcttccgcctggaaaacagttctcggaaatccgtccagcatgaatccgtctttgcagtcgtcctgattcagcctgtcttttaccagatctaccaccaactcatccggaacgagctcgcccttatccatataggacttggctttctggcccagttcggtgccgcccttgatatttgcccggaagatatctcctgtagaaatctgcggaatattgtatttctttacgataagttctgcctgagtgccctttccggctcccggaggtcctaataatacaatgtttaacatgaccttttctcctctttatttcaggaatcccgaatagtttctcataataagctgcgactccagctgcttcatggtatccagcgccacgccgactgcgatcagcagcgaagttccgccgaaacctatgcccagcgctgtgaagctgcccaggatgttcgggagggttgcgatcactgcaaggaaaatagctcctgcaaaagtgattctcgtcataaccctgcttaaatattcaactgtggattttcccggtcggatacccggaataaatccgccgtttgccttcatgttgtctgctacttctaccggattgaaagtaatcgcagtatagaaataggtgaagaatatgatcagcacgatgttcagtatggagtaaatccacacaccgggactgccgctcggcgataaatacttcgttacaaactgagtaaatccggaagcggagttcgtaaaatatgtgactgtcagcgggaactgaagaatggacagagagaaaatgaccggaataacgcccgcctgattaactttgagcggaatgtgtgtattctggccgccgtacatctttctgccgacgactctcttcgcatactgtacaggaatctttctcgtaccctgctgaacttcgataacgccgacgaccaccgcgatagcgaagatcacgaagatcacgacgctgataatcgaaacggtaccttcctgaagtttgatgaacgtctgatagatcgcgctcggcattctcgctacgatacccgccatgatgatgagggaaataccgtttccgattccgtgctcgttgatctgttcacccagccacatcaggaatgctgtaccggccgtcagagtgatgacgactaccgcaatcgaaaagacggatttgtctacgactgcgctgcggaacagtccgacagtcagaccgacagactgaaccagcgccagtactaccgtaagatatctggtatactgtgcgattttctttctgccttcggtaccttccttggaaagcgcctcgagacgagggataaccacggtcaataactgaagaataatcgatgccgttacgtacggcgtaatgctcagagcaaagatcgtgaaattactgaaggatccgccggaaaacatatcgaacagtccgaataatcccgatgcattgccgaaatagtcgctaagaaccgctctgtcgatattcggaaccgggatgcagcaacccagcctgaatatgactaacatcaggattgtaaagatcaatttctttcttatctccggcactttaaacgcctgtccgagcgacttcagagcattcattagatcacctctgcctttccaccggcagcttcgatcttctcaattgcagctttgctgaatttatttgcttttacggttaacttcttttcaagatttccttctcccaaaatctttactcctgctttaacctgctttaccttaccttcttttgccagaagttccggtgtgatttctgtaccgtcctcgtagcagttcaggtcgctcacattcatgatggaccattctttcttgaagacattggtgaaccctctcttcgggattcttctgtataacggcatctgaccgccttcgaagcccagtcttacaccgccgccgcttctggagttctgaccgttcatacctctgccgccggttttaccctgaccggtagcggtacctctgccttttctcttcgtattcttagtagagccgattggcttgctaagttcgtgcagtttcatctgttacacctccaatcccattttagagttcttctacttttaaaagatgctttactttctcaatcgcaccgcgagtctgcgggctgtcaggaagttctacactcttgttcgtctttttgagacccagtgcttctaccacttttctctgcttaggagaagtaccgatcgtgcttctaactaatgtaaccttaagtttatcagccatttcttctcctccttatcccaggatttcttccttggtctttcctcttaatcttgcgacctgttctactgtcttgagagtggaaagactttcgattgtagctaatgccatgtttaccgcgttattggaaccgatagacttcgctctgacatccttcacgcccgcatgttcgagaaccatacgtaccgaaccgccggcgatcacacctgtaccgggagccgcaggcatgatgagaacctggcccgcgccaaagatgccggtatttctgtgaggtatcgtcgtccctaccataggtacttcgatcatcttcttcttagcgtcatcggtagcctttcttacagcttcagggatttctgcagccttgccgaggccaacaccgacgtgacctgcgccgtcgccgacgacaacagttacgctgaatctcatgttacgaccgccctttaccgtctttgcaacacgtctgatgttgacgatagtctctctgaactcggtctttgcatcaattgcattattccgcatgttatcctcctcctgttagaattttaatcctgcttcacgggcaccgtcagctaattcttttactcttccgtggaataagaatccgcctctgtcgaaagcaaccgtgtcgattcccttttcgagtgctttcttgccgacgctttcgccaaccaactttgcagctgccttatttccgccgtaagccgcttctgctttgatgtccttatccaaagtggaagctgctacgatggtcgtaccgttcgtgtcatcgatcagctgagcatagatgttctttgaacttttgaatacgcaaagtcttggtctttcaggagttccggagatatgctttcttactctggcatgtcttgccagacgtttttcgttcttagtagcttttgccatgtttattcactcctttctgcttatttcgcgcctgatttaccttcttttctgatgatcacttcaccggcatacttcacgcccttgcccttgtatggttcaggttttctgtgcgctctgataaccgcagcgtagttgcctacctctgccttatcgatgccttttactgtgatatcagtctgagacggaacttcagtcgtgattccttccggatctttcatttcgatcggatgtgaataaccgaggtgtaagatgagcgtg

SEQ ID NO: 269 - DNA, 22009 bp, Unknown
  16S sequences of unknown bacteria
aaaaatacagctgctatttcgatatttttccttttttcggtcttgcttgcacgcataaaacctgctctggcttaattgccacagcaggtttttctacaagctgagagattcgccttgcggcgaatctctggatacgcggcgacgcttcgcgccgctagcgaaagtggcggggagggggagaaattgcgggcatagggagaaggatggcgggaggcggaacgggtacggctgagcggagagattcgccttgcggcgaatctctggatacgcggcgccggcggagccggcgccaacggaagaggcggggagggggagaaattgcgggcatagggagaaggcggcgggaggcggaacgggtacggctgagcggagagattcgccttgcggcgaatctttggatacgcggcgacggcggagccgtcgccaacgaaaagaggcggagggcggcggaaagcaaaaacgcctcgccgcagggcgaagcgtttgggggtggtcaggagaggacgaggcgcaggaggtcctcggcggaggaatagccggcgatggcatgggtggcgccgtgggcgaggagggcctgcggggtctgcatggaggcgacgcccacgatgcggcgcgcgcctgcgcggcgggcggcctcgatgccgggcgtcgcgtcctcaaagacggtgcaggcgcggatgtccgcgccgatgcgcgcggcggcggccaggtacaaatcgggcgcgggcttgccggggagcgagccatcgttatagacgacgaggtcgggatcgaaccagcgggcgagcggcaggtgctcgaagaagaagcgcacgttgggcagggcggaggcggtggcgatgttccgggggatttcgcgctcgcgcagggcgtcgaggaattcgggaagccccggggcgagggcaaagtccgggctcgcaaggcagagcgcgcggtagaggctctccttctcctcttccagggcgtcggtttcctcgcgggaaaaggggcgggagaagaaataggcgaggatctcccccatgttgcggccgtggatgtaggtttggaactccgcttcggtcacggggcggccgatcttcggctcgaggaagcgccgccaggaatcctcctggaagcgctggtcgaagaacatcgtgccgttgaagtcaaagaggacggcgggggtcattcctgcacctccagccagggggcggggtggacgacggcgccctggcgcgcgtccatggcgtcggagacgatgaagagggagcggatgtcctcgtagatgcggggcgcgccctcgcgccggcgctcgaccatcacgcccacgccgacggtggtgacgtcgaactcctgcatgagctcgaccatgccgcgcacggtgccgccgtccttggtgaagtcgtccacgatcagggccttctggccggggcggacggcgcgcttggccagggacatggtcttcatctccccgccggagccggagatgtagttgatcgtcacgaccgagccctcaaaggctttgtggtcgcgccgggcgatgaccagctgcacgcccagggcgcgggccaccatcagcgcgaaaggaatgcccttggtctccaccgtgagcacgaagtccggcgcggcggcaaagtaggggccggccatgatcgcgcccaggacctccagcgtgtccggctgggagagcaggtcctggatgtagagaaagttgcccggcagcacgcgccccgggtccgagagcacgccgcagagctcctgcacataggccagcgcgctcgcctgcgacaggcgcggcacaaaccgcacgccgcccgccgcgcccgtcacggtctcgatctggccgaggtcaaactgcgcgaagaccttgcgcagcagctccacgtcctcgctgacggtggattttgccgcctcgaacatgccgcaaaagcgccccagggtgaagatgtggttgggcgcggccgtcaagatgcgcgccatggccccgatgcgctcgttccgcttgatcttgtccatagtccctccacataaatccgaatgttcggaaacattaggttctattttacgccattttgctcaaaatgcaaggggttaaccgaattttcattcagagttttgcaaaccttcgcagttccggcagggtgcggtgtgattgtaatttttgccggcatatcgtataatggagggacgaaagcgaattgcggaaacggaggaagggcaatgcagcggcagagcttagaggaatatcgggggaaggtcgtgcacttcatcggcatcggggggagctccatgtcgggccttgcgctgctcctgcgcggcgcggggtgcgtcgtgcgcggggacgaccggtcggagagccacgcgacgcacaagctgcgccaggcgggcatccccgtgacgatcggccacgacgcgcagaacgtgcgcggcgcggaccttgtggtctacacggcagccatcgcgccggacaacgtcgagcgcgtggcgtgcggggaatggaacatcccgcagatggagcgggcggagctgctggggctgttggcggacgggcacgagccctccatcgcggtcagcggcacgcacggcaagaccacgctgacctccatgctggccacggccctgctcgaggccgggcgcgacccgaccatccacatcggcggggagctggaccgcatcggcggcaacgtgcacgcgggcacggacggcagcttcctgaccgaggcttgcgagttcaaggcgagcttcctcaccctgcacccgacgctggcgatcgtgacgaacgtggacgccgaccacctggacttttaccgcgacctggacgagatcgaggacacgttcgccaagttcctcggcgggatgcgggaagggggcacggcggtgctctgcgcggacagcccgcgcgcgctgcatttgaaggaccgcgtgcccgtgcgctgcgtgacgtacggcctggacaacccggcggcggactggagcgcggaggacctgcagcacgacgaagcgctccgctacgcctttgtgccggtgcgcggggaggagcgcctgccgcgcgtcgcgctggccgtgccggggcggcacaacgcggaaaacgccctgggcgcggcagccgcgctgcacgagctcggtttttcgggcgaggagatcgcgcgcgggcttgcggcctttgcgggcgcgcaccggcggtttgagcggaccgggaccgtgcagggcgtggcgctctatcacgactacggccacaacccggcggagtttgcgaccgtcgtgccgctgggcaaggccgcggccggggcgcaccggctcttcgcggtctgccagccgcacacctattcccgcaccaaggcgctctttgaccagtacctgacctgctgggacggcgcggacgaggtgctggtgacggacatttacgccgcgcgggagaaggacccgggcgacatccacgccacgatgctggtcaaggccctgcaggaagcgggcgtgcccgcggtctacacgccggactttgacgcgtgcgaggcgtatctgcgcgcgcactgggcgccgggggacgcggtgctgaccctgggctgcggcaacatcaacctattaaatgagcagatccagcgccacgaggcggacaagacgggagaaagggcggaatgaagaacatggaatcgacggcgatcatcctggcggcgggcgagggcacgcgcatgaagtcgagcctgcacaaggtgctgcacaagctctgcggcgtggagatggtggactatgccctggccgcggcgcaggcggcgggggtcgagcggccggttgtggtcgtgggccacgcggcggaggcggtgcgcgagcacctcgcgggacgggcggacttcgccctgcaggacaagtccacgggctggggcacgggccacgcggtgatgagcgcgcaggcgcaccttccgggcgagggcaaggtctacatcctggccggggacatgccgctgctgaccggcgaggacctgctggccctgggccaggcggtggacgcgggcgcggccggcgcgatgctcaccgcggtccttgcggacccgacgggctacggccgcgtgctgcgggacgcgcaggggacggtggagcgcatcgtggagcagaaggactgtaccccggcgcaggcgcaggtgcgcgaggtcaacgcctcggtctactgcttccggattccggccctgctctcggccctgccgcggctgaggaacgacaacgcgcagggggagtactacctgacggacgtcgtcgcgatcctgcgcggggacggcgagcgcatcgcggcggtggagaccgcggccgagcactgcatgggcgtcaacgaccgcgtgcagctggcgcaggcggaggccgcgctgcgccgccgcatcaacgaggccctgatgcgcgggggcgtgacgatgatcgacccggagcgcacctatgtcgacgcgggggtcaagatcgggcgggacacggtcgtctaccccggctgcgtgctccagggcgcgacgcgcgtgggcgagggctgcacgctgctgccgaactgccgcctcctggacgcggtcgtgggcgacaaggccacggtggagtcctccgtgctgctctcctgcgcggtgggcgcgggcacgaccgtcgggccgaacgcctatctgcgccccggcacgcgcgtgggcgcgcactgccgcatcggcgactttgtggagatcaagaacagcacaatcggcgacgggaccaaggtctcgcacctgacgtacgtgggcgacgcggacctgggcgaggggatcaacctcggctgcggcgtggtcttctcgaactacgacggaaagagcaagtaccgctgcacggtcggggaccgcgccttcatcggctgcaacgtgaacctcgtggcgccggttacggtcgaggcggacgcctatgtcgcggcgggctcgaccgtcaccaaggacgtgccggccggggcgctggccatcgcgcgcagccgccaggcgaaccttgccggctgggttgcggcgcgcaaggcggagggcaagctgtgacgtacatcgtggtgggccttggcaacccggaaaagaaatacgagcacacgcgccacaacgtgggattcgacgtcctgcaggtgctctcccagaagctggacatccccctgaacaagctgcggtgcaaggcgctcacgggcgagggccgcatcggcggcgagcgcgtggtgctcgccgcgccgcagacgtacatgaacctctccggccagagcgttgtggagctcctgcgctggtacaaggcggacgcaaagcacctgatcgtggtctacgacgacgtggacctgccgcagggccgtctgcgcgtgcgcgccggcggcagcgcgggcacgcacaacgggatgcgcaacatcgtgtacctgacggggcgggacgactttccgcgcgtgcgcatcgggatcggcaagcccgagcccgggcgcgaccttgcggcctatgtcctgggaaaatacccgcccgaggcgcggcaggcgatgtttgacgccttcctgcgcgcggcggacgcggtgcaggccatcgtgaccgacggcgcggaggcggccatggcccgcttcaacggcgaaggggggaagggcgcgtgatcttctacgcggtgcggcacgggcagacggactggaacgcgctcgggcgcgtctgcggccggacggacctgccgctcaacgccgagggcaagcgccaggcgcgccagaccgccggcagcctgcgcggccttgccatcgagcggatcgtgtgctcgcccctgctgcgggcgcggcagacggcggacttcgccgcgcaggcgctgggcctgcctgtgcgcgtggacgcgcggctcatcgagcaggattacggcatcttcgagggcaggtccgtgacggacgaggcctttttgcgcgccaagcggcagttcgccgtgcgctatcccggcggggagagcatgatgcaggtggccgcgcgcgtctacgccctgctcgacgaggagcggcgcaagggcggcggccccgtgctgctcgtctgccacgggggcgttctgcgcttgatccgcacctattttgcggacatggacaacgacgcgtttttccactattcggcaaagaacgcgcaggtcgaaacctaccgcgcggactgaggcgcggctcatttcctgtggcagggaatccgctgcggggaatggacagaaagacgggcccgttttgctcgtctgtcacgggggcgttctgcgcttgatccgcacctattttgcggacatggacaacgacgcgttcttccacgattcggcaaagaacgcgcaggtcgaaacctaccgcgcggactgaggcgcggaccgcttcctgcggcagggaatccgctgcggggaataaacagaaagacgggcccgtgctgttcgtctgtcacgaggcgttctgcgcctgatccggcatcgattttgcggacatggacaatgacgcgttcttccacgattcggcaaagaacgcgcaggtcgaaatctaccgcgcggactgaggcgcggcccatttcctgtggcagggaatccgctgcggggaatggacagaaagacgggcccgttttgctcgtctgccacgggggcgttctgcgcctgatccggcatcgattttgcggatatggacaatgacgcgttcttccacgattcggcaaagaacgcgcaggtcgaaacctaccgcgtggactgaggcgcggcccgcttcctgcggcagggaatccactgcggggaataaacagaaagaatgcgaaaaacattttaagatccaacccccaggcttcggggggagagcgcgagaggggggcgaagccccgcctctcgcctcttgcccggaggccggagcagagaggaggcaacccatgatcgcggaggtactgctcgcgccgctgcgcgcgacaaagggatttttggccctggaggaggcggtggagcgctccgtgggcaagcccgcggcggcgttcggcctggtggagggcgcgcgcgtcgcggtggcgggcgcgctcagccgcggccggcgcacgctgatcgtcgcgcccagcgaccaggccgccatgcgcacggccgaggacctgacgcgctgcggcgttgcggcggcgcacttccccgccagggagacggcgctcttccgcgcggacgcggagagccgggagctgatccaccggcgcatcgcggtgctgggggacctgctccagggcaaggtgcaggtcgtttgcgcgcccatcgaggcgctgctgctgcagctgatgccggttgcggagttccgggaagcgatcctgacgctgcagccgggggacgaggcggacctctcggacctgacgcgccgcctggctgcggcgggctacgcgcgggaggaggcggtcgagggccgcggccagttcgcggtgcgcggcggcatcctggacgtctaccccgtgcaggcgatgacggcctaccgcgtggagttcttcggggacgaggtggactccgtgcgcgagatggacgtcctgacccagcgctcgacgcccaccgacgcgccgctgctcgtctacccggcgacggaggcctgcgccagccccgcgcagatgcgccgcgcggcggacctgctcgaaggggagctgtccgcgctgcgcgcccgcgcgccgaagaagcgggccgcggacgacgcgccctggctctccggcgaggacgaggaggaggccggcgcggcgcggccggcgcgcaaggctgccctccttcccgaggaccgcaggcccgagcgcatcgaggccctgcgccagggcaggcgcggtgaggcgctggagaacttcgtgccctatctctacgagaagccggcgtacttcagcgactacttcgatccggagctggtcgttctggaggaggccggccgcctgcgcgagcgcgcgcagaacgtcggcctggagttctatgagcaggtcaagaacgcgctggagcggcaggaggccttccccggccagcagaagctcctggacacctgggacaacttcgtgcgcatcttagagaagcggcgcagcgccgtgctcgggcacatgcaggtgggcctgggcgacctgcgcctgtcggcgatctgcaacatcgagacgcggcagatcccggacttccaggggcagaacgcgctgctcgtggaggagctgaacgcctaccggcagaaggggacggcggttgcgctgctcacgggcgggcgcgcgcgcggcgagcgcctgcgcgactccctgcgcgagcgcgacctgcccgtgacctttgcggaggggacggcgccccttgcgccgggggagatggcggtcatccccctcgggctcagccgcggattcgcccttccggaggcaaactttgcggccctgggcgacgcggacctgttcggcacgacgcgccagcgcgccgcgcgccgccgcaggaaggcgggcgaggccatccgcgcgttcacggacctgaaggtcggggactacgtcgtccacgagagccacggcatcggcgtctacacgggcatcgcgcgcatgaccatgcagggcaagacgcgcgactatctgcacatccagtaccagggcacggacgcgctctacgtgcccacggaccagctcgaccgggtgcagaagtacatcggcatggagaacaagcccccgcgcctgaacaagctgggcggcacggagtgggcgcgcagcaaggcccgcgtcaagggcgagattctgaagatggccgacgaactcatccgcctgtacgcctcgcgccaggcggccccgggcttcgccttctccccggacacgccctggcagcgggactttgaggacgacttcccctacgaggagacgccggaccagctccagtgcatcacggagatcaagcaggacatgcagcagccgcaccccatggaccgcctgctctgcggggacgtgggctacggcaagaccgaggtcgccgtgcgcgcggcgttcaaggccgtcatggacggcaagcaggtcgccttcctcgtgcccacgaccgttcttgcgcagcagcacttccagtccgtgcgcaagcggttttcgcactttcccgtgcgcatcgagatgctctcgcgcttccgcaccgcgcaggagcagaagcagatcctacaaaagcttaaggacgggcagatcgacatcctcatcggcacgcaccggctcctgggcaaggacgtgcagttccgcgacctgggcctggtcatcatcgacgaggagcagcgcttcggcgtggcgcacaaggagaagctcaagcagctcaagacccaggtggacgtgctgacgctctcggccacgcccatcccgcgcacgctgcacatgtccatggtgggcatacgcgacatgtcgctcctggagaccccgccggaggagcgctaccccgtgcagacctatgtgctggagtattccgacgcgctggtgcgggacgcgatcctgcgcgagctcgcgcgcaagggccaggtctacctgctctacaaccgcgtgcgcagcatcgagcgcttctacgaccacatctgccggctcgtgcccgaggcgcgggtcgccgtgggccacggccagatgcgcgagacgagcctggaggacgtgatgctcgacttctacgagggcaagttcgacgtgctcgtgtgctcgacgatcatcgagtccggactggacgtgcccgcggccaacaccatgatcgtctgcgacgcggaccgcttcggcctctcccagctctaccagctgcgcgggcgcgtgggccggtccaaccgcctggcctactgctacctgacggtgccgcccaacaaggtgctcaccgaggtcgcggaaaagcgcctctcggccattcgggagttcacggagttcggctccggctttaagatcgccatgcgggacctggagatccgcggcgcgggcaacctgctgggcagccagcagcacggccagatggcggacgtgggctacgatctgtactgcaagctcatggaggaggcggtcaacgagctgcgcggccaggcgggcctgcaggtggacgtggagaccaaggtggagctgccggtggacgcctacctgccgcaggagttcgtccagggcgaggccctgcgcatggaggtctacaagcgcatcgccgagatcgagacgcgcgcggacttctccgacgtgctggacgagatgatcgaccgctttggcgacgtgccgcccgaggccgagcacctgatgtggatcgccctgctcaaggcgctcagcgcccggctgcagatcgagcgcgtgttcctgcgcgggggcaaggtggtcttccgcttctcgcccagcgcaacgatcgacggggccaagctcgtcttcgccctcaacaaggccaagagcgacctcgtgctgcagcgcagcggcacgggcacggtgctgctgctcaaccgcgcgggcgagccggagcagctcatggagctggccgtggacgcgctggagaaggtcgtgcccgcggtcgtgggcgaaaccaacccgaatgttcaaagaaaggtcacagaatagtatttgcatcccgtgccgttatcctgtataatagacgggtgcataaggagcaacagcgtcttagcaagaaaggaagagaaacgaaaatgaagaagttcatcaagctgctggccgtcgcgctggctgccgcagcgctggcgggctgctcgctggtgagcatcaacaccgaaaagatcacggtggcgaccgtgggcgaagacaccatcaccaaggccgcctttgacgaggggttcaacgccttcctcgcccagtacggctacacccaggacagcaccgagatcgccgaccagctcccggacctcaaggagcagtacatcaacatgatggtgcagaacctggtcatcgagcagaagatcgaggagctgggccttggcgaggtcacggacgaggagaaggccgccgccgagcagagcgtgcaggactggtatgacgagcagtttgcgcagctggtggagacctactccgcagacgaaaccgtcgaggacccggaggccgaggcgaccaccaccatcgagaactacctttcctactacggcacgacgctggagcagatgaagcaggaagaggtggactacatccccacccagaagctctatgacgaggtgaccaaggacatcaccgtcaccgaggagcagatcgagagccagtttgccaccctcgtctccgaggccaagaccaagtacgacgaggacaagtccgcctttgtcaccgactaccagagcggcaacaccatctactacacgcccgagggcatgttcttcgtcaagcacatcctcatcggcctgaccgaggagcagcagcaggagatcaaggacctgcgcgcggatgaggacgagaccgtcgccgccaccgcggacgccaagcgcgacgagtacctgctcaccatccgcgaggaggccgaggcggtcctggcgcgcgtcgacgccggcgaggactttgacgcgctgatcgaggagtacggcgacgacccgggcatgagcgtgtacccggacggctacctgacgtacgtcggggataccagctttgtggacgagttcgccgcggcctgcgaggccctgaccgaggacggcatgaccagcggccttgtcggctcggactttggctaccacatcatccgccgcgtttcgaccctgcccgcgggcgaggcgacgcttgccgacgtgcacgacgcgctccaggagtccatgctccaggaggcgaaggacaccgcctacagcgaccagatcgccgcctgggtggaggaggccaacgtcaccatcgagaccggaaggctctgatcgcacaagtaggatgaagagcgaccgatgaaaagcccgccttttcttcagtcgcttttttccaccgatttcccaagaggtgaagatccatgaaaaaagtatgcatcgcgctgctggtggttgcctgcgtggcgctgggcgcctgcgcggcgccgcaccgcggcggcgagtttgccgtgggcagcgacgtcgtccccctgccggaggcgacgccccagccgacgctccccgccccgcccacgccggccctgcccacctccgcgcgtgttgcggcgagcgcctaccggcccgaggccgtgcccacggtccttgccggcagcgagaacttctccaccgcgctctacgtgctgctgaccgagggcatccgcgcgggggatggggatgtggacgccagcaccctggaggtcacgcaggcgcagttcgacggcgtgcgcgcctacctgctctcgcgcaacccctggggcacgctgacggacatcaccctggacgacgttgagcccggacgcatcgtgctgacatacgccctggacgacccggacgagtgtgccgcgcaggcccagcgctttgacgacgccgccaccgccgccatcgccgcctgcgtgcccgagaacgcgacgcagctttccgcctccatctcgctctacaagttcgtcgcccagaccgtgacgcagaactacgaggacgagaacttcgaggccgccgacagcgggctctacagcgcgctggtggacgggcagggcatggaccgctcctttgcctacctctacagcttcctgctggaccaggtcggcgtgcagaacgaggtcgtcgtgtgcgagaccggcgagcacgcctggaacctgctgaccatcgacggccgttccttctactgcgacccgcagatggaggccgggctcaacggcggccaggccctgcagggcttcggcctgtccggcacggacatggcggcgctcaacggctggcagacctggcaccccgagtccaccgcggacagcgagtccaccgcggacagcgagtccggcgcggacagcgagtccaccgtggaccccgagtccggcgcggacgcggaagccgttgcgaccgaggcggaagcggccacgaccgaaaccgctgcacccgaggcgggcgccgggtccggggcggccatgccggagaccgagacgctcctttcccccgtgcgccaggcgaactacgccgacattgacccgaccgcggacgcgatctatttcgacctgatggacggccgcgcgggcatctaccgcatggaccttgccaccggcgaggtgctggacgtcatcgaggccgaacccctcgccctcgccgtgctcggcgagaacgtctactacctggacagcgcggacaacctgctctacagctaccacacggcggacggcgccatcctgcaggccgtcgagggcgtgcccatgcgctccctgcgccgcgtgaatacggagctgcgctacgtcacccaggaggacgccgagggcctcatctccctgaattgagtttgtttccggaagcaaaacaagaagacgtgcctgattcacgagaaaagtggactgaaagcgaaattcagtccacttttttcgttgacaaaaggcggaacagggggtatcgtatagataccgatgacaatggaaagagggagattcccgtgcagaagggaaccgcgttcgggtaaaaaaagtccccgtcgcttccggcatatcgaaattgggagggatccatatggcagtacagaagaccaagacgcttgtgggcgggctcctgctcgtgctgtgcacggcgctgctgcccgccgccttcctgacggccggggccgccgcgctgcggccgctgctggcgctgggcctggccttggcgctgtggctcatggacgcgctgcccgcgcccgaggcgccggcggagtgcctccccccggcgctgctctccctggcgctgctgttctggcacgcgggcagcagcaccggccagtacgcctggcggacgctccccctgctggggctcctgctcgccgccctgtgcctggtgcagatggcccgcgccctgctccttgggcgctggagttggcgcttcgacagccgccgggccgcggcgctctttgcgctggtgctgctggcgctgctgcagggttttgccgcgcagagcttgcttgcgcagcgcatcaagaacgaattttacggcacggcgctggtgctcgtgctgaacctgtgctgcggcgcgctgctgctgcccttcctgcgcccgcggcgggcgctggcgccctggttcgccgcgctgggcctgctgcttctgctctgctttgccgtggctaatcacctgccggaaggcctcggcatcctgcgggattggcttggcgacatcggcgcgcagcagaacctgacgctcggcgccgccttcctgttcgcggcggccgccagcctggccgctccgaaaaaggcggcatgaaaagcaaaaacgcggccccaagcggacccgcgtttttttagcgtgctgcgtcacacgccgctgtaggcggagaagccgccgtcgatgggcagcacaacgcccgtgatgaaggacgcggcctcgttgttgagcaggaagagcaccgcgccggagagctcctccgccttgccgaagcggcccatgggcgtcgcggcgaggatcttgcccgtgcggggcgtggggttgccgtcgtcgtcgaagagcagcttctcgttctgcttggtgacgaagaacccgggggcgatggcgttgacgcggatgcccgccttggagaagtgcacggccagccactgcgtgaagttcgagatggcggcctttgcgccggagtaggcggggatcttggtcaagggggtgaaggcgttcatggaggagatgttcaggatgttgcagcccgggcggcccagcatctgccgcgcaaaggcttgcgtgggcaggagcgtgcccaggaagttcaggttgaagacgaaggagacgccgtccgcatccaggtcgaagaagctcttgacctccgcgtccaggtcgccctcgaagtagtattccttgtccgtggtggcgcgggggttgttgccgccggcgccgttgatgaggatgtcgcaggggccgaggtcgctctgcacctggccggccacctggcggcaggtctcggccgagagcacgtcgcagcggtaggcgcgggccgtgccgccctcctcgcagatcgcctgcacgaccgcgctggccgcctcctcgttgatgtccagcagagcgacctttgcgcccgcgcgcgccagcaccgccgcaaactgcgagcagagcacgccgcccgcgcccgtcaccaccgcaaccttgccggtaagatccgtgttcagcacgtttttcatgggaagtccctccttagtccttggatgccctggccttttcgcaggcctcgaacaggccgttgaggtaggccgcgcccagcgcgcggtcgtagaggccgtagcccggccggcccgtctcgccgaagatcatgcggccgtggtccgggcgcacgtagccgtcaaacccgttgtccacaagggccttgacgatctcgtacaggtccaggctgccgcagggcgaaaagtgcgcccgctcctcgaaggagccgtcggcaaagcgctgcacgttgcggatgtgcatgaaggcgatgcggtcccgcgcggcgtacttgcgcaccagcgccgtcacgtcgttgaaggccgcacagcccaggctccccgtgcacagcgtcaggctgttggccgggctgtcgacgatggcgagcatccggtccaggtttttttcgcaggtgatgatgcgcggcaggccgaagatcgggtagggcgggtcgtccgggtgtatggccatgcgcacgccgcagctctccgccacggggatgaccgccttgaggaagacctccaggttcttccagagcccctcctcgccaaggtccgcatacgccgcgaacagctcgcgcatctggtccttttcataggaggcgtcccagccggggagggacaggccgtcccgcagggggtccaggcccttgagctggtccatgtacatcacaaggctcgtgctgccgtccggcgcggccttgtccagctgcgtgcgcgtccagtcgaagaccggcatgaagttgtagcacacgcacttgaccccgtggcgcgccacgcggcggatgtttaccttgtagttttcgatgtagcgggcgcagtcgccccggccgagcttgatgtcctcgtgcacggggatggactccaccacgtcaaacaccaggccgttgtcccgcgcggcctgggcgatggcctcgatgctctcgtcgctccaaacctcgcccggcggaacgtcgtagaccgcgctgaccaccgagtgcatgttcggaatctggcggatgtaggaaagcggcacgggatcgtccggaccataccagcggaaggagagtttgctcatcggtttttgcacccccagaagaaattttccgctgtatgctttcgacggtaagcgcttacattcctgcccaaaggagaaaatttccgcaatttctttccccgcgcggccagggcttccgaaacgcaggaaaatgtggtatcatgaaggggaaacacgaggccgcccgcgcggcggcggaaaggagggcgcgcatgggcaacatttggcacgacattcacccctcgcgcatcagtcccgacgattacatcgccttcatcgagatcgaaaagggctccaagaacaagtacgagctggacaaggagacgggcctgctgatcctggaccgcatcctgtacacctcgacgcactatcccgccaactacggcttcatcccgcgctcctacggcgacgacggcgacccgctggacgtgctggtgctgtgcagcgagaacatcctgccgcagtccctagtgcgctgctatcccatcggggtcatctccatgctcgaccagggcaagaacgacgacaagatcatctccgtgccgttcaaggacccgctctacaacacctaccacgacatcttcgagctgccccagcacgtcatggacgagatggcgcacttcttcaccgtctacaaggcgctggagaagaaggacaccatcatcgacgagatccgcgggcccaaggaggccaaggagatcatccagcgcgcgctggacagctacatcgacaacttctgccgctgagcgcgggggaaggaggcgaacccggatgagatggacgaaagccgcgcgcgttctgctctgcgcgctggcggtcgcctcgggccttgcggggtgcgcgcagccggagcaggcggagggatcgcccacgcccgcgccgaccgcaacgcccacccccacgcccgcgcccacggacccggagccggacggcgcgcccaacgacgaggcggactattacttcgactttggccaggacgaccgcatccgcctggactacgacgtatcctggcccagcgccgacatggagggctggaccgaggtcgagagcgcgcgcgtctccgcgctgctgacgctcgagtgcgagggcgacgcgatcacggtcctgctggaggacgcgccggagaatccggaccttgcgtcctttgtgaccacggcgcgggagctgctgacctttaactacgaggggatcgccctcgcggacggcgtgcaggagggggagtacctcctggtcgccggcacgctgccggacggcgggatcgtcaccagctgctaccggcagatcgacggtctgtacctgacggtggagctgcgcgccggcgcgcagaccgcggaatccgcccaggcgctgctgaccgggaccttcctgccgaacctgcaggtcacacgaaatgcaacggaggattgaggagaaaatggagagcattgtggagcgctttttgcgctatgtttcctatgacacgcagtccagcgaggactcggacaccttccccagcacgctcaagcagaaggagctgggcaagctcctggccagggagctggaggagatgggcgccgccggcgcgcacatggacgagtggggctatgtctacgccaccatccccggcaacgcgcccgcgccgaccatcggcttcatcgcgcacatggacaccgcgacggagctcagcggcaaggacgtcaagccccgcatcgtgcactacgagggcggggacatcgtcctcaacgaggaaaagggcatcgtcatgcgcgccgaggagttcgagtgcctgcaggccgaggtcggcaaggacctgatcgtcaccgacggcacgacgctgctcggcgcggacgacaaggcgggcgtcgccgagatcatggagatggctgcgcacttcctcgcccatcccgagatcccccacggcacgatccgcatcgccttcaccccggacgaggaggtcggcggcggccccgagcacttcgacgtgccgggctttggcgcggacttcggctacaccgtcgacggcggcgaggtgggaagcctgaactacgagaacttcaacgccgcctccgccgtggtcgaggtgcgcggcaaggccatccaccccggctcctccaagggcaagatgatcaacgccagccttgtggccatggagtttgacgctatgctccccgtgggcgaggtgcccgccctgaccgaggggtacgagggcttccaccacctgacggacatgcagggcacggtcgagagcgccagcctgcactacatcctgcgcgaccacgaccgcgtaaaactcgaggagaagaaggcgcgcctggaaaaggtcgccgcctacctcaacgacaagtacggcgcgggcaccatcattctgacgctgcgcgacggctaccgcaacatgcgcgagaagatcgaggagaacctgcaggtcgtggacctggccaaggccgccatgcaggacctgggcatcgagccgcgcgtggagcccatccgcggcggaacggacggctgccgcctctccttcatgggcctgccctgcccgaacctgtgcgccggcggccataacgcccacggcaagtacgagtacgtctccgtgcagtcgctgctcggctgcgcgcgcgtcctgatccgcatcgcggaaaaggccgccgagtaagaaacgcgaaaaaaacgcgcccgccctccccctggattttgggggaaggcgggcgcgctttttgtttacacccaccggggcggcacgtccgggcaggtcagcgcacgcttgatgcagcggacctcgacgtagcagccgcacttggcgcacagcgcgttgtgcaggtgctcgcaggtgcggcaggcggcgaggcggcgggcgtaggccgcctcgtccaccttgcgctccgggtcgagcgaggcgatgtagtccgcgatcgtcgcatacgccgcgcgattgacgtcgtccgagagcaggcagcggcggcagggcaggcgctttgcgcccatcggactggtcaacggagggtcaggcgcgccgcgctgcagggcggcagcgtgaagcgcagcacggtgttgccgccctcgtgcgccacggccacgccggagagaggctggatctgcaccgggctgcccgtctcaaagtcgttgtgcgcgtggatctcgcccgcgagcaccagcgcctcggcaagctccatctcgcagccggtcacgaccgtctccatctccacggcctcggcggcggaggggttgcacagcgtggtggagaggctgccgtccgcggcgcgggacgcgctctcctgcaccaggggcaggccgctcgcctcgtcgcagccgcagctcacgctcgagtggaggagcgtcgcgccctggtggaccttgtacaggtcaaagacgtggtaggtgggcgtgagcaccatcttcgcgccgtcggtgaggacgacggcctgcaggacgttgacggtctgggcgatgttggccatgcgcacgcggtcggcgtgcttgttgaacaggttcagcgtcagcgcggcgaccatggcgtcgcgcatggtgttctgctggtagaggaagccggggttcgtgccaggctccacgtcgtaccaggtgccccactcgtccaccacgagcgcgacgcgcttctccgggtcgtacttgtccatgaccgcgccatggccggcgagcagcgtctccatgaagagcgccttgcgcagcgtcacctcgtactcctcgcgggtgaagtccgtggcgctgcccttgtggttccagtcgtcggagggcgtggtgtagtagtgcagggagaggccgtccatgtacgcgccggcgttcttcatcaggacctcggtccagttgtagttcgggtcgctcacgttcgtgcccgggccgcaggcgatcttgaagatcttcttttcgccgtactgcttgacgtagctctggtagcggcggtagaggtccgcgtagtactccggccgcatgttgccgccgcagccccagttctcgttgcccacgccgaagtagtcgatctgccagggctcggcgtggccgttcttcccgcgcagcttggccatggtggagtcgccgccggcggtcatgtactcgatccactcggccatctcctgcacggtgccggagccgacgttgccgttgatgtagggcttgcagccgacctggcggcagagctcgaggaattcgtgcgtgccgaagctgttgtcctccacgacgtagccccagttcgtgttgacgatgcgcttgcggtcggccttggggccgatgccttccttccagtggtattcgtcggcaaagcagccgcccggccagcgcagaaccgggagctggatgttccggagcgcctcgaccacgtccgtgcgcatgccgttgacgttcgggatggcgctgtcctcgcccacgtagagcccctcgtagatgcagcggcccaggtgctccgagaagttgccgtagacctccggctggatctgcgcgcccgcgcgcgcggggtagatgtcctggcgaaccatgtgatcctctccttttattttagtataatctaaaaagatttagcttgacttaaaacctaagggcatgataccatagcggaggagggaagtcaagaaagggagagaaaaaatgcaggagtttggctttacggacttgctggcgctgggccgcgcgctggacagcgcggcgcgcgtggaggcgctgcggctgctctcgcaggaggggagcctctcggcgggggagctggcgcagaagctgggcctgacgcccggggccatgaccgggcacatccggcgcctgcaggaggcgggccttgtggacgtggagaacgcgaacggcgcgcacggcgtgcggcggatggtccgcctgcggcagaagcgcctcgcgctgaacctggaggccgcgccggaggccgagcgcagctacgcggtggagctgccggtgggcgcctacgcggcgcaccgcgcgctgccgacctgcggcctggccgcgccggaagggtggatcggccaggtggacgacccgcgcgccttcgacgacccgcgccgcttttcggcgggggtgctctggctgctggaggggtatgtcgagtaccgcatccccaaccgcatcccgcggggcggccggctgaagtcgctctccatcgtgcaggagatcgcctcggaggcgccgggcacctgcggggactggccgagccggatcgccttctcgctcggcggcgtggaggtggggtcctggatcagcccgggcgactacggcgaccggcgggggctctggaatccgccctggtggaacgacggcctcaaccaatacggcctgcgcaagacgctgcacgtggacgcggcgggcgccttcatggacggggagcgcatcggggcggtcacggcggcggacctgcccctgcgcgggggagaggccctggcctaccggatgcaggtggccgcggacggccacggcggcgggctgacgctctttggccggggctttggcaactacggccgggacatcgccgtctccgtggaatacgagtaaacaaaacgggcaatcggattcttccgattgccctgtgcgtttgcggagcgctcagccgatgtacgccgcggagacgtacgcctcgccgccgaggtattcaatcttgtaccagccgttcagcacgtcgaggatctcgacctccgtgccgcgggagagcgtgccgaggatctcgaagttcgtgcccgcgcccgcgcgcacgttcagcgtgcggcaggtgacgtgcatatccgtcaggtccccgccgaccctggccaggtagtccgcgctgcagtacgcagtctggccgttgtaggggaacttcagccagccgtcctccagctcgccctcgaggatcgtgccgcgggagagcgtgccgatcctggcgtagcccgtgccgccgcccaggcgcacgttcagcgtgcggcaggtgaccat

SEQ ID NO: 270 - DNA, 31268 bp, Unknown
  16S sequences of unknown bacteria
cgtcgctggtccaccacacggtgtccttggagttctcgtccatgacgatgaacttatccttgggagaacggccggtgtagatgccggtcatgacgttgacggcacccagctcgctgacctggcccttttcgtagccttccaggccgggcttggtctcttcttcgaaaagcgtttcgtaggaaggattgtagacgatttcggtcgttccggaaataccatacttttgcagatcaatgtttgccatctcaggatgcaaccccttttccaaatactgttaccgcaggccccagacggaagcccgcttcaggacgtgcggatgcaagccctactatccacaggatagcatagtcatcataccgcaagttgaaaaaaattgcaatctgattttcgcctattttcggaaaaaaacggcagaagcgccatgcaaaaaaggcatagggaccatgcccgaaaaggaaacgccgcttttttggaaattttttcgtccggggcttgacaggtttcggaaacggtgctattatatcaaccgtggtttgcgagaccacgccatgtcaagggggtcgggttcaacaaccatcctttgcggagacaccccgccgtgacccattagctcagctggcagagcacttgacttttaatcaaggtgtccggagttcgaatctccgatgggtcaccaccttccctttcggaagtgcggtgtgatccttgcgggcgtggcggaatggcagacgcgccagacttaggatctggtgccgaaaggcgtaagagttcgagtctcttcgtccgcaccaccctttcaaatggagcatgcggtagtagctcagtggtagagtgccaccttgccaaggtggatgtcgcgggtccgaatcccgtctaccgctccatttttttatctgggatgttttcgtccccctgcgggtgtagctcaatggtagagccccagccttccaagctggttacgtgggttcgattcccatcacccgctccatcaaaatgcagctctgacgagctgcatttttcattgttactgtcataaaagaaattttcccctttctttcccattttttcaggaaaggaaggggaaatttttatttgagcataaccacggtcacgccctgctcgccctcgccgtacatgccgtcccgaaaggatttcacgttcaggtggcgcttcaaatgcttctggatgcccgtgcgcaaaacgcctgtgcccttgccgtgaatgatgctgacctcgttgagccccgccatcaccgcgtccgccagataggtatctacggcttcggtggcttcctccagattcatgccccgaacgtccacctccatgggcacagtcttggctgcggcggtgctgcgcatgaccttgctggccttgggcttttcctgctcgatgacccgcagctgcttcagcggcaccttcatcttcataatgcctgcctgcacctgtacctcgcccttactgtccggcaggctgagcaccacggcctttgttttcagatggacgatctccacattctcgcccacccggacggtcttgggcggcgtgaagccgatgccattggcctcaccgatgccctcgctgaccgcgtccagattgtcgtccatgcgtttgcgcagcttttgcagctcgtgctcggggatctgcgcctgcttcttcatggctttcaactcgccgatgatgccgtccgcctcccggcgggcgttttccagaatgcgccgggcctccgccttggccttctgcatgctcttgtccttgctctgctcgatctccttgcggagcttttcggcctcgttgcgcaggcggacggtctctttgcgggtctcctccgccatctcccgctcccgctcggcgatctgccggtggtactccgcgttggcgatcacgtcctcgaagcgcacgtcctccttgctcagcagctccttggcgccgtcgatcagcctctcgtccaaccccagcttgcgggagatctcgaaggcgttgctcttgccgggaatgccgatggacagccggtaggtgggccgcagggattccacgtcgaactccacgctggcgttttccacgccgggggtgcttaaagcgaaggccttcagctcgctgtagtgggtggtggccatggtgcggatttttcggcccagcagtgcattcagaatgctctgagccagcgccgcgccctcggtggggtctgtgcccgcgcccagctcgtcgaacagcaccagatcgttgtcctccaccttttgcaggatggacacgatgttggtcatgtgggccgagaaggtggacagggactgctcgatggactgctcgtcgccgatatccgcgtaaacgtgatcgaacaccgccagctccgtgcccagctcggcaggcacctccagcccggcctgcgccatcagggtaaacaggcccacggttttcagggtgacggttttgccgccggtgttggggccggtgatgatgagggtggtaaagtcctgccccagccacagatcgctgggcaccaccttttccgggtcgatgaggggatgccgtccccggacgatcttcaatcgtccctcccgattgatcttcggcagcacggcccgcatctgacggcccagcaggcccttggcaaaggcgaaatccagttcccgcagcagcgccagattgccctccagcgcctcgccgtagggggccagcgaatcggacagggcctgcaggatgcgggtgatctcctgctgctccctggcgtagagctgcttcaggtcgttgcccagctccaccacaaacatgggctcgataaacagcgtggccccgctggcgctctggtcgtggaccagaccgggcacgttggcccggcactcggcctttaccgggatgcagtagcggtcgccccgcatggtgatgatggtatcctgcaggttcttggcgaagctggaagaacggatcatctggttcagcttgtcccgcatccgctcattcgcgacgcgaatctgccgccgaatctggtaaagctccgtggaagcccggtcggcgatttcttcttcgctcaaaatcgcatcattgatgtccgtctccacccgttccagcacagtcagtcgggaagccagccccgtcagaatgggggtgtcgtcccgatcgcgcaccagcgcactccgggcagcccgggcggcgcggagaaaggcggaaacgtccagcagcatccgggggctcaaacacgcgcccttctgggcccgggcgatggactcccgcacgtccgggtagctgaccagcggattctgccccagataggtcagcagcaccacggcctcctccgtttcggcaagggcgtggtttacgtcgcccagatcatggtagggcgtcagttccaaacagcgctgcttgccctcctcggtgatggcgtgttgagccagcatttcccgtattttggtaaattccagtacgcgcagcgcacgattctgttccataaggactccttttctcccgaaggccgggatgaacggtttattccacgccccgccgccagtgaccggcggtggcgtttacggcggggggaacggccagaccatcccgcagggccgcaaacagctccgtcaggtggagctgctcctccggaggctcggtggtgaaacgcaccagcattcccgccccaagggcgcggcgctcgccgtcacaggcccgcaggtcggtgggcagggcgttgtagacgttcacctgacagccgtccgagaacgccgttcgccgcagggggaacgcatagccccgcccatcccgcagcaccggctccatctgcccgcaggcctgatcgggggtgcggcagagccggcaggcctcccgcccgtgggaaaggccctccctcacccgggccgggcagtggttcagaatcatcaaccgctcccggccatagaccgggcacagggcgggcaggggcaggggcagcagctcccgctgttcctgctccgtccattccgtccaaagggtaaagccgacgacgggcagctccctcagggcctccagcgcccgccggttcgtcaccggcagagcgtcgccgaaaaacacgggccagtggtcggcaaaggagacctgccccatgctctgggccaccacgccgcccagcttcgccgtctccgccgcccggcgaatgccgtgcagctcgggttcggtgcattgtaccggcagcaccagccaacagccgtcaggcagtcggttcaaatcgtgttccaaatccgccggacggtagctgcggggctggaaccagagccggttcgcgccgcattgcagcagctcgtccgccattgccgggtcggaaaagcagacggtcagcgaattcgcattcaacggctccccgctggtcggggacagagtcttcccccacggttttctggcccgggtatgcgtttcctgtcccatctgccagaaggcttcgattctcgcagcggtcaaagccgcgattccctcccggcgcagggcgttcagggcgctgaccggcaaaaacaggccgtccgccagctcaagcgccagatcgtccggtgtttccaacacaaagggcgtgtcccccagcttgcttagctggcggcgcgcttcttcctccgtggcggcgcgatgggatgccgcctgtaccggctgtccctccaccgttaccgtgctttccccatcagagagggtcagcgtcatggggcggttcaggtcaaagaagccgcgcatttgaacgggaatgggtttgggagcgtggctgcgcgccgcttccagctgcttcgcgtcgctgagacgcgccacctccgtgccgggggccgccgtcagaccgggccgaagccgcagcactgcctcctgaccggccggggtctccgggccggaatagcgcaggtcgtcgtcctgccgccggcgcagctgcagactgtcgccgtcgtgcagcgggcgaatcaatcgtacccgtgccagatttccccggacggacgtgatcgtgcccagcggcagaccctcgtggctcacccgttccggcgcgcacagggccgcgtcctccgcgccgcccgcatggccccgggtaaatccgccccggttgaagatctgccgcagcttctccatcggcgcagggtcttccggatcgaagcggcctgccgccagatcgtccagcgcccggcggtagacttccgtcactacggccacgtattccgggcttttcagccgcccctccaccttgagggagcatacccccgcgtcccacagctccggcaggacggggtaggcgcacagatccttcagcgaaagccacgccgcctcccggccgttccattcaaagcgcatccggcagggctgggcgcaccggccccggttgccgcttcgtccccccgccatggaggacatcaaacaccgtccactgacggcggtacatagcgcgccgtgagcaaaaacttccgtctccacgcccgtctccaccacacggcgaatttcgtccagcgggcattcccgagccagcaccacccggtcatagccgaagttccgggcaaaaaccgcgtcgctggcgttggaaagcgccatttgggtgctggcatggagcttcagcatgggaaactggtcccgcaccagcgccgccacgcccagatcctgcacgatcaccgcgtccgcgccagcatgggcgacggttcgcagggtctccccaacgccggaaaactcctgctccttcaccagcgtgttgacggtcacatgcacccggacatgatgcaggtgggcgtattccaccgcccgggccagcccctccccgtcgaagttcacagcggaagcccgggccccaaaggctttggttcccaaatacaccgcgtccgcgccgctgtccacggcggcatggagcgcttcttcgcttccggcagggcaaagcagctccggaatgggatggttcaggttcatggcactttctcccctccgggccgaagcccttcagcatttcatttccagagaaaaggcggcgaaagggcgtctgcccctccgccgccggaaaccgcttacagcttcgtaaagggatattccacgccgttggtctccacgcgaatggactggatgcgctgaggctccagcgggcggtccatccggtcggtgcgctgggagacgatcttctccgcctcctccatgccctccagcaccctgccgaaggcggcgtactggccgtccagatgggggctgtcgctggtcatgatgaagaactgggagccggcgctgtccttcatcatgctgcgggccatgctcagaacgccgtaggtatgcttgaggtcgttcttcacgccgttggcgttaaactcgcccttgatgcggtagccggggccgcccatgccggtgccctcggggcagccgccctggatcatgaagccggggatgcagcggtggaagatcaatccgtcatagaagccgctgttggccagagaaataaagttgcccacgctctgaggagcgatctccgggtagagctcgcccttcatcacgccgccgttttccagagtaatggtaaaggtgggattcgccatactttacgccttctttccgttgctgcgcgtctctgccccttcgaaaaatttttctcccatagcaggcaggaaaaaagcagctaaacttatgtctattataccatcttgcgccctaattgcaacccttccgcagggcgcgcccgcccggcagggcatgacttgcccggctttctctgtttgcatgaacaaaccgtgactttttgcccgtaaggttgactttttcaggattttcctttaccattttagtatcgtaaaatgtgggaagtatcggctgaaagtgtcccccgccgtactcccgaaaatatcgaaaggaggaaccatccatccgaaaaagcaaccgaaaacaggaactcaaacaaacccgcagtctcgttcaggaaaaaatcaaggaatcagcgctgtcggtgcttccgattctgctgatcgtagggcttttgtgtctgtccgtatcgccggtgtcgcccgatcttctgctgagctttttccttggctccattttgatcatcgtgggcatgggcatttttacgctgggcgcggaaacttccatgacccccatcggcaaccgcatcggcacgtcgttgaccaagagccgcaacctgccgctgattctgctggtcagtctggtgctgggcttttccatcaccattgccgagcctgacctgcaggtgctggcggaaaccgtgccccacatcaacaacacggtgctgctggtcacggtggggctgggcgtaggcttttttctggcagtgtgtatgctgcgcatcatccggggcattcggctccggtggctgctgctgctgttttacggcgttgtttttgtgctggccgcgctggccgattcggactttctgagtgttgcgttcgattccggcggcgtgaccaccgggcccatgaccgtcccctttattctggcgctgggcgtgggcgtttccaacatccgtagcgacagaaaggctgaggcggacagcttcggtctggtggcgctgtgctccatcggccccattctggcggtgctggtgctgggcttcttctattccagcccggaaaccgtcgtggaaaccagcgtgctttcctttgcaaacaccgcggccatcggcagggcctacctgaccgccattcccgtctatctgaaggaaatggccgtggcgctttcgccggtggtgctgatcttcctgatctttcaggtgtgcagcttccggctgaaccggcgctccttcctcaagatctgcgtgggtattctgtacacgtatgtggggctggtgctgttcctgaccggggtcaacgtgggcttttcctccctgggcacggtgctgggcgcggagctgaccagcggctggacctattactggctgatcccgctggccatgctgctgggctggttcatcatctctgccgaaccggcggtctacgtgctggaaaagcagattgaagaggtcagcgagggcatgatccccggcaaggccatcaagctgagcctttccatcgccattgccatcgccatggggctgagcatgctccgggtgctgacgggcatttccatcctgtggttcctggtgcccggctatgcgctggcgctgggcctgaccttctttgtgccggacatctacacggccatcgccttcgactccggcggcgttgcctccgggcccatgaccgccacgttcatgctgcagttcatgatgggagccagcgcggcgctgggcggcaacgtgctgcaggacgctttcggcgtggtggcgctggtggccatgatgccgctgatctccatccagatgatgggcgtgctctacggccgccgcaagcctgccggtcagcccgagcctgaatacggcgacgacgacgtcgtcgaactgtgggggtgaaccgatgaattacatcatttcgatcatccatccggacgcgctggacgctatgacggagctctgccagcagctggggatgcccatgagcatcgcgacccacggccgcggcaccgccacccgcagcatgatggatctgctgggcatcgagaacaacttcaagcgcatcgttctgaacgttgccagcccggaaaaaacccgggagctgatccgggagctgaagcgcaagctgtttctggggatgccggggcagggcatcaccattgcggtacccgtgaaaagtgtgggaggaggaaagaccttggcttatctcagcggcgaacaatcgcccaaatataccccggagctgaattttgactacgagctgattctggccatcgccaacgagggctgcaccgatctggtgatgaacgccgcccgggcggccggggccaccggcggcaccgttgtgcacggcaagggcaccggctctcatagcgcccagaaattttacgccgtttctctggcctcggaaaaggagatcgtcctgatcttgaccaagacggagcagaaaacggccatcatgcgttccattctgaaagaagcgggtcccgactcccccgccggctccatcgtgttttccctgccggtgacggagatcgccgggttcgggtttacgaaagaggaggaataaactccaccccttgggcttccgtgcaggtcactgcgcggaagcctttttccttatccagcccggaaagcgccgcgtttgcggccccctccgacccgaacaggccgtagactaccgagccgctgcccgtcatcatggcccgcagcgcgcccagttcttccagccggtgaagggcgcgttccagctgcggccgcttcgccgtgctgaccccttccagcacattgttcatggaagccgccagtgcgggcaagtctcccgccagcaaggcttcctgcgcccggagggtctgagggcgggccagcgtttccgccggggtcgcgtcaaaagccgtgaagatttcgccggtgctcaggccgtcgcagggctgccacagcaccagccagccttggggcgcaggggtcagggaggtcagctgttcgcccacgccctcggcgcggcagagaccgccccgcaccagaaagggcacgtccgcccccacggtcaggccgatgcgctccagctccgctgtcgaaaaatgcaagttccacaggcgattcaggccgatcagcgccgcagctgcgtccgcgctgccgccgcccatgcccgcgccggaggggattgccttgcgcagccttatccgcgcgcctttctcgatccccgcggccttttgcagcgcccgggcggccctgaccgccagattgttttcgtcaaaaggaacgggcgcggcgcaggcctctccgtcccccgcttcggtgcggaagccctgccccgcgtcctccagcgtgagccggtcgctttcctccagccagagggtgtccgccagccgaacggactgcatcagcatatccatctgatggtagccgtcggcccgccggcccagaatatccagcgtccagttgattttcgcccgcgctttgagacaaagcattgcatcgttcctcttttctgtgatatagtacattctcaaggatttccataatgaggtggtagtacgcttacgattcccgtgctggtttccctgcaggccgtcgcccgccgcgacgacgaggaagaacccattaccctgctgacctcgggcaggctcacgctggaggacggccgctccgtgctgacctatgaggaggtgctggacgaagctctgccgccccagcccattaccatcacactggaggatgacacactgatgatggagcgcggcggggactatgccacccagatgatcttccgccggggccagcgctacgaggggcagtatgacacacccttcggcagcatggatctggcgctgttctgcacccggctcaaaacgcggctggatgaagaaggcggagaaatttcgctccattaccagatggacctgaacggccagttcgccgcgtcccatgaaatggaaattcggctgatgcgccaaaacgaagcccatgaatgagctggtctctctgacggatgcaaaagcggcgctgtacgaagccttgcagcctttcagcctgaacggctattttctccgcttcagcgatacgccggaggggctgctggtgtgcgacctgccccgccggggcggcgacctgtccggggccgaggaagcgctgacccgtctgggctggcggctcctgccggaaaaacggccggggctatggctcattgaccgggcggacgctgtctggcaggacatggcgggcagtttgacccttgaacttcacgcctttccaaaacgggaggaagacttcgccgcctattcgctgtgccgcttgctgctgctgcatcccgcgccgctggccgtccagcccatggagctgacccgggccctgtggctctggacggtacgacccggagaactcaaatcccttcacgagacctgcgccgcccttctgcggcaggggaaaccgctgcccacgctgggcggccagctgctcaacgtccatctgcaaaaccagaaaggagcgtgacctatgctgctggaatactgggggcattccttcttcaccgttactaccgaaaaaggcaccgttgtcgcctttgatccctatggggagttctacgattaccccaagcgccggatcgccgcgaacgtgtgcgtcgtcagccaccatcaccacgatcacgacggggtcagcagcctgaccggcgaatataagctgatcgacacggccggaaaggtgcagcccgcgcccgacgtacggctgacgggcatcccctgctgccacgaccatcatggcggcgcgcaccggggacaaaacctgatgttcgtgctggaaagtgaaggactgcgcatcgcccacttaggcgatctggggcacattcccacgcccgcgcaggtgcgggagctgggccgggtggacgtgctgctgctgcccgttggcggctactacaccatcgacgcggcggaagccgcgcaggtgcgtcagctgatccgtccccggctgaccatccctatgcattacaaaacggacttcgacccggacatgcccattgccggcgtggagacgttcctgcagcagatcaatgccgcgaacgcgccccgcgtgcccttcctgcggctgacggcccgggacatgagtgagcgtcccgaggtgctggtcatggacgtgggctgaatcaaaattcgcccagtgtctgccacacgtaccagtccgttccgtcggtggccagttccaccgttccctctccgctgaaataatgtgggatcccccggccctccagctggtacatcagcttggagagccttttttcatccgcgtaattggtcacgatagcgaactccgggctgacggcggtcaggaaatccggctccaccggcgtgatgccgtgatggggaattttgatcacgtccgctttcaggtcttccggggcaagctgggtcaggaaacccttctgggcacggccggtaatatcggcgcacaaaagcaccgtagcgtgtccgaaggtcactttggtcagcagggacttggcattggtgttgttcaccttggtgtagcggtgcagcttcagctccgcgccgcccagcgtcagcgtgtccccttcccccacctgccggttgggaatgcccagcttttccgtcagctggatggtgcgtccatgcagctccttatccgcccgggcccaccactcggtgtaggggtgcaggtactcgtcggcggtgaagccgttcagcatcaggtaatacagtccgtcgatatggtcgtcgtggctatgggtgttcagcagatacttgaaatggcggatgccccgctgctccatggccgccttcatgggatcccgaaagggcttgggcccgccgtccaccatcatgctttcgccgccgcattgcagcagcagcgcgtcgccctcccccacggcgaaggccgttatccgaagaacgtccttctcctgccagtcagcgggcatttcctgttcatacacctgcgccgtcgccggaaaccaaaggccgcaaagcagcacgcctattaaaagcagacccatccaaaaacgagacaattccatccgcctttctcatgaaaaaaatcaatgcagcgcagggaaacagggcctcaagcgggtcgccccggcctgatcccccacatctgtcaaatgtcgtatacgctacggacgcgaagcccctccgcgcttccccgaagcacttgcagcttccgaatgccggggtccatatcgaagaagttatcgctgagtatcaggtcggggtcgttgctttccacatacacggccttggcaaaagcggacgcttccaccgtgatctcgccgtcctgcgccgagacccgcaggtcgggattgcggaaggcgaaatgcttgggtgcgcagaacagcaccgcgccccggctgacggcctcgccctccacgacgaaggcatagctcaggtaatgctccgtcacgctggcctccgggaaggcttcctcctccagccaccggctggacagggcggggacgaccaccgtcttttcgccctgccgaacaacggccccatccggggtgcgcaaggcccagcgaaccacgccgctgaccgcctcccgggtctcgttgctgacgcacagccgggcgctgacccggataggctcggtgcggaactcgttgatctgcgggttctggctcacttcgccctcttcctgacaggagatcatcaccggggcgaagaagcgcttggccgcgtaatgcagggccttccagcggccgaaatagtcgatggacgaccaggaggccacgggccagcagtcgttcagctgccagatcaccgcgcccatgcagcggccccgattgcgccgccagtgctccacgccgcagcggatcgcgtccgcctgcaaaagctgggaggtgtacagcaggttatcgaagctctccgggtagcggtaggtctggctcagataggacaaaatcttgccgttggcggccttattgcgctggtggcgctccatcacccgggagaaaatattgcgatcctccggcaaagtgaagctctccaccgttttcaggcaggggaaggactggaagccgaactcggaggtatagcggaagaagaacttccgatactcggtaaagggcttctcgccgtgccacacgtcccagtaatgcacgtcgccccggttttcgccgttggggtcgtcgtaggagccgccgctggagggggacgcgggccagtagaacgtctggggcgcttcccggcggcagatttccgggatgatggactcgaacatcttgatataatccgcgtggtgatgcatggcggaggggacgaaggcatggttctggccgttcacgtccagcttcagcgccatggcctggaacatttccatctcgttgttaccgcacagaagggccagcgacgggtgatggcgcaggcggcgcacgttctgctccgtctccttgcggatggaggcctcgaatgccggggtcaggtcgtagaaggcgcaggcgtagagaaagtcctgccacaccagcaggcccagctcgtcgcagatatcataaaagaaatcgtcgggataatagccgccgccccagatgcggacggtgttgaaatgagccagcctcgcgtcctccagcaggcggcgggtgcgctgcggcgtaacccggctgaggaggttgtcctccgggatatagtcgccgcccatggcgaacaccttcaccccgttgacgatatggcagaattcctcgccccactgatccttctcccgggagacggacagagtgcgcaggccgatgcggcgcttccactgctgggggccgtcgggcgcgtccaccgtaacgcacacctgatacaggggctgctcgccgtaaccggcgggccaccacagctgcgggtcttcgatcacgatgcggccgtcctcgtccatggggcggcgttcgccctccggcgtggtcagggcggccgaccagctccattccgcgccgggctcgcattccacatggggcgtgaccttcaggaagacctttccgtcccgatgctcctgcaggatcagcgcgtcctccagccggacctcgttcacgcacaccagactgatcggccgccagattcccgcgtccggcagacgggggccccaatcccagccgaacatgcagtgggccttacggatatgctggaagccggggatcgcgtccgtgctgcaccagccggggcgcttttcatactcgctgagcgcatagcggatgggcgaatcgaaccggatctccagcacgttttccccgggcagcagcaggggcttcacgtcccactcccaggtgatgtgcatgttgtcggcgtatcccacaggctggccgttcaggctgacatgggccagcgtatccagcccctcgcagcgcagcagcacctttcggctctgcagcatggtttcttccgcctcaaatacgcgctgatacacaaaatcgttttccaacagggcaaaggcctccagctcgttttcccggtaaaaggggtcgggaagggtcccgtcccgcatcaggtcggcatacaccgagccgggcaccgtcgcctgacgccaacgttcctgccctgtctgccgcatgagccactgctcgccgttcagagagtagatccgcatcgttctgctcctttgcatcgaaaaaaatcatagtccctggctatcatacaccgaagcggggcggagtgtaaagaaggaaagaaggcacaccatgaagaatccatccatgtgtttcttcttcaacggaaaggagacgataaagtgcgctatacctttcaacgggatatcgacggaattcaggtcgaactgaccctttgggattacctgcctgaaaagtgggatgattttgacgttcactggtgcaaatgcaatttttcctttcgttccgatcactggctggattatcaccgcgagaacgaggaaattattcttcgctgcgaagtaacccaattggaagaacttttaacgcagctgctggatcaccaaataacagagtcattcgaatatgaattgatcgagcctgacttttctttctttttttattcttccagagatgctcaaaaaaacattcctacggatttcctgctggaatggcgcgtccatttctgggaagatggaatgacagccaattatctcactgtcacattgggggacgatgctattacagccctgcgggactattttcgagagatcatccgcagtgtcccatctccagaaaatgcccgcaaaaaggagacctccccatgacgactctttggctgacgcaggagccgaccggctccattctggatgtgggcggcggcggagaagggatcatcggccgccggtacggctcggcggtcacggtcatcgacaaccgccaggaggagctggacgaagccccctgttcctgcccgaagctgcggatggacgcttcgtccctttcctttgcgggggcttcttttgagaacgtcaccttcttttattcgctgatgtacatgaatcgccccgtgcagagcgccgccattgccgaggccgtccgggtgctgaagccgggcggcaggctgctcctctgggactgcgagatcgcctgcgcctatccagagccctttctggccgagctggacgttcgctgggcgcgggaacgagtctgcaccacctacggcgttgtaaaatcagacccgcaatccatggaagatttcctgaacctgtgccggggaaacggattgacgcttttgaaaacggaaaccgccagcggacatttctatctggaatttcggaaataaaaaacaggcgggcctgcttctttcagcagacccgcttgtaaaatattttagtcgtaaatcggatattcccggccttcccgaaccatgacggggatcacgtcgatgggcgcgggaacggtcacggtctgtccgccttcgtaggtctgatgcgtatacgcatccgtccagcggcagcctgcgggcagatagacgctgcgctgctgcgcccctgcctccatcacgggggagaccagcaggtcagggccgaacatataggagtcctccacgttccagcaggccgggtccgacggaaagtcaaagaacaggggccgcatcaccggcgcgcctgtctcgctggcttccttcatcaggccgcgcacataggagcgcaggcgttcccgcaggaacaggaactttttcagcacctcgtacaccttttcgccgaagctccacacctcgttgggctggccgctggtgagctggcgcacattgtcgatatactccacttcccgctcataccacggcgaacgttcgccatgcatccggaacaccgggcagaagcagccccacgcaaaccaccgcatcagcagttcccggaaagccggatcgaccggctgaccgccgatgaaacctccaatatcgctggtccaccacgggatgcccgccatgcccatgctcaggcctgcctgaagctgttctctcatggaacggaacgaagaatagacgtctcccgaccacgtcagcacggcgtacttctggctgcccgcccacgcgcagcggatcaggctcatgacgttttcttctcccgcttccttcaatccctcatagaaccccttggcataaccgacggggtacacgttggagcattgcagcgccgggcccgcgtaataacggtaattatcaaaatcgtaatttccgtattccggttccgcttcatccagccagaagcagcggatgcccttctgataatagttttctttgcactgctcccagacaaatttctgcgcgtcgggatgggtcgcgtcaaaataagtggtattgcccatccatgtgctgttcaggctgcacccatggtcggaagccaccagatagccgtgttcggccatgaagggataattgcggctgcgttcatccaccgtcggccatacggacaccaccgtttccacgcccatatcgtgcagttccttcaccatggcgtccgggtcgggccagtcccggggttcaaagcggaagtcgccctgcagcgtccaatggaaaaaatcgatcacgatggcatccagcggcaggccccggcgcttatgctcccgggccacgttcagcagttcctcctgcgtgcggtagcgcagcttgcactgccagtagccaaggccgtattccggcatcatgggcgtgcggcccgtcgccagcgaatactgggcttcgatctcggcgggcgtatctccggcggtgatgaagtagtccaacttcacggtgcgtttggcgtgccattccgtcacgttggtggcgaaggtcacggagccgatggcgggattgttccacaaaaagccatagccccggctggacacgaaaaacggtacgctggcctgactgttgcggtgcgccagttccagcgtcgcgccctttttgttcagctggcggtgctgatactgacccatgccgaaaattttttcatcgtcataggcctcgaaccgggcggtcagttccacctcgttggtgctcatgatgggcttgagttcccggcccttcagattcagcggaagcgcgtaccggttgagccggttccgatcgcgccagaactcggcggtcagttcttcgcccttctgattcaggaagcggagccagccttccgggttcagttccgcggtgatctttccgttccgcagccggacataggtgccctgctggtggtacttggcatattcttccccgcgataccacgggtcggtggtatccacgttctcataggtgatctccgcatcggtttcccctaccggctccatcagggcccaatcgtggccgtccatctgcgggaaagcggtcatccgcacccgcagggaattttcgccccacggttcaatccagagctggctgtttccttcccgaaagatcagtcttttcccctcgtttgttacctgcatttttcctcctcgcagggcttcgccctgcacccacgttcgcgttctagttggatagcaaccccatgctcttgccgcgtgaaagaaatgggcttcgccctgtacccaaattcgcgttcagttagcccgcaaccccatgctctcgccgcgtgaaaagaacgggctttcccttgacctatattcgcgtttttttgacaagcggccccgtatggcacttagaaaacaaatttttccgtcttttgcgcataaacgctgtgccgggatgggcgctccccaccccggcacaatcagtgcatattattcgtgcaccaccacggtatagggcttcttggaatcggtagcgacctccgccttgccgttcttcatggtgacggtgtaggtggcggcaagctgtcccttcagatcgggaatcttcacggtaacggtctggccctccgccagctggtacacgtggagctccaacccgtcggtatagtcgtagtcgggacggtcgtcgtgcttgcccatgggcagcaccgtgccggggcgcaccatcagcggcagggacaggaagtcatgggtctccttctgccaatgaccgccctgcaccttgcggccgtccagcaggctcgtccacaggccgtcgggcagatagtagtccacatggctgtccgcatggaacacgggagccaccagcagactttcgcccatcatgtactgccggtccagcgtatcgcaggcgggatcgtcggggaattccagcatcatggggcgcatcatgggcgtgccgtgctcgtgggcctccaccgccgcaccgtacagatagggcatcaggcggcacttgaggcgggtgaacttccgcaccacgtcgcagctttcctcgtcaaagagccacggcacccgatagctgctggagccatgcaggcggctatggctggacagaaggccgaatgccgcccagcgcttgtacacatcagcgggcgcggtctgctcaaagccggaaatatcgtggctccagaagccgaagccgctgtggctcatgctcagaccggcgcgcagggtctcggccatggaaatatagctggcgctgttgtcgccgccccagtggacggggaactgctggcttccggcggtggcgctgcgggcgaacaggatggcttcgccctcgccccgttcttccttcagcaggtcaaacaccatcttgttgtacaggaaggtgtagtagttgtgcatatgcagcgggtccttgccgtcgtaataggcgatgtcccgcacggggatgcgttcgccgaagtcggtcttcaggcagtccacgcccatgcgcaggatcttccgcagatgatcgcagtaccatgcccgcgcgtcggggttagtcacgtccagaatgcccatgcccgcctgccagaggtcggtctgccatacgtcgccatttgtctttttcagcagatagccgtgctccatgccctcccggaacagggggctggcctgaccgatataggggttgatccagcagcagagatggagtccacggtcgtgatagcgtttgagcatccccacaggatcggggaaggtctcctcgtcccaggtgaagtcgcaccagttgaagcccttcatccagaagcagtcgaagtggaacacgctcagggggatatcccgatccgccatgccctgaatgaaggaagtggcggtcttttcgtcatagttggtggtgaaggacgtagacagccacaggccgaagctccacgcgggcatcagggcgggacggccggtcagggcggtgtagccgtccagcacggccttgggcgtgccgccgtagatcacgtcgtagacgatggtttccccttcggcggagaactgcacccgctccaccttttcactagccacttcgaagctcacgtcggaggtgtcctccacgaaaataccgtagccccgattggtcatatagaaggggatattcttgtaggtctgttcgctggcggtgccgccgtcggcgttccacatatcgatggactggccgttcttcacataggcggcgaagcgctcgcccaggccgtagacacactcgcccacgtccagcatcagagagtcgctcatgtaggtcttgccggtgtccttatccagcgcccggcccatgccgcggaacgcgctgctggtgagcaccctgccgtcctccgccacatagtccacccgccagttttcgcccttctgcacccgggcggtcagcttgccgctggtgaaggagaccatctcgtcgttttcttcaatgacggcgttcaccggctcctcgtaggtctcgaaatggggggcgttatcccgcttgcccgcgaaatgggtcacggtgacgcggatgatattctcccggggcgcggtaaaggtcacatccagcgtaccgccgtccagcgtatcaccccgatgatggatggggcggcaggcggacagcacgtgcagcgcgtcggggcgcttttccacccgaaccgcctgcgtggcgtactgcatctggaagttgggccggatcagccaatagccgttggtaaatttcatggttttcagctcctttatttcaaatgaaaaacttacacgaccgtgacccgcacggtcagaggaaggtcggtgcggtaatcgcccagatcgacggtcagggcttccgtgtcccgtgtccatttcacaggacgttcaagccccagcacttccaccttgcgaaccagcgaatggcagggagccttgtgatcctcaccgtccgcccgcaggctgcgaattttcagcacgccgtcctccgggcaggccatggcgatggcgtagacctgatcgccccgacaggtgaagcggaagtcctcgctggtgaagacccggggcttgccgtcggagaagccgccttcttcgataaccgtggggccttcctgcgccagaagccacaaccccgtgccgtgaatggtctcatcgttgaccttcatccaatcgcccatagcgcgcagaatttccatatccttgtccgccagggtgccgtcgggcttcgggccgaagttcagcaggagccgtccattcttgctgaccacgtcgatcagatcccagagaatttcccgggtctccttgtagtcagcccgtttggagtagcaccagccattccgcatcacggaggtgtcggactgccacaggaagggcttggcctcggcaaactgtccccgctcaatatcaggtacgccgcagccgaaggggaacgcgtccaccttgtagttgacaacgccgccgccccagctctgcgcccggttgtaataataggccagaaagcgaagcatatagggcttggccgccttctgaatgatccaccagtcgaaatacacgatgcgcgggtgataccgatccacgatctcacagcagcgcagcagccaatccgtcaggaactcgtcgtccggcgggcactccgcgtcagggttgaaatgcacggccggttcaggcttggcgggccagtacaggtcgccgggctgcgtgtcccgcacgtcgctgtcgaatgcccggccatggctcatgaaccaccagtgctcgatgcggtggctggatgtgccgatggtcatgcccgctttttcggcttcttccagcaggtcgcccagcacatcccggtgagggcccatttcgaaggcgttccagcgggacagctccgagcggtacatctgaaagccgtcgtgatgttcggccacaggaacgatgtactccgccccggcctgctggaacagctccacccattccgccgggtcaaacttttccatggtcagctgaggaatgaagctcttgtaaccatgttcccgatggtcgccgtaatgctccaaatggtattcgtactccgggctgccctgaatgtacatattccgggcataccagtcatgataggccggaacggaaaaagggccccagtgcagaaaaatacccagccgtttttcccgataccacgggggcagggggcaggatgcgatggattcccactgggccttgtaaggcccctgctggatcacccggtcgatctgacgaagatagcgttcgcggttcatgcagtcgatcctccttgccgtcctaaggcggctcctttgataatgatacattggctaaaccgttcgccgagtccttccgaagcgtaaaaaaagaaagccgcaatgagaaaatgcaggtcgtttttccgctttcgtcctgaactctgccctgcgtccatctttggggaaggggacacagggcggaattcgggaggcggatcggacggaaaaaacaccgctcaacagcctttttgataaatatcgggggacggcgtaagccgccccccgaatcaaaccggaaaattactggttcagcgccagggagatagcttcattgatggaaaccatcttttcctcgacaaaatcatcgtagccgtagctcttgcaggtggagaccatgtcgttccacagctgctcgaactgctcgtcgctctcggcgtacacgcactgccagctgccctgcttcatcacaggagcaaacagggcgcgcttttccttggcggcgtcgctcatatccgggaaggtgtaggagaaggtgggcaccacggagatgctggtgggatccttttcgtacaggctgcggtagaactcgatgccgttggcagcgccgttggcgtattcttcgctccaggccttgctcagttcggtggcatagcgctccgcatagcagggccagcccttgtaggagtaggaataggtcttgccgggcaccatctgctccagcttgatggtctcgtggttgaacttgttctcgccgtcttcgaaggtaccgccgccgtattcagcaggcatttcggtttccttcttggcttcctggcaggcccagccgaactcggtcatctcggggataccgtcggcgttgtagtcccagcacagacccttggggccgtagttggacacgatagcgccttcttcggtggacagccactcgatcagttccagcgcgcgctcgggatattcgcagtccgcgccgatggcccacaggcggttgccgccctcggtggtaatggtcagctgctggggagcgccgtcttcaaacttgaaagtggtgaagccgatcttctgagcggccttttcagcgctgttgaagttgccgatgatccagccccacagagccatcaggtaacggccgttggtcagcttctggctgtaggtgtcaaagttctgagaaacggattccggatcgaacaggccttcgcggtacagctggttgttcaccttcagtgcgcgatagtacaggctgccctcttccagaggatcgaccacgtcgccggtggcgtaattcacgcccaggaaatcctgctctttgtagccgtacagggtcatcaggtcccaggtgaacttcatgacgcagtcttcccagtcgctgaagccgccgtaagcgtacactttttcgccgtcagccgtttcgggaatggcatcctgtagcgccttcaggaaggcgggcaggtcttccaggctggtcagcgcgggcttgccggccttttcccaggcgtcgaaacgaacctgcaggccgtaggtggggtcggtgatctccgcccaggcattgtcttccatggcgacggagtagccaaagccgaatttgccttccacgccctgatccgccgcaaacgcggagatcttgtcaaaagccttggtgaagtaggtgttcagggtcggatactgagccatgtcgatatcgctcagatccatcagcagatccgccttcagcgcggtggtgaaatgctcgcccgtatcgcccaggcagatgatgtcgcccagagaaccggcggccacgccggcagagtaggcgttggcgtccacgttggagctgatgaaattcaaggtgatgttgaagcgatccttcacttccttggcaaaccagcccttctgctcgccgccgaagttcgccacttcggagaacacgttcagcgtgatgggctccttgtagtcttccgccatggcagccagcggcagtgccgtcagcatcatgcacagacacaggaccagagacaggattttcttcatgtttttgagaacctccttcatttttatctatacccgctctgcgggaatagctcgatgggaatgggtcagcccttcacagcgccgatcatgatgcctttgacgaaatagcgctggaagtaggggtacaccagcaggatgggcagcgtgaccaccatggccacggtcatctgcacggacagggcggtctgcttgacggacagattggccatcgcgccgctgtcctgcgtggtgcgcaccagtgcggccagcgactgggcctcgtgctgatacttatacagcaggaactgcagggtgtagtacttgccggagggcatgagcatcatcgtatcggtgaagctgttccactgacccacggcggagaagatgcacagcgtcgccagaatgggcgtgatcagcggcatcaccacggacacaaagcagcggaaatagccagcgccgtccagcgtggcgctttcctccagcgcgggtggcagaccctcgatgaaggtcttgaccagaatcacgttgtagggcgacaccagtccgggaatgacgtacacccagaagttgtccagaaagcccagcatccgcaggttcatgtaccacgggatcaggccggcgctgaaatacatcgtaataacaatcatcctataccagaccttgcgcagccacatttcctgcttggtgaccagatagcccaggaaggcgcatccgcccaccgtccacagggtgcccagcacggtacgggccacggacaccagcagcgcgtccgcgatgccctcgatcttcatgacctgcacatagttctcgaagtggatctcctgcgggtaaagctgaatcttgcccagacgcaccagttcgttggaggaaatggtgttgatgaacaggtagtaaaacgggaacacgcaggccagtgtgatcaggaaaaatacagtgtagttgacaatattgaacgcgatatcgcctttggagcaaaccttgcggtgctttttcatctccggggccttctgcttcttcatcatctgtccgtccctcctttacacaatcgactcgccgcgcagcttcttggaaaggaagttggcgctgaacagcagggtgacgctgaccaacgttttcagaatgccgatagctgtggcgaaggaatacagcgccgtgcccttggaggcgatggtgatgttgtacacgtacagatccagcacctcgatggtattcttgttcatgctgttctggaacaccatgtactgctccatgccgttattcaggatgttggaaatggacagcatgaacagcacgatgaaggtgggcagcagaccgggcagggtgatgtagcgcatctgcttccagcggttggcgccgtccaccttggcggcctcgtacagctcctgatcgatgcccgcgatggcggccagatacatgatcgcgccccagccaaggcccttccatgtgctccagccccacatcttcagccagatgtgctcggaggagttgagccatgccaccggctccttaatggctccaatggccagcatgaacttggagaagatgcccgtgtccatagcgaacatggccatagcgaaggagaacaccagcgcccaggaaatgaagttgggcagagtggtgaatatctgcacgcacttcttgaagcgcatgttgttgacttcgttcaggaagatggcgaagatcatgggcaggaagctggtggccagattcaggccgctcataccgaaggtgttcttcagcacccggatgatgttgtcccggtggccctgattggtgaacatttccgtgaaccacttgaagcctacaaactcctgctgatccatgggaatgccgaacttgtagttgtagaaggcgtagctccatccgtacaggggcagatagctgaacaggaacactgccaccaggaaggggagcatcatcaaaaagagcttatacttcttgggcagctcctcctcattcacaaaattggagaagaacgccgcgaacaggagcagaggcagagacacgtacaggaacgccgtcgccccggaggaaccgatggagcggggcatggccagcgcggacaaaagccacgttaccagccgggccacgaacgccagcaggaacagcagaatgggcagcttcttgtctttcttcgccagcacggcggcaatgccagccaggatcagcaccatggtgatccagctggaaatgctgaaggacttgaacagcttctgcatcaggtcttccactgcggcggcgttcagttcgccgtccttggcttcctcctgatagatggccttgcctttggaatcggtgggatggagcagttcttccggcgcgtggaaggtcagggtctccaggccggagacgttcaccgtggccagcaccttgttcttaccgggcttggtgaaggagacggtggtgccgggcagcagcgcaaaagtcaaagagaccagcgccagtgccagcgcgatcaccttcaggcggctctttttgggaatggggttaacgaagtacggctcgttggcataacgaacgcccagcacgccgcagccggtgctggccagggtcagcagcgtcagcagcatgggcgtgagcgtcaggctgcccagacccagctggcacagctgacgggtggcggtggagaacatatctccgctgccaaggctcataaggcccatcaccgtagcgcccacgcagatcagtgccagcacgctcaggctcagcgggaaccagcggtccaccttgggcaggaaggccagcagcgccgtcagcgccagcaggatcatcgccgcgatcagataggcgttgggcgcggcggtggaggaaccgatggtaaaaatgccctgaatgttattggcgtcgttggaatagggcaccagtacttcgatatcgccggtcagcacgctgccgtaaacgcccttttccacagcctcggcccggaggttcggctcgttgccaagcatttccttccacagcggcgtggagcggttcatggccgccgcgtctgccgggtcagccgtgatgctttccggcacggacaccacatgagagggcagcagcaggcacagcacggccagaatggccagcacgccgcttgccagccggaacgtccgatcggtgatcttcatggccggaactttcttcaggccgacgaagcccaaaaccgccataatcaaaccgccgatggccggggcgtagatccacgcctgattttccagaagcagggtaaagaggatcgacccgcagatgttggtcacctgcagggaggaggtaaaggtcagggcgatggaaaggaaggacagcacaatggacacgcgcgtccaccgctcccccgccaccagcgccgcagcggccagtgccagcagcaccaggcccgcgatcagcatccagttgtcaaaggtaatcagcccaagctggggaacctccgctgtgggaaggcagtccgcccctttgagcataatgtctcccacggagaccgttttgggaaacagcgccgccgtttcctctcccagctggctatggacatacaccttggccgcaggaaggaacagcgtggctagaacgatggcaaggacgatgataccggcccagcgctttttcaattccgaccccttctttcttccgtttttctatttgtttgggttcaggcggatgcgcaccgtctgaccccgatggacaaacagttgaaagttgctttcatcgccgttgcggtaacggtcgcaggcccagctttcaccctcgaaatggccttcttccaccgagaggaagttcagtgtgccgctctggcgggattgcagcagcggataaggattttcttccgtcgggtcgggccggtagcggaaatccaccatcacgccgcagccggacagatagaactcgttttcctcggtctggatcaacagcgcccggccgcgagtggtcatcacgtccgcgttttccgggttgcgggtgttgatgcggctgcccagccggtagcccacgggattggcactgatgaacctggcttcgatatgccagcgttccagcttgagatactgcttcgccatgaactcctgctgcaccagcgcgtgaacgcgtcccgtgccgcggtagcggatcagcagcggagccacgccccgaacggccttcatgctcagcgctacctcccgggcggtgggcatcagccgtccttcctcatccagcgcggaggaaccgccgaaacatgcaaagccgatacagccaaaatctgcaaaggcctccatcatgttcatggcggtagcttcgccgccggtgcaggtctccgggatcatcaggggattatccgggcgtgcgtaacgggccagcacccggcggtatttctcccgttcctccacatacatatccgggcagagcaggtcgatcgaagttgcgacttttttgtagatatccagcacccggccgacggccgcgccgctgttataacaggcgcccggctcctcgaagccgttttcgcccaacatcacattcgtatagataggtaaatcatactgctttttgcccgctttggcaacctggttcataaattccgcatgagcccatgccataaaagcttcgtgagcatgacggccaaagcggccccgccagctgctgccggagggctccacgcccatgtcttccagctccacgccgtaaaggcactggggcacgcctttttcgtagacttcatgggcttcggggctatagtccatatcggtattggccagccccatttcattttccacctgcacagccagcacggtacgctgctgcccgtccgcttccttcaaatgagccatcagggcggcgaaggcgcggctgtccgcttccagcgtggcggggcagagcgggctcaaagaagccacatgcccgccgtccggcccctgagccagacgatacgtttcgggatgcagcttgacccattcgggcacataattgggatgaccgtttttgctggtgccgaaccacagcaggatcagatacaaatcgttttcccggcaaagggacagcaggtcgtccatgtcggaaaaatcgtactgaccgggttcccgttccagcttataccagtagatgggcgcttccagcaggtttccgccgtaggccttgaccgcagccagctcccgcgccatcatctccgggtcgcccaccgaggaattatgggtctgggtacccagcagcagcaagggctccccctttgcatttgtcaaaaacgtcatctgtcaaccctccccgctggtcttcgtgcaaaaatccattgaatcttctggcctttttaaggccatttcttcttgctttcccatggttctggggcattgcgggcaaagcttcgaccgcctgcggaaaaatattttcccgcaaacgtttaagtttcgttgcccgacttactcatttatagtataatggccccggaggaaaaatacagtcagttttcgacatttaatatggagaaatcggcatgtggattcatcaggaagaaaccaaacggatcagttacatcgaccagttggagattcaaatttccgacggcgggtacgacgaagtgggcccggaatggtacgggacccgcgaatgttcccctttcagccggctctattacatcaacggcggcaaggcctgggcacaaagcggcgatgaaacgctggaatttaccgaggggcacatggcgctgatcccgctatggcacccctatccccacggctgcgtggagtcctttcaacatttatattttcatttcaatctgaccaaagcgggcggattggatcttttcagttctctcaaacagattctcattctgcccatggacaagcaggcgatcgcccacatgatccagctttacaacagccgcaacccggcggacgcccttaccttgaccagctttctgctccgggacatcaacacctttatttcgctgggcgtttccaccggggccatgacctatgcctacagcgaaaccacggagaaggtcgtgcggctgattcaggagcggctttccgcccagctgacggtgaaccagctggccaaggagctgagcctctcccccagcacgctgaccaagaagttccgtgccgaagtcggttcgcccctgggcacctacattgacaccatgcttttccgcaaatgtatgcacctgcttctttccaccgatcttcccatcggcaaaatcgccgaagaactggaattctgcgatcaattctacttcagccgtttcttcaagcagcactacggcgagacccccaccacctaccgcaagcgtctccggcagggctaaagccctgcacccacttctgcgcggcggagccgcgcagggtgctagtgtgacatgcgggttggccggggttttaccgccgtggcacaacgggtgccacggctcgcgggtttggtgcgatttcctgcttgttgacgtgtacagaccgccattcggcggcatgcctcatagctcgggggccaagccccttttggactgcgcggcggagccgcgcaggggcgtagagggacatgcaacttgtccggggttttaccgccgctcggcaacgggcctcgcggctcgccggtctggtgtggattccttgtcagttgaatagaaaagaccgccattcggcgacaggccctccagctcgcaaaaaaggccagcgtggatttgaacccacgctggccttttgcgttacaaaaatatccaagttgcggtgaggtattattccaagcggcactatttgcgtatggctagcgccaaaagtcaagtctgttttcctgcgctgcgaagccgtccaagcaacatagacacatcccaagcaccgccatttgagtatgctccacgccacctgcgggggagcagagcggcgataggcagcgaagggaaaaaggcccgcccattttgacggcggaaaaaggcgagcacgagcgcgctccaagagtatgtgaaatctatctaagtccattgcgcgcgacattgcgagccccgccgtcaaaatgggcaatcaagggctttttcccggaagggtgagcgaagcgaaccaaggtcgaggacagcccc

SEQ ID NO: 271 - DNA, 6909 bp, Unknown
  16S sequences of unknown bacteria
ggcgggagagcttgctctcccgtccaccagcgtgtcaaaaagacttttttgacacgctgcggcagcggtttcttccgccgcctggcaaacgagccgccccgcgccggtgggatagatttcgcgcacgcgcccctgccaatcggtgagcacgcggcccgcgccctgcgcgacggctgccaggcggccgtccacccacaggctcgaagcgccgttttggtgttccaagcggtagcgatggccgccgatgcgggtttcgaagctgtgcgcggcgctttgcggcacggaagccgtgccccagaggatgccgttttccgcgtatttcacgccgtggcggcgcgcgatgaaatccgtgagcaccagcatgctgggcgaatagcgctcggtggtgttgaacgcgccgttaaagggattcatctgctggcggaacgcgtcgcacgccatcagcgcttccagccagcggcgcatgatttcctccagcacatcgaaccgctggtaaaattccagccacagcggcgcgcgcagcgcttcgagcgcttggctggccccgccccaggagttttccacgctgccggggttgaagcccggctcgtctgccgcgatggaggcgagaggataaggcgtccagaattcggcggggttcagcacgtgggcggaaagaatttgcgcgaacagagcttcgtccggcacgcggcacatcagcacgcgcaagcccgcgtcccctttgacgcgcacgaagcgcccctgcgcgtccacatcgtaaaaaaagcccgtgtccgcgtcgaaggtcaggcgcaaaatttgctggcgcagcgcctcggcgcgctccagccacatggcttcctccccggcgcggccgagcaggcgagccatttgcgccagagccacgcgccctaagtattttgtggccgaaagatccggcgcgaggagcggcagccccggcagggaatcgcgctggcgggcgtcgtatcccggacagtgctgcttgagccccgcgtggcgcgggctgttgtcgtgcccggaatcccattcgcagtgcagttccaccaggcccgtgccgcggctatcgcggtattggcccagccaggcgtcgtagcgcgcgcaggcctcgtatccgcgcgcgagcagcgattcctgccccagcttttgcgcgcattccagcgccgtttgcgccagcggcaccacggtttgcaattggccgtcgcccggcgtttcgcggatgaagggcgggataaatccgtcttcccgcgcgagatcccaaaagatttcgtggttgttgcgggcgatttggggatcgtattcgccatacagcgcgccctcatgcgggccgcattccagccagatgccctggtacatgccgccctcctgcagtacggggcggggatagcaggggagcaggcgcacgttggccgccaggccttccagcgcctgttcatagcgccgctgccagcgcgggttttcgcagtgaaaagcggtgttcaaagcggggtttgcgggggattgcatgccggttcctcctttgcgttccaatatttttcccggtaagcgttgggcgagaggccgcagtagttgcgaaagctgctgatgaaatagcgggcggaatggtagcccacctcggcggcgatttgctgaatctgccggttgctggaaaccagcagttcctgcgcccgggccatgcgcgtgcgcagaacggtatccatcacgcccgcgccgcgcagccgcttatacaggctggacacataggcgggcgaaagatatacctgcgcggcaacgtcgctcagcgcaatgtcgcgggaataattttcggcgatgtagcggtcgatggtctgcacgatctgcgtttgttggcggctgctggcgcgcgtttgctcggtgcgcactttgctgcacagctgctgcaaaaggcgcgccgcctcgtttgcggactgggcgcgcggcagcgattccagcgcctcgctccaggccagcatctgcgcgctgtccacggcgcgcgccgcgtccacgcactgggccagcaacagcccggcttcccgcgcgggcatggccgcgtagatttcttccagcaagggccggggactttccccggcgcgcagttgccgccggagcgcctgtcgaaacgcttcgcggcgcaagaggggcgcgtccttgccctcgggctggtagatgataaacacgtttttttcgcccgccgcgcccgagagagcgccgctcatgcgctggaataccgcgcccgcctcgcgccaactcaccgtccgcgcgcccagggcaatgcccgtatcgccgccgcaaatgcgcgaaaacgcctcgtgccacagttccatctgcgattgcaacgccaattcccgccctggcccctgcaaaaagcaggccagctcgttttggccaaagggcacggcctcgcacaggcacgcgccatccgcctggcggcggatatagccgctcaccgcagccagccggtaaccctgacgcgcgggcgcgtacagccgcaccagcaggggcagcacggcttccccagcgcgcaggtcgatgcccagttcagcgaacccccgcgccatttcctcctcttctgccatttccccgcgcaagatcgcgctgagcagcatgaccttttgcaggttgccctcccgcgcgttttgcgcctcgcgcagtagggattcgttatagagcgcctcgtccagttccgcggcggtttgctccaaaatttgcgcgagccgctcgaaaccttcggatttgaggaggtagcgggcgggcggatcctgaatggcctgataggcgtattcgaaattggcgtgcgcggtgagaaaaatcgcgcggcattgcggccaaagcgcctgcacgcgctggcgcaccgcgagcccgtccaggcccagcatttcgatatcggtcaccagaatgtctacgcgcatgcggcccgcgatttccagcgcgcccgcgcccgaataggccttgagaatctcgaaccgctccggcgcgcgccgcgcgaggtattccgccagcccgtcggtgatcagcgcttcatcgtccaccagcagcacctggtacatccctgtttcctcctgatatttttgtcttcaaagcgaacagttttgcgattggtgaggtttcaacctttctgaggccctcagaactggccggaggatttatccccattctgtgcccgggggatgacgaccgtggcgcacaggccgcccagcgcgctgcgctccaggcgcaaaaggccggattgcccataatgcaatttcagccgcagggcgatgttcatcaatcccgtgccgggcaggccgtcctcgcgctccgtctcgatgatttcgcgcagcacgcgcagcttttcctcatcgaattgcgtgccattgtcctccacgcggaagtacacggcgtccctttgcgattcgcaccgcaggcggatcaggcccgcgccctgagcgggcacgccatatttataggcgttttccaccagattttgcaggatgaagcggggcatgcctacctccgcgcagtcctcgggcaacggctccacctgcgcttgaatgcgctcgccaaagcggacggactggatatcgatatacagctgcgtgtattcgtattcctcgcgcgcggccacgatttcccggtgggtgcgcgtggcgtaaagataaaacttcgacagcttttccgtcatatcctctatgccctcataatcctgcaactgcgccatggcgcggatattcagcaggctgttgtgcagaaaatgcgggttcaccttggcatgcaactgtttgagttccatctgctgcaccaggatcttctggcggtagttttcgtcgatcagcttgcggatgcgccccagcatggtggaaaatccatcggaaagcagctggaattcgctggtgcgcatgggcggaacatcaaacgtgagtttgccatcgcgcacctgttcgcagccctgcgccagctcgtgcaccggccggttgacctggcggtaaaacacccagatgaggcaggccaccagcacgatggaacccaggccgatcagttcgaaggtcagccggtaggcgtccgtttccgcgcccagcgcctcctccggcagcagcatcaccaattgcagctggccatagaaaagcgggtcgcagcgcaggatatagtttttgccattcagcgccacgcgctgcgcctgcccggcggcgtccgcaaggccggaaggcgcgggcccggcatcctcgttataggaaaagaacgtgcgcccatcccccgtgcccagatacagctgcacgccgttgctgcccagcgtgggcggcaacagcgcggctagctgctcaaaccgcagctgcgtaacgatataatattgttcctcgcccttgagcaggggattgcacgaaacgatgcagaagtgcccatccaacacgggataaaagatggacacgttgttttgccgcgcggagagctggccgcattcctccatcagcggcaacagatccaaatcgctggtgagcgttttccccatggaggggatgtgcaggcggatctgcgtgatccaatagttgttgcgggcgatctggttcagctggtccagcatatcagaaatgttgcggtagtgccaatagtcgctcagcacgccgtccatattgatcatataagtgatgtcgctgtccaacgtcaactccagctgcgaggtgcagatattggtcaactcccggtcgatcgtttccagcaggtagttctgttccgcgtccaccatgcgcagcccgcgccgccaggcgaggttgctgccctggtggtaaacggccaggcagcccagcagaatgggcacgaccgtgagaagaaacacggcgaacatccgccgcatcagagaatgccggaatccggccgcgtgccttctcatagcatgcctccttatcctttcacgctgcccagcgtgagcccagtgacgaaatagcgctgcaaaaacggatacaccagcagaaccggcagcgtggaaagcacgatctgcgcgctgttgaacgtgcggttgttcaccttggccagttcttccagttccttgagggagaggttctgcgtgttcttggattgcgtgagcagcacctgcaaatagctctgcaggggatactgctcggtgcggttcaaatagatctgcgcagagaaccactcgttccagtggcccaccacgaagaacagcgtgagcgtggcaatggccggcagcgagcagggaacatacagcccccacaggatgcgccagtgccccgcgccatcgatcagcgccgcttcctccagctccgaggggatggttttgaagaaattcagcaaaagaatcatattataggccgaaaccgcgcccggcaaaatcagcgcccagaaactgcccagcaggcccagcgcgcggatggtgagataggtggggatcaggccgccgcccaccagcatggtggtgacgaaaaaccacacgtatccctgccggaacgccagcttgttcccgttcttggagagcggataggcggccgtgatcgccaggaacaggttgatgggcacgcccgccagcaggcgcagcagcgaattgccaaacgtgcgcagaaagagccggtccttgagaatggtggtgtaggcgaccgtggtgaagcccaccggcagcaggctcacctcgccggcggccacggcctcctgcctggaaaaggaaaccgccagcacgttgatcaggggcagcaggcaggtgatgataatcagcaccatcaaaagcgcattaaacaccgcgaagatctgctggccccgcgttctttttcccatattttcgcccccttagatgatccgatagcccgtggtaatgtccgccagcttataggaaaggatgatgagcaccgtggaaatcgccgatttgaacaggcccacggctgccgacggcgaaaactggaaatcctccaggcccaggcggtagatgaacgtatcgatgatgtcgccggtggaatacaccgagatggaatacatgttgtaaacctggtcgaaccccgcgttgagcacgttgcccagcgcaagcatggagagcagcacaatggtgggcgccaggcagggcagcgtaatgtacaccgtctgcttccagcgggtggcgccatccaccacggcggcctcgtaataggtggggtcgatgcccgtgagcgtggccagatagatcaccgcgccaaagcccatctctttccagatttccgtccagatcatcgtataggggaaaatggcggcgtcgcccaggaaaaacaccggctccatcccaaagaggccgagaatgcggttgacgatgcccgtggagggcgagagcacatccgtcaggatgccgcccaggatgacccaggaaagaaagtgcggcagataggccacggtctggatggtgcgcttgaaaaccgcggaacggatctcgttgagcagcagggcgaaagtcaccggcactaggatgttcagcaccaccttgccgcaggcgatgagcaacgtgttgcggagcacccgggggaacgtgggcagcgaaaagatataggtgaaattccccagtcccacccagtccgagcgcagaatgccccgcaccggcgaataatcctggaacgcgatcacaatgccgcccagcgggatgtaatggaacaggaacagcagcacgatcgatggcaacagcatcaggtgcagcgcgcgttcccggcaaagtcttttgagcataaacaattcctccccaatatggcggccagggccagcggcgctggtgaacgcctttggcgcgcggggcaaaagcgccccgcgcgccacagcttgtcaaaaaagtctttttgacaagctggtggccgggggagcaagctatccacaattcgcaatggtcaccctgctgcgcctagcggcttgcagtgttcccttgctcattgggcttacttcgcgctgcttcgcgcacagcgcgcgcgcttcgtgcgcccc

SEQ ID NO: 272 - DNA, 5496 bp, Unknown
  16S sequences of unknown bacteria
tcagctctgccttggagacgatctcccacagctcctgtgctgctttggtcatcgctttgttcgctgccttcagctcatctgcggtcgcatccggatcatcgacaagtttctgcgctgcctctacagctgcttccagtgcgtccaccttgcccggacggagtccttctgcgttattcaggatgttctcgttgatgaagtcgatcgttgcctgaacatctgctctcagggcatccgtgctttcatccgtattcagcgcctgcatcgcttcgctcaggtcgagcagtgcagtgacaacttcggttgcggtcggcgtttccttggtcagtacggcctgtgcagcttcgatcgctgcgttcagcgtttcatcatcagatcccaatgcgacggccttctcgaccatgctgcgcagggcctgtacagctgcttcgctggctgccggtacatcgctgatctcttccagcgcgccgatggctgcgttcagcgcctgagcagcgctgtctactgcttcctgggtcgcttcttcatctgctgcgactgtgtgggccgctttcagtgcttcctgcatcgcggtccagcttgcttcggtgtaatcctctgcattcagggcttctgcggcggagatggccgcattcagctgagtcttgtctgccggttctggttcaggctcgctgacgaatgtcatttcgaacttatccagctgcggcgacttgccagccggtccggtgaagacgagcacgccgtctccggcttcagtaaccaccaggtcaaattctgccgtatgggtcgcggtggcgctgtcattggcgcctgcagacactgttccgctttcgatctttccgctttcctcgctccatgccagcgcattggtattggagccgctgcggtaagtcacgacgacatgatatgttcccgcatcttcagcgcggtaatgatacttgatgacgtctccctggttgagggcatccacgaacttgccgttgcttgcccactcagcttcagtgaccttgcaaggccatccgttgtcattgctcgtatcattgatgatctctgagacatattccgcttccagcgtcactgcgtctgttcctgtcgggaacaagaacgggttggatccggtgtagtggctgaatacaaatctcgcttcgatcgtcgcatccgcgttcacattctcaaatgtatatgaagagactgcgcctaccgattcgccgttgaccagcacatcggcaatttcatagccttcgtctgcggtgatcgtatacgtcttgctctgtccttcttccacagagaccgcaccttcatcgctgatggttccgcctgcgcctgccgttgcggtgatcgtatattctgtgatatcgatctcgcttgggacgatctccagacggtcaagctgcggcgatctgccatccggtccggtgaacacgagcacgccgtctccggcttcagtgaccaccaggtcaaattctgccgtatgggtcgctgccgtgctgcttgcgcctgcggataccgttccgctttcgatctttccgctctcttcgctccatgccagcgcattggtattggagccgctgcgatagtatgccgtcacatgatatgtaccggtcttttctgccgtgtagcaatacttggccacatcattggtattcagggaattcaggaactttccgttgcttgcccaggctgcctctgtcacctgcagcggccagccattgtcattgctttcatcattgatcagctcagaagcaaattcagcttcaagggtggcagaagatccgcttctccacggaagctggaaacgatcatcttccgtatactgctcacgagcgaccagtgcctccatggcgctgcgcagtccgctgatggcctgagtgacctctgatgtatccggtgcctgcgcgccggctacttcctctgcataagccatggcctgggtgaagtcctcccaaccagagacataccagtcgcgcttctgttcgcgggcagtctccagcagttcattcagcgtctccagagagctggtctctgtatctttgatcgtgatgttcgcacggtcattgaatccgaggatcaagccgtcgcttggatcggccagttcgatcgagaactgtctgtctcccgtcacgttggtattgcggcgggtggtcacctgcgcggtaaactccgtctggccttcttccatgacgatctccgtgatctgctcagtatcgaagtcatcctggatggccgttcccgggttcggctgcagcagggcagtgatggtgccggtgctgccgcctacgcggacgatcttcacatccagcgtagattcttcattcatcgtgtagctgtcctgttccagaccgatcatgccctgtccgccgttgttgatgacatatgcagcttccaggccgatggcgccggtgctgcccacggtcagggtcaatgtatgatcgccgtcctctagatcatcggaggcaaagatcatctgtccggtcgcacgtgaggtcgccttggtatcgatggtgatcggatcattgtcatcgatctggatggtggcctgtccatggttaggatccttcgtgcccatcagatagatcttggagccgtggaacgtcacggtcagcgacgcgccgccattcgcatagcggttggtgccgttgatataattcgttccgctctcagctatccatgtgccattggtgaacgtgaatcctgcgccgtctgatacatcggtatcctcgatgtcgatgacatccatgccggccggcgcagtgcctgccagttcaaagtcatcgctcgccttatatacgccgatctcgctgatcatcggtacggcatcagccttgttggtgtctaccgtgatgcgcagctgatctgctctcaccgaagcagtgcggatcagacgcttagcgccgatcgtctcgccttcatccagtacggtccactcatcgttgtccccattgcggtattccactttgtattcattgatgctctgtccaagctggatggcttcctcgatggatacgacatcaaaggtcttcgtctcgcccagatcgacgatcagcgtgccggatgaagtgccgtcatccgtcgtccagtatgtatcgtcgctgccatccaggacatttgccgggctgaatgccgtgtcattgcctctgaccgacgtcgcgaccacaacggcttgtgccgccaggttgtccgcaaaggtctcgctgatgttcgcgccgaattctgccagtctgtccaggatctcctgatccacggtgccatcggtgttcggcggtacgttcagcagcagcggcgcattgtgaccgatagagttgaagtacatgttgcccagatcagtaatggtcttcggcgtgctcttgtttggtccccagaaccatccggaggtgattctcgcatctgcttccggaacggtccacttattgccgtcttcatatcccagagaatagctgccctgcatgttgtcatcgcaagtatctgcttcgacattgacattggacttggaccaggtgttcttggccgcatagccattctcatttccgatccagcgcaccgtcgtgttggcgccgcactggaagatcatgcattcgctgtcatagccggcttccaggccctcctgtgcctggatggtgtcataccagcgctggaagtcatattcctgggcatcggatccgctgccctttgcgccatccatccagatttcggtgaagtggccgtcattgccatatttgtcatcgcccaggatctcattgagctggttgacatagtaatcgttgtaatccaggacatcatttgccgcattggtcggattgccatcggcatcataatatccatagctttctgcattgatgtcccatggagacagatacaggcccatgtccatatcatatctcgtgcaggcctcactgatctccgccaggatatctccctgtccgtccttgtagctggtggcagcgatgtcatattccgtataatcgctggcccagatacagaagccgtcatgatgctttgccgtcacgatgatcttcttgaatccggcatcgtggaatgccttgaccaacgtttctgcgtcgaaatccttttccagcgtgaagatctcatccggtgtccggtctccgtaattctctccccattcaatattgttgaaggtgttcggtccgaagtggacaaaaccagctagctcttccttctgataacgatactgctccggtgtcggcgtcacgccccaggcttgcggcacggccgtgccattgtcagacagatcgctgtcatagacaagatcttcggctgccgaaacggaagtgactgccggaacacctgtgaaaacgctcatcgccatgatggcagaaagcgcaatcttgttcagtttcattgtgttcttctccctttctttttacctgactcacgatcgtgagcagacgcaacggtacagacaatgatcaaagttcccgcgatcattccgttcagcgttgtttctgaaaacgatttaactttttgcgaccctccttttcataaatgtaaaccctttcaatataaatataacgcaaaccaggatcgtatcatttgcactttttattgaacatgttgcactttttagcatttcgtttctgtataaaattaacctctttgcacaaaaaaaatcacagtttcttcataaaaaaggatgataaatcacatattctacaccaagaacacaaaatgaggccgatgtctctgcacaacggacagaaacaacggcctcatcatcctgtatccttttctttaacctccgcttgagcacttctccgcgtcgatggcgaggacgagcatcagcacatataacgcgtcatccggatcattcacttcgatcacataggtgtctgacaagtgcagcagctctttgtatatggaagcgacctgattgccggagaagtccagcacctgataatcccactgcatgaagctgcccttgacctgccagttcttgcagtcgacataatagcttggacgaaaccaggaaaaatctctcgatatgcatccgatatattcgatcccggcgtacatctcaaacttcggcagcagcctgaacagtttttcttcgaccctgcctacttcctggtcggacgtatcgaagatcttcaggcagtgtccccaggacagctgtccctccaccctgtacagcgtatgtccatcctcatcatagatatcataacaatcaaaccagctgaacaagcgctgtttgaagtacattttcatgttccatccctcctgtctctctatgagcaagaaaacggcatgaccagttcagatcatgccgcattccagtcgccatcaaagcttgacaaattgttctacgtcaacgacaaagatcgttgcgcccccgacctgtacttccatcgggaaagaagcatatctgccgatatcataggacgccgtgcttgggactacctctgtgcggcggcggctgtattctccgattacttcgatcgcgcgttcgacccggtcatcctctgtaccgatgatcagcgtcgtgtt

SEQ ID NO: 273 - DNA, 1537 bp, Unknown
  16S sequences of unknown bacteria
aagcaggaggacatccatgccaatggctatgcgctggaatgccgcatcaacgccgagaacatccatcgtgactttgcgccttccccgggcaagatcacgttcatgaatctgccctgcggacgcggggtgcgtgtggagaccgcggtatataatgggtataccattcctccttattatgattccatgatcgccaagatcatcacgtttgccccgacgcgtctggagtgcatcaagaagatgcgcatcgcgctggaggagctgatcattgacggtgtggagaccaatatcgaatttcattatctggtgctgcatcagcgccagttcatcgaagggacttatgataccggatatgcccaggagtttatcgaggagctgaaagaaaatggagaatttatttaagaaacggcaggatcgcctgcacgtctttgagaaattccgcaacccgcagagcaagccgcaggaaccaaaggagatccctgattatgtgttcaagaactgtgagcgctgcggagagaacatcccttatatggaactgcagaaatcgctgtatgtctgcccgcggtgcggctgtcacatgaagatcagcgcccgtgagcgcatccgtcagctgctggacgagggatcgttccgggaacgggatgcgctggtggaaagccaaaacgaagatcagttcgtcggttatgaagagaagctggataaggcaaagacggcgacgggcatgcatgaggccgtcatctgcggttcggggacgatcatgggctatggcatcgccatcgcggtgatggattcccgcttcatgatgggcagcatgggccatgtggtcggagataagatcgcgcggctcatcgaatatgcggatcgcaggcatctgccgctgctcatcagctgcaccagcggcggcgcgcgcatgcaggagggcatcgtatcgctgatgcagatggccaagacgagcgcggcgttgaagcgctttggcgagcatggcggattttatatcagcctgctcacgcacccgacgacgggcggggtcagcgccagctttgcgatgctgggcgatgtgatcctggctgagccggatgcgctggtcggattcgccggccgccgcgtcatcgagaagaccgtcaacgaggtgctccctcctgagttccagcatgcggaattcatgatggagaagggctttgtcgaccggatcgtcgagcgcaaggacatgcgcaggacggtggcagacctgatcatgctgcatggagggaaacgcgtatgagtctgatggaaaaagagcagcagctttcacagctgcaggaacagctggaacagcaccaggatgatgcggcgcgccgcatgcagctggcgcatgagatcaaggagctgcaggaagagatgtatcaggatctgagtgcctgggacagggtctatctggcccgtcatccgcgccggccaaaggcgcaggattatctgaagcggctgtttcatacattttatgaactgcatggcgatcgctgttatggcgatgaccgcgccatcatcggcgggatcgccatgt

SEQ ID NO: 274 - DNA, 14685 bp, Unknown
  16S sequences of unknown bacteria
aaagtttagcgcttgctgaactgcggagcgcgacgggcagccttgaggccgtacttcttacgttccttagcacgcggatcacgggttacgtatccagctgccttcagcgcaggacgatagtcagcgcttgcggccatcagtgcacgagtgatgccatgacgcatcgcgccggcctggccagtgtatcctccgcccttgacattgatcttgatatcgaactgattcagggtctctgtcagttccagcggggaacgtacgaccatgcgcagcgtttccagcggcaggtagtcttccagcgtctttccgtttactgtgatgtttcctgttcccggagtcatgaagacacgtgcaacagaagtcttacggcgacctgtaccattgtaagttactgtatttttcttagttgccatctcttattcctcctatcctttgattacgagctcaacaggcttctgagctgcatgcgggtgttctgcacccttgtaaacaaacaggtgcttgcgctgtacatcacctaacttcgtgtgcggaagcatacctttgatggcgcgctctacccattcaaccgtatatttttccttcatgacacgagcactgcgcacacgcaggccgcctgcataaccggaatggttgtagtatttttcggtatcgagcttgtttcctgtcatcacgatctgatctgcattgaccacgatcacgtagtcaccgcagtcaacgttcggtgtaaacgtaggtttgtgttttcctcttaacacagtcgctacctcagtagcaagacgtcctaaagtctttcctgcaccgtctaccacataccatgtacgagtcacttcagcaggttttgtcattgtagtctgacgcattgttcatttcctccttgtgtttgagattgtaccgggtctcaataaaagagagttatgccgtttacggcaaatattattttatctttcaacgtgtcaaaagtcaagaatttatcgacatatccgcaatttttacgtcccttcctggacgctttttttctcctgatcctctgggcattgccgatcgctcttgtgcatcagatccgcgatcgtgattccgtccagatatgcgttgatcagatgcgaaagctcattccacatcgcgatcgtcctgcattcgccgcgccgctcgcacggcgtcgcatcacagctcaagcagtgcaccggcgccatgcttcccccttcggtcagccgcaggatctcccccactttatactcctgcggactgcggcaaagccgatagcctccgcccttgccttgtacgccttccacgatgccatgcttcttcaggaccggaatgatccgctccagatatttcagcgatatgccctgccgctgagcgatcatcttcatcggcacataaccgcttccgccggtttccgcaagatcgatcatgacacgcagcgcatatcttcccctggtcgaaatcaacatcctccattccccctctttgtttcattatacaatgaaagatcgacgggaatcaaatgaccagagccgcatgatctcatctgcgctcagttctatccttcacagcggcgaacgcctgctccaggtcatccaggatatcctggatgtgctctgtccctacagacagccggatcgtattgggcaggatcccctgctcacgctgttcatcttcacgcagctgcgcatgggtggtcgaagccggatggatcaccaggctcttcacatcggccacattggccagcaacgaaaacagcttcagatgatcgatgaagcaatgcgcttcttccatgccgccgcggatatcgaaggtgaagatggatgcgccgccatgcggaaagtaacgctgatagagcgcatgatccggatgcgcaggcagagaagggtggctgacgctttccaccatcggatgcgatgccagatacttgacaaccgaagcggtattttctgcgtgccgctgaaggcgcaaggaaagcgtctcggttccctgcagaagcaagaatgccgcaaaaggagaaatgcacgctccgccatcacgcaacagcaccgcccggatataggtcgtcagcgccgcatcctttgcggcctggacaaaagagacaccatgatagctgtcattgggtgtacagagaaatgggaacctgcctgatcctgcccagtcaaactgtccggattcgatgatcacgccgcccagtgcagtgccgtgaccgccgatgaatttcgtagccgaatagacgacgatatccgcgccatgcgtaaaggggcgaagcaagtatggcgtggcaaaggtgttgtccacgaccagcggaatgccatgacggtgagcgatttctgccagcctgtccagatctgggatatcgctgccggggttgcccaatgtttccgcatagagaaggcgcgtatgcggctgaatggcagcctctgtctctgccagatcgtggatgttcacgaatgtcgtctcgatgcccagcgcaggcagcgtatgcgccatcaggttatagcttccgccatagatggtcttctgcgccacgatatgcccatgcccttgtgccagcgcctgcaatacataagtaacggcagctgcgccggatgccagggccagcgcggatgatccgccctcaagtgcggccatgcgccgttcaaaggcttcctgcgtcggattgtcaagccggccatagatatttccgccctctttcagcgcgaagcggtctgcggcctgcgcgcagtcatcaaagacataagatgtcgtcgcatagatcgggacggctctggcgccgctgagcggatccggatgctcctgaccggcatggagctgcagcgtttcaaatcgatagttctgttcgttcatcgtcattcctccagtgctttcttttatacctaccaaaaagattggttttatgatagcaccgcagccatctcccgtcaatcaaaaaaaagccggacatcctcgggcaaagatggcccggatgtccagcctgatatgttatcgtcctgccggcaggcgctgttcccgcgctttgcggatggctctgaagtcgacacgcggcaagctgtcacacacttggatgcccagcttccgcagtctgtccagcccttcctctcgcagcgtatcatccatcagcgcccggggatcatgcgcatctgtgccgatgatggccgtattccccatctgtgcggcgatctcccaaaatgcgtgatgcggataggcttccacatgcatggcccggttataggcagcgccagccaggttgtactccagcgggatgccgttgtccagcgcgcaggcacataaagtacggaaggcttcttttacttccgcattcacctcatggatgccgcgcatgaacagctccggatgacagaaacaagaatacatgcccgtctccatggcagccacggcatcttccacatacaggcgaagctcctgaagcgtgcggatcccgccgaaatagatccgggtgcctgcatcccggttttcatctgtccggtaataatggtggccgagcatgaggtaatcaatgtcatggtcgatgacaaaatcaagcagccagtccatataggccggaaagtattcgcattccaggccggtcaggatctcgatctggtcatggtatcgcgccttcaggccgcgtatggaggagagatagtcctctgcctgagaaagcggcatgcgcatgtgcgccgtaaaggatgacgcgtatttccacggggtgtggtcagagaagcccagcacttcataaccgttggcgattgcggcgcgaacataatcctcatcgcttccgcaggcatgcatgcaccgggcagtgtgggtatgataattggtctttctcatcgtgatgcctcctcatccggatagcggacctccaccaggtaaaggccgcatccaggcgccttatagcggcacgcttccttgtcctgcgccgccagcatatgttctacttcacgcacgctcagacggcctctgccggcctcgatgagcgtcccgacgatcatgcgcaccatataccgcaggaagctgtttccttcaaggcggaaatgcaggccgtctgccgtctcctccaccgcgcacatcgtcacggtgcggacacgggatttccgcggatcgagccggctggaagtgaagctggtgaaatcgtgcgtgccgatgaatacttgcgcgcacgccctcatccgctctgcatcgagctttccccggtaaaaggcgcggtatcgctgcaggaaggggttgtcgacgtcatagctcagataataatcgtaacgcttgctgacggcgtcgaaacgggcatgaaacccatcatgcacgcttactatgtcctgcatgcggatatcgggcggaagcagggcattcatggccctgagccactgttcccggctcatccccagctcgctatcaaagtggaagacctgcgcgatggcatgcacgccggcatcggtccttccgcttgctgttatttccaccgggtgatggtggatgcgctctaggacctgcatgatgacgctttcgatgccaagggcattgtcctggcgctgccagccggcataaccgctgccgtcatagctgaccgtcgctttcaggcgcatcccagggctcccatcgcgatcagcacgcccagcagcaggaagctgccggcaagcagggcgatgtcgatgccatgcagcttgaggctcttgtaacgcgtcctgttccggcctggcacatatcccctcgcctccatcgcgttggccagctgctcggcccgatcaaacgcagagacgaacagcggcacgatgagcgaaagcaccgcaccgatcttctccttcagcgatccgctgctcatatcgacgccgcgggatgcctgtgccttcatgatgcgctgtgtctcttcgatcagcgtagggatgaagcgcagtgcgatggagatcatcatcgcgatctcatgcgccgggacaccgatgcggcgaaacggcttgagcagatcttcgatgcccagcgtcagatccagcggcttggtcgtcgccgttaggatggtggttatgacgaccatcaacgccagacgcacgacgatatataatgtctgcgaaactgccccgctgtagatgtggaagctgccgatcgaaagcagcacatagccgtcatgaatgacgagcaggttgatgacgagcaggaaaacgagcatgaatagcatcggtttcatcgcgcgccagacaaaggacagctgcagcttagccatgagcgcgatgctgcagacgatcacgccgagcacgagatatccgctgtatccggccggaatgaagatggcgatcatggtgatgagcatggcgcagatcttcgcgcgcggatccatgcggtgaatgacggaattcagcggcagatagcgccccagagcgatgttattcatgatgcttcacctcacttgcggctgcttcagccagatcagacaaggagagcagatcgctcgaaagatgaaacccacgggcattcagcgcctcgcgcaggcggatgaccgccggcggagtgatgcgcagctcatccaagatggccgtatcccggaagaacgccctgacctcctggtcgcagcagatcgttccattccgcaccacgatgacatgatcgcagtatttcagcacatgctccatatcatgtgtgacaagcaggaccgtcttatggaattcctggttcatgcggacgaacagctccatcatctcttttgcaccctgcggatccagtccggccgtcggctcatcaagcacgagcacgccaggatccatcgccaggatgccggcaatggcgacgcggcgtttctgtccgccggacaattcaaacggtgagcggctgagatattcctcacccaagccgaccagcggaagcacctttcttaccttcttgccggcttcttcttcatcgacaccaaagttcttcggtccgaatgcaatatctttttcaattgtctcttcaaacagctgatattcaggaaactgaaagaccagacctacattttttctaagctccttcaggttcttcggcttctgcgcagcgcggatcaccttgccgcatacctccagctctccctgcgtcggcagaagaagcgcattgagatgctggaccagcgtcgtttttccgcttccggtctccccgatgatggccgtgatcctgccctctggaatgttcaggtcaatatccttcagcgctgcataggcaaaaggcgtcccctcattataggtatggctcagttttcgaaacgcaatcggcacagttcatccaccaccttttccatctggatctcccgcttcaggacgatcccctgctttttcatctcattgacaaacttcagcgagaacgggatatccagctgcatcttgatcagctcttcttcgttgttcagcacttctgccggtgtgccgtccatgacgacctttccttccttcatgacgatgacatggtcgctgctgaccatctcttcgatatcatgggtgatcgagatgatcgtgatcccggtctcttcatggatccgcttgaccagcgcattgatctctgctttgccctgcggatcgagcatgctcgtcgattcatcgaagatgaggatctgcggcctcatcgccagcacgccggcgatggcgacacgctgtttctgtccgccggacagcttggtcggctcactgttcagatatttgctcatgttgacgcgggcggcaaactcatcgatgatcgcctgcatctgatcatgcggcacctgatggttctccagtccgaaggcgatatcatccgccaccgtcgcgccgatgaactgattgtccggattctggaatacgataccgatcttatcccggatatcgtacacgctctcttccttcagcactgtgccgtctacacggatgatgccgctctgtgcctccatgagtccgatcatcagttttgcgatcgttgattttcctgatccgttatgtcccacgatgaccgtatagctgccttcctctatggaaaagctgacatcgtcaagcgccttgatctgctcatcgtaggaaaaagaaagatgttctatctcgattttcttcaatgcgatcacctcaatgatttaactgttccattatacaccaccgagttgtgttacacaaacaataaaaacgacatctgtatagacagatgtcagtttcatcatcagtataccggatcgcagtgccatccttcatatgtgccgtgattgttctttgtctcttcgaacagataagtgacatgctgcatcatcagatccttgtccatcggggcgatgtgcatgcatacggctgagttctcattttcacctttggtgacgacatatccgcgtttgaccacgctttccttgaaatgattcatgtcctcttcattggtgaagctcatctgatgctcgatcggccgctccgcggtgtgaacatcctgaaccgcgcccagcgccttgatcgcttcatcgatatgcgcgctgatctttgcctttgtctcttcgtccaatacatagggcgcgctctcctgcgctttctgttctttgaaggcagggatgtcgacgtcaacgtcatccatgtctgcggtgctcttcacatcgtcgatatgaaaatcgttgagcgtttcctcctcttcatccgtgagcagtccttcgtccagcttcatgatctctttcttgtttttctgcatcttgtagaccgcaaatgcaactgcgccgcctacggccgcgattgccggaatcagtcttgataatttcatctgcgatacctcctcatcgttatccttattgtatcacacttcacggcaaatattagtgagatttatctttttttggaaacggctacacggtcgcccacatcatagaattccgtttcaaatgctgcattgtgttccagatagtcgatgtatcctctgatcttgcgcaccagattccgcgttccgcggttcttcggcaccgtctttccttccaccatgccgtgaaagccaagattgtctgaaagcacgatcccgccctgctttagcagcggggtgtagcgctcaaagaagcgcgtgtattgtgccttggccgcatcgatgaacagaaagtcaaattctccgtcgatctccgtttccagcgcatcgcccaggatcagcgtgatccgtgaggacagaccggccttctcgacattgcggcaggcttcctgccaccgctgttcatcgcgctcgatgctcaccacatgaatgtcttcatgcaccagtgccatgcggatcgcagaatagccgatggccgttccgatctccaggatgcggcggcagccatgtgtttggatgacatccagcatgaacgcgatcccctctttttccatgatcgggacatcgtgggctctggcataagtctccatctcagtgatgatgtccatgttctcctccatttcccgggaaaattccccgtcatacagcaaaaggacaccgtctctgacgatgccctctcatctatttattttacaaattcaacgattgccatcggagcggcatctccgcggcggatacgcgtcttgatgacacgagtatatccgcccttacgctctgcgtaagacggtccgatctcgctgaacagcttctgcagcgcagtctgtccgctgttttcatcaacgacgacattgcggacatatgcagccgcctgacggcgtgcgtgcaggtctccgcgctttgccagcgtaacgagctcgtccatgatggaactcagctctttggctttcatttcggttgtttcgatctggcctgcctcgatcagggaagtgaccatgttacggaacatggccttgcggtgatcggcagtacgtcctaatttacgattccacattggtcattaaacctccttcagcaattactcgtatgacttaaagctaagacccagctcatagatcttatctttgacttctttcaatgacttcttacccaggttgcgcacgcgcatcatttcatcctcggtcttctgcgtcagttcttccacggtctggatgcctgcgcgcttcagacagttgtatgagcgtacggaaagatccaggtcttcgatcatcatgacaagtcccttgttctgaacctcaccctgtgcttctttcatcacggagtccatctcgctgacctgctcatcgaccttggtcagcagctgcagatgatcgatcaggatctttgcagcccaagcgacagattccgccggcgtgatggagccgtcagtggtgatctccagcgtgactttgtcatattttgcgttctgaccgacacgggtcggctcagaaagataggaaacctgttctaccggcgtgtagatcgcatcggtgtagatggttcccaggggctggttctgcgtctgatacagctgtttgttcgtatcagcgctaacgtaaccgcggccaacgcgagcctgcagttccatttcaagaacgccgtcttcttccagcgtgcagatgtagtgatccttgctgaggatctccacgccttccggacagatgatgtcagaacctcttacttctcccggaccgcgcttggagatgcgaagcgtatagacctcgtcatccgcgatcttcaggatcagcttcttgatgttcaggatgattgccgtgacatcttccactacgccgggaatggcggtaaactcatgatacacaccgtccatcttgatggcgaaaacggcagctcccggtaatgaggagagcaaaacacgtctcagtgcattaccgattgtcgtaccgaatccgcgttccagcggttcgaatacgaacttaccgtagtgttcagattctacgtattccttcacttcaaattcagcacgttcgaatttttgcatacaatacctcctcattcagggttcattaaccacgtggtcgttttggcgggcgacaaccgttatgtggaatcggcgttacatcgttgatcaatgtaatctccagtcctgctacctgcagcgcgcggacagcagcttcacggcccggaccaggtcccttgacattgacagcgacctgcttcatgccgttttcaattgcagcctttccggcagcttcaccggccatctgtgcggcatacggtgtagatttacgggatcccttaaatcccagagcgcctgcgctggaccatgcaacagcattaccgctctcgtcagtaatagtaacgatagtgttgttgaatgttgaatgaatatgagcgcatccgcgtgcaatattcttgcgggcgcgacgtttgcgtgccccggctttcgtattttttgccatgcttacttcctcctaaatcgtcctatttcttcttattcgcaaccgtgcggctaggtcccttgcgcgtacgggcattggtcttggtgcgctgtccgcgtaccggcagacccttgcggtgacgaattccgcggtagcatccgatctccatcagacgcttgatgttcagagcgacctcacggcgcagatcaccctcggtcttgatctgatcaacttcctgacggatcgcattgacctgatcatcgctcaggtccttgacgcgaatgtcttcgctgattccggtctttgccaggatcttctccgcagtcggacggccgataccgtaaatataagttaaggataccacaacacgcttgtcgcgtggaatatctactcctgcaatacgagccatactaatttatacctccgttagtttccctgtctctgtttatgtttcggattttcacaaataaccatgacgcggcccttgcgcttgatgacgcggcacttgtcgcagattggtttgacagatggtcttactttcatgtgtcttcctccttgtcttcacgacttacttgtgtcggaatgtaatgcgcccacgtgttaaatcataaggtgaaatctcaacggtgacacgatcacctggtaaaatgcggatgtagtgcatgcggattttaccagaaacgtgagccagaatctcatgtccgttggccagtttcactttgaacattgcgtttggcagagtgtcgatgacttctccgtcaatttcaatcacatcttgcttacccattttctggatgttcctcctttttcagtgtagtgagtatctcatacccatcgttcgcaattgcgacggtatgctcaaaatgggccgtacggctgccgtctctcgtgacgacgccccagccatctttcagcgtacgcgtctgcggtcgtcctgcaatcaccataggttcgactgcaatcgtcatccccggcttcaataagacgccgtgtcctgcagggccgaaattcggaacagccggatcctcgtgtacctcgcgtccgactccatgtcctgtataatcccgcgggatcgagcagccgtgtgcgaacacgtattcgccgatcgcatgggatatatcagttaaacgattccctgcgcgggcatactttaaaccttcgaaaagcgcttgttcgctgacctgcagcagtctgcggtctgcttcgctgatctctccgacggcatatgtccatgcggaatcgccatgatacccttcaaaacaggcaccaatgtccactgaaacaatgtccccttctttcagcaccgtatcatcggggataccgtgcaccagaaggtcattgatcgaaatgcatgcagcagcgggaaacccgtacagccccttgaaggacggcgtggctcccgcttcagtgatcacccgctcacagatggcattcagctctcggctggtcatgcctgctctgatcgaagtgcggacagcatcgtgagccaatgccacgatgcgtcctgcttcacgcattttcgctaattcttcaggtgttttgatatgaatcattccgctgactccaaagcagcctgaacatcttgccagaccttttcgatcggctgatccgcgttgatatgcttcacgaggcctttcttctcataaaagtccagcaccggttcggtctgtctgctgtattcatccagacgaacctttaagctttcctctgtgtcatccttgcgctggtagagctcaccgccgcagttgtcacagacaccctcctgtttcgggggcttggtcaccatgtgatagatctcgccgcagtttctgcacagccgtcttccggtaatgcgcccgctgagcacggagaaatccagctccatggcgatgaccgtatcgatcgccaggtcgcttccctcgctgagggcatcgaatgccttggcctgatcgatcgtgcgcggatatccatcaagcaggaatccgttctttttgtcctcgaggttctcgaggtagctcttcaccatctgattggtcacttcatccggtacgagcagtcctttgtccatatagctcttggccatcatccccagctcggtctgattcccgatctcgctgcggaagatgtctccggtagagatatggcacacgttgtacttttccacgattttggctgacatggtgccttttccggcaccaggtccgcccatgatcaaaatgttcaattcactcaccttcttactcaaagaagcgcttgtaagatttctgcgtcagctgtccctcgagctgctttaccgtctccagcgcaacaccaacgacgatgatgattccggttccaccgatacccatggagctcggcagatccgtaaacagcggaatggcatgcggcagcaccgcgatgaatgccagaccgatggcgccgagcacggtgatgcggcacagcaccttgttgatatattccttcgtctcgttgcccgggcggatgccagggatatacgtgccggattttcccagattctctgcaattttagcaggatcgatctgcatttttgtgtagaagaatgtaaacaggatgatcagcacgacataaacgcagaggctccagccattctgcatgcccaggatataattcatgccattgatgaaatcattggccggaaagaagctggcaatctggatcggagccatcatcagcgcgttggcgaagatgaccggaatgacgctggctgaatttatcttcagcggcaggtaagtcatatccttatggcgagtctgaactgtgcttgatgtatactggatcgggatcttgcgttccgccaggttcatgaatacgacaaacacgatgatcagcagatagcagaaaaggtaaagtgcgaagctcagcagtccgctgaacagcgcgcctccggtgccggttccgatcatcgtcgtccacatggaactgatctgtcccggcagacggccgacgataccggcaaagatgatgatggaaacaccgtttccgattcccttcagcgagatgcggtcaccaagccaaagcaggaacatgcttccggcggtgaagatcgtcgcgatatagaggatcttcgatacggatgcaccatcaacgatcagtgattcatactgcgtggagaagccccacaccatgaaatacgcctggacgaagctgaggatgactgccagatatctggtatatcggtccatcttctttcgtccgctcgctccgccttccctcagctcgttcagcgccggaatgacatccatggacagcagctgaatgatgatggaagcggtgatgtacggagttacgcccagtgcgaagatagagaactgctccagtcctccacctcctaataagtttaacatagcgaacagtgaattgtcactcattcccctgattaattctgcagtatctacaccaggaacggtaatcgccgctccaaaacggaagacgaacagcaccagcaatgtataaagaatccgtttccggatgtctttatttttgagcattgcggcaaatttggcgaacatactagattacctctgcttttccgcccgcattctcgatcactgcaacagcactcttggagaatttgttggccttaacagtcagctgtttttccagttccccctgtccaagaatcttgatgccgtttaattctttcttgaccagaccgcattcgatcagcagttccggtgttacttccgttccgttttcaaagcggttcagcgcctcgacattcacaatggcatattccttgcgggcaaagtttgtgaatccgcgttttggaagacgtcttgccaacggtgtctgtccaccctcgaaaccaagacgggttcctccgccgcttcttgctttctggcctttctgaccgcggccagctgtcttaccatttcctgaaccctgtccacggccaacacggttgcgtgtcttccttgaaccttcagtatatttcaattcatgtaatttcatgtccaatcctcctgttaaccgcgaatttcttcaggtttctttccacggagacgagcgatgtcatcgatcgtcttcaggtccttcagcgctgtgatcgtcgcacggaccatgttgatcggcgtacggcttccgatgcacttggagaggatatcgctgatgccggccagttccagcaccgcgcggacaggaccgccggcgataacaccggtaccttcagctgcaggacgcaggaatacttcgcctgcaccgtatgttccagtgatctcatgcgggatcgtcgtaccgattaccggtactctgaacaggtttttcttggcatcttcctcagctttgcggatcgcgtcaggaacttcgtttgcctttccggttccgaagcctacacggccttttttgtcaccgattaccacaagagcggcgaagcggaagcgacgtccacctttaactacttttgttacacggttgattgtaacgacgcgtgtctcgaattccttttcacgatcacggtctcttcttggtctacgttccattcgcataacctcccttaaaatttcaggccggcttctctagccgc

SEQ ID NO: 275 - DNA, 8089 bp, Unknown
  16S sequences of unknown bacteria
tgaaaaagaaaggatttttctgatgaaaatacttgttaccggcggtgccggttttatcggcagccacacctgcgtcgaattgctggacgcgggatatgaagtcgtcattgcagacaatctcagcaacgccaaaccggaggcggtggaaaacatccagaaaatcgctggaaagccggttgccttttatgaaaccgacctgcgggacaaggccggtatgcgaaaaatttttgccgagcattccattgatgcggtcatccatttcgccggactaaaagcggtgcccgagtcggtgcacaaaccgctggaatactatgaaaataaccttggcagtacttttgtcctctgccaggtcatgcaggaggccggatgccgccgcattgttttctcctcctccgctacggtttacggcatgaacaacccggtccccttcaaagagggaatgccaacctccgcaaccaatccttacggctataccaaagtcatgatcgaacagattctgaccgatttagcagcgtcagacccccgctggagcgttagcctcctgcggtatttcaatccgattggcgcccatcccagcgggcttttgggcgaggaccccaacggaattcccaacaatctgctgccctatgtgtctcaggtggcggcggggctgcggccggaagtggtggtgtacggcaacgattatgatacgcccgacggtaccggcgtccgggattatatccatgtggtggatctggcgctggggcatttggccgcagtcaaatatgtgctggaaaatacaggggtagaggccgttaacctcggtactgggcagggcagcagcgtgctggaaatcgtatccgcttattccagggcctgcgggcgccagctgccctatcggatcgcgccccgccgccccggcgacattgccacctgctatgccgacaccgaaaaagcccgccttctgttcggctgggaagccaaacgcggcattgatgagatgtgcgccgacagctggcattttgcccaaaaccgctatagcacaaaataacctcttccgccctgttttcccccaaaaatccgggacagatgctcttgattcgctccgcatcctctctcatttcgaacctttgtccgaaatgaaaacgccgtggaaaaccgcctggcaagcatttctccttgcagccgaacaacagcggcttttttcgaaatttccttgccttgtcagtttggggcgcgctggccctgcgggactttcggaccggtacatgtatcaaaaaagggaggccttctacccgaaggtccccctcttttcattttgttttcgtgtttttctacccgctatacaaaaatcatctgacccaacatggcgatcagcggcaccgtgacaaggcatcccaccgtcgttaccgccacgatgaccgatgcatattccccatccaggccgtaccgggccgacatcatgctggtggcaatagccgccggacaggccccggcaatcagattcaccagcaccagcgtaacgccgtcatctatccagcggtgcagtcccaatacccaatacagcagcatggtcaaaagcggaatccataccagccgggtcagagaggcgtacagcacccctttttcccgaaagcggttccaatccacccccgcaataaagaatccgcataccagcatagccagcggcgtgttcaaagaagaaaggtacccgactaccgcccccaaagaggaaggcagcgtaatgttcatcacaaacaacggcaccgctaccagagcgctgagtatccccggattcaacagcgcttctttccaggacatttcccgaaaagatcctttcagcattcctacgccaacggtccaggaaagcacgtgaaacaccaccacaaacacaacggcaaacactgcgtattgggcgccgaaaatgccggttaccaacggaatcccaataaagcccacgttgccaaagctggctgcataccgttcaatccgcttattttcctgctgcccccgcggaaggaagagaaaacgggccgccaaaatggcaaaaagtgaggatacaacagcaagtcccagagaaaagagcagttctttgacaatttcctgctgaaacggccgctgcaggttgctcaaaagcaaacaaggcgtgacaatcatcaaaaggatattgcagatgcgattgcattctgctttctgcatgccggtggcctttgcatagacaaagccaatcagcatcaacaaaaacatgataaacacctgctggaatacgatggcgaacataaaccgcacctcccaaagcagttcccggcaccccaaaaagaattgcagcccatcctgcttttttattttaccggaaataaggatgatttgcaatcaaaagaaaagcgcctggcacaaaagggcacataaaacagttttacagtcacagtagtcaacttgttgcaccttttcttgtgtatccagctaatctatggtttattcgtcataccaattcggcaaatcgcgatttacataaccgacagcaacagctcgttgcttgttttgcatgccgctaggtgatacaattttttcgaggtgatgatgaatggataccaaagatattatactggaacttagaacaaaaaacggtttatcacaggatgaacttgctgaaaaagtatatgttacccgtcaggccgtttcccgttgggaaacgggtgaaacaaccccgagcactgaagccctgaagcttttatcaaaactgtttgatgtttccatcaacacgcttctgggctctccccggcaactgatctgccaatgctgcggaatgccgttggaggattccaacatcagcagagaagcagatggcggactcaatgaagaatactgtaaatggtgttatgccgatggcgaatacacttacgataatatggatgacttaattgacttttgtgccaatcatatggtcaatgaacatttcacatccgagcaggtgagggcatatatgaaggatatgcttccgaagcttgattactggaaacggtatgcctcccttggcggcaaagaaaatttcgaagggttcaagaaacagattattgatgaattcaatgaattacatattgaaggaatgccgaaggtcgaaagccttaatgcattggttggtaattttgtcaatcttgaatacagacttccaaatggaaagattgcgaagttcttagatgatggggccgcttatcttagtaatcagcttccgtgcgagttcggcggtgaccgatgctatggtcttgttgctaatatggagtttctgcttgtctgtacttacgaggaaaatggtgcaaatccagagcttatcatttacaaaaaaagataaaccatcaggatttatctaaaaatcttaaaagcacaccataccggaccggcaactgttatgtagagcgaacaatagaaaagccaagctgcaaaatgcagcttggctttttctattttacggacaccagcacaaaaggccggatgcaaaaagatttgattatccttgggtgctgttgttctgcaactcagcagaggcagccgcccctgtatcttccatcagcgtaaccgttacttcaaaagtactcccctgtatggtctggccgccataagaatatccgtaacgggaacttccgtaggactgattggcccggaaaatcgtcagcgcaacctgatcgccgggcgcataatcgcgcaacaggtcagacaatgcggtaaagctgttgaccgccgtcccctctacctgggtgatgatatcgcccgcctgtacgccggcagccagcaaagtggaatcggaatcaatgctgtcgatcagaatgccgctggggattccgttgacactggccacatattcgttcactgcataagcggaaattcccagtttgactcgtccggtcacccgcccgtagctcatcaaatccttgagaatcggcagtgcctcatcaatggggatggcaaatccgatgccctcatatccgttggcggaaagcttctgggaattgattcccaccacctggccgaattcatttaccagcgcgccgccggagttaccagggctgatagccgcatccgtctgaataaaattcatggtatatccgtcgttcgccgcacgcagggaacggttcaacccggaaataatcccctcagaaactgatcccgcataaatcaggccgccgggattgccgatggcgatggctttttcgccgaccttcagttcgccggaaacccccagctccgccggagtcagtccggatgcgtcaattttaatcactgccaaatccgttttgctgtcgtagccgacaacggtccctttataagtagtaccgtcgctgagaaccacctccaagctgtccgcattctcaatgacatgggcgttggtggcaatgtatccgtcttccgacaggatgatgccggacccttcgccggtaggttcaaagtagttggattgatattgcacaataccaaccacagatggagcgaccttttcgttaatctgcgccgttgtcagcgtcccgtcggtcgataccgtgttatccgacggtttactgttggtttcaagctcggggacattctcgttcgcgggcagatcgcctttgctctgggactgcgccggcgggtccaccacgttttgctgcggtgccaccaggctgtaaatgccaaacacggcaaagctcaacaaggtaactcctagcaatgcgccgatgatcccggcgaaaactttgagtccttttccttttttcttgttttccggcttttgagccggcgtgccgtactccggaaaactccattgatccgcaggcgggggcgtatggggaggcggggtctgtgccgctcccggcgccggatgctggccaaaagagtatccgccgtagggtggagtttgccggtttacaggcggctgatactgataagcctgttcgcccggagtcttgttctccgctggtttttccgcatcggttttctccgccgggatgttattttccaaagagccgcccatgtctttattttccatgtcattcatgctctgttcctccttgttatcctgcaaaagccttggatctcaaaaatccgccgctgcttttttaaactggctttattataaaagagaaatatgtccattgcgtaacggactctttaaaaaacttgaggaattatccgttttttctgaataaattttgtgaattttttgttccggcgctgggaacggagaatgcaaattccgtatattccccttctttggagctaacgtggatttcaccgccgtgcagttgaatcaccgtccgcacaatatataatcccaaaccaacgccagttttatcctggctgcgggaacggtccgtcttgtaaaaccgctcaaacacattgggcagatcctgcggcgcgatgccggtgccggaattgcggatggcaaccaacgtacgcgcaccatcgttgtggtatttcacctcgatatagccgccttcgttgacaaactttaccgcgttctcgatcaggttataaatcacctgatgcatcaaatccgggtcagcgctgaccataattttatccacatccaacccgaggatgtccaggtttttggattcaatggcctgctcaaagctaaaaatcacctgacatacaatgttgttcaggtcaaactccgccggattgagtttcatctctcccgcttcaatcttggccagatccagcattgaccgcaccatgcgggacagccttttcacctcgccggatacaatcgccagatactgatgatgcttttccttggggatagtcccgtccaaaataccgtctacaaatccgccgatggtggtcataggcgtcttcagttcatgggaaacattggctacaaagctgcggttcatcgcctcgttgcgggccagcgcctctgccatatagttaaattcattcgccagctgcccaatttcatcgctgctgttcacctgtacccgaacggtataatcaccccgggaaaaactctgcgtagctgccagcatatcccgtaatggctttaccatgcgggcggtcacaaagtagataacgataaaagcgatcaccaccattgtcagagaacttaacagaaacatgttgagcagctgacccaaaaaaatgctcaaactgttggcggaagcagatataaacacaaatcccgaaatctgcccgttgggtagcccaataggccgcgccaccgtgtagttcctgctttgatacgcgcctcccagccgcccggtttcccgataactgccgctggccgcctgcttgagaatactttccggcacggtatcctttccggaagcaaacggctccgtgtccgtacagatcaggattttcccctcagtgtcagaaagaaaaatcgtcgcctcaatggcgtcagccaatacggagtaaaccgagtttaaggtagtttcgtcaatatataaataattattcttttgatagtccgtcagtgtcaaagctgtggcctggctcacataacggtccagtacctttaacttgtcgctgcggaaatattgagacgcaaaccccattagcaaagcgcccagcacggtaatgctcgccagaatcattccggcacagatggtaaaatatttagtaaataaatttttctgcatcgaaaaccccatccttccgaagtggaaaaccgcggcagcctgcaccctaaacatacagactgccgcgggaaatctctgtcatcttgccagcgctattcttttacttcgaacttatatccaacgccccaaaccgttttgagcgtccatttgtccgaaacgccctccagcttttcgcgcaggcgcttgacatgcacatccaccgttctggagtcgccgtaatattcaaatccccacacctcgtccaaaagctgatcccgggtgtaaacccggttgggattgctggccagatggtacaacaattccagctccttcggcggcgtatccaccaccttgccgtccactttcagctcgtacttggtcatgttgaccaccagcttgtcatagctgacttccttgacgtcgttttccgccgcgctttttccggtccggcgcaacaccgctttgatccgggccacgatctccttggtttcaaagggctttaccacatagtcgtcggcgcccagttccaaacccagcaccttgtcgaaggtctcgcccttggcagtgatcataataatcgggcactcagattttttgcgaatttcccggcaaacctgccagccgtccaatcggggcatcatcacgtccaagagaatgatatccggattctccgccgaaaaacgggcaagggcttcctctccgtcgccggccaggacaacctgaaatccttcttttaccagataaagccgcaaaagttcgcagatatttttatcgtcgtccgcaaccaggacttttcccattgccatatttttacctccttgtcagcgcagcacccctgtgtgccgcattctgaatatcattatacccgaaaaaaagcgcgaaaggttacaaatttataaaccttttgcagatattctgaaacgctcttgccgccgctttttccatgtataattatagtttgtaaaagcccgtttgtatagaggttttctgggaaaaaggcgtgtcccgccaaaaaaacggatcaaatacagcattcggaaaggacgaaacgtcaatatgaaattaggtattgagggcgattcacctgattctatatctcaatattgctccataaatgccgataattcttgatttcagcgtgttttccgcacaaacagccactatataacttcatgcaattccatactactccacgccgaaatggtgtaaaaatggtgtatggaaaatcggattgcagacgcgaaaaagactcactactactgcccacaaaaaaatcgaatataagctctgggaaagcgcacaaccatcggcatgaccgtccaacggatatgccgatggttgtttcattttctgctgcatttcggggcgaatatggaggaaaatatcgccagtacgtcgcttggatttcctgcctatcttgccactccgccttgtgataacggcatttcgtgtgccaataaagggtggaatcttacctttgcagggctttgcttgaatagcaaagccttatctgaaat

SEQ ID NO: 276 - DNA, 3640 bp, Unknown
  16S sequences of unknown bacteria
attgtaaaatgaagttgcaataaagagttttcaaaagaaacatatccgcaaattgcaataggtttcaaaatacgttttttgctcttgatacaaaaaacagagaccgaagccttcctgtcttccgtctctgggtgctttggggatttttacagcccgttccaaccactggttaaagccggtgttgctgatttttattccgcttgctttatgaatgtgactaccgtgccgtcaaaaagacgatatttgtagacattcttgtcggtgttgaacgtaaaagtcgggtatggtccgttggattcatttccatcgccgtctttcccgtcagtgaagacgagatctccgaatttctgtagacgtacgtatccctcaaagatgagctttccgttttcagtgacgatcatatgcggtttatcgcccgaaacttcgatcacggcattgatgtcatcgttcttccaaatgccatacagtacgctctgatctatcggtacatagatcatgccgtcaccgtcatacggatgcacagactgcgtgcggcttttccggagttttccgcaagccccgagagttatcagtacagacataaggagcacacctccgataataatccatccgagtcgcatcgttctcatatgcgttcgaggatcatcgtgccatacgcgatagtcagacagccgttctcatccaccggtatttcggtgaatgggtcaaccgtctctccaagaacctcgccattgactttggtatcgtagtagaacttaccgtccttctccttccatgtggtctgctcgattgcggcgaaaccgtcctcgtcgatcacagcgccctgcgacttcgcaagctcgattttgtcctcgggtacgcgcatcagtgtgttcatgaagccgtcctcagtaaattcggttctgctcatgagcatcatgatgatctcgtcagcgtgagcaccatccggcagattttccggtgtgtaggtcaccataccgttgggggtggggaagagcagctccttgactttccattttccgataatgttcattgcgatatctcctctcttttcgttgttttatcgtaggttccggaagcggattatgcccaaggatcctcagatttcggtgtgcggacaccggtcagcagatactgctcccacaaaaaccatttgttgtcagaaccgcgctggcgcagctttatcgggcgcggagaatcggctccgccgcaggggatgaagagcttcatgtagccgggctcatcgtttgagacgtggttcgactcgatgacgagcgtgtagggctgggtcggcgtatagttgttgtcaggcgtcgagccggtgaagtaagtaaaaggcagataggtctttccgtcgcggaagcggtcgttcaggaaggagatctcctgtccgttcagaggacgcggaccgcgcaggaaattcagcatctcggtgccgatactcttatccgctgcgtaagcgcagagcgcgaggacagtcagggcggcagtcttgaacggcgtatccatgcttgcctccggaagtgcctgcagctctgccaggctctcaggaagagaggtgaaagtgaaggtctctcgctttgagcctatagcggacactgccgaggttgcggctgtgttgaccgcctgcttcgccgtgcttttaagtttgtcgaagattcccattgttaaactccttttcaaatataattatatttatgactttattattccccttcggagacaaaaatcgtgtaatcaatctcatctccggggtattcatacggttcagtgcagtcttcatcaaggtatgccgttccccacgggcagtattcatatacgtcgaattcccagtctgccggaatcgtgaagctgagtccaagtgtctcgccgttagagtataacagcttgagcgacacggtccgcagcggtcctttccacgcggcgatcgtatccggctcgggaagcttgtcgccgtagctgaactttgcaatgaagttagactcgtctttctcgttgaatgactcgattttcttcagcgcgagtgttccgcggtcgatagtgtagaccgtgctcgaagcaccgtaatcgacgtagaaaatctcttcttcctcggtgcaggtgagccgtatcaggtcagctccctcatccggaagccgcattgtggctatgtaatcatcgagccagtcggacgaagtgtcggcaggcataacgctgactttgccggtcgcgttatcgctggtatagaaccggaactcatcatagaaccccgatgatccgtcatccatccagagagtgtacccattgtcggttttccttgaatagacgagtgatccgtatccgctcgagtaatcctctgtaatagtgagattgtcatatatcgagaacaggttcgagagatggtttgcatcatacagcaaatcagttgtgaaatccaggtcgatgaaatcattgcggctgaactccgagagtatgtagccgtcgttttcctctttgaagccgatgttgaataccgtttcctcgaccacgttgaagcgcagatggtcgcgtattgtgacgacgtatgaattattttgggctttctcgcaatttacctcagagatgactccgaggtacgaatggagatcatcgttaattttcggaaatttccagtaggtcttaccgtccctggtttctgcctccgcgtctatgtcatccggcggagtcatgacagcttcgccggtcaggatcacattctggatttccttcagctgatcctcggacagcacgacttcgtctgcgaattcaagattcgccttgtatgccgcgtaccatcccgccgtgttccacgcgaattctggcgtgtcggtatccatgctcccgttccacacaagcgtgcggtaggacagagccgccgatatcgccaggttttcaaagtcgtcaaatgctaccgttttgttctcgcacccggtaaagcatgagatgatgacagctatcatgatgataagtgctactgtttttttcataatgccagcctccttatgtcagaatttgcctcctccgccgccatgcgttgtgtcggaagacgaggtgtgcgtactgcttccgccgctggagctattgtttttcggcttctgcgttcttgtgacactgcggtacaaaaacatttcccggctgtcgttaatattcaaagttccgggtttgatatagctgttcgccgccgcctgagtgcggacggtaacgagtttcgctttcatcttaccaactgtggtgcaggacagtatcagaccgacaataaggctgacaagtatccatgcgggcgacagaggctcgcgcgggagactaccgatgtcataaggcttatcggtctttgcctgtgtgatgaattcgtcgcacagagtgatgtacgtcgcgaaagccccggcaaaatcactgtcagacagatacggtactatctgcttcccgatatattcgattccggcgtcagtgaatacggtgattccgtagccacaggtcgagatataccagtcgttgtcctccatactgatgacaagtatcagtccatcgcgattcgcgccgtaaccgaagctgcaatagtcgtagagatcgtccgcgtattcgactacgctttttccgtcgagcgtatctgtcgtcgctatgaccacatccattttctggcgca

SEQ ID NO: 277 - DNA, 8190 bp, Unknown
  16S sequences of unknown bacteria
cggtacgctacccctccacggggcgcataccgccttttcttgttatccagccctctggctgtatcggttgagcaaaagtcagcgtgggattattgatgtggtatctttatctaagtgaacccccggtttcccatttggaaaccgcctgacgggatacgtggagcatttcggccagcttttcctgcgatagccccttgcgtttgcgcgcgttgagtagattttctgcaaatgccatattcatatcctcccgtgggtttgatggactcagtatagcacacgcggcggttgcgcgccaccgcccggggctggaaatgccgcaaccaagggttgcgaatgaaagacacccctcagtcggctagcgccgacagctcccctagaaccaggggagccttttgggaagcggcacaaccgtaggaaacagcactgccccagagcctcctttgtgtaaggtggcgcggcgcagccgcgacggagggagtgacaaactgagaggcagggccaaagcggccctgccccagagccttgacaaagtatcgaaagagcgaggcttaaatcagaaatgacggcgtgtacgtcatttctggcattttttgcagagcaaatgcttgcatttgcggtaaaaatgcattcccgccccgaccgctggccgttggaggccgcgaagcggctggaggcgcgagcacacgcagtgcgcagcgccggaacactgggccgccgtaggcgacacagtgcgtagacaagcggtcgggcagattcgttggcaaaccagaggtttgtcaacgatcagaggcagggccaaagcggccctgccccatggtttagcgtccgtttgcccgacggaaggcttccgcgtcctcgatcatcgcgcgcagggcggcgtcggtttcatcgccatatttgccgtccgcgccaaaggtgggcaaacagttgggatcccacagcaaaaggattttttgccattcttccacggtgcgtttcgcgtccgccggcacatcgggcaggggcgcttcgctttcgatttcgcttttcagccacttgctgcggccaaaatgcgtccagggccgggcgttcaggggcagcatttccacgccgtaaccgctggcgcgcgcttccaccacctgcccattgcgggccacatagcccacgtgcgttttgcgcccgtcggtatcgataaatgtgaaatcgccgggttttagggcggattttttcagcgctgtgcagccgcgccacaggccgttcgcgctggcgtcgcttttggtaacgcgtttcaaatcctggaaaaaccacatggcgaggccggaacaatcaaaaaaccgcacttcgctgggctccagttcttcggtcaattgctggtaaaacgaccaggcgcgcttggcggtttcgcggcttttggatttgcgctcgatccaggccttcacgttgcccacttcgtttgcgcgctgtccctgcgcgccgtagacatacgcgccgcgtcccacccattgctcgagataatccaaccattcgttcagcaatcccatacgtttcctcccgcacatcgtctgtggccaccggcgcaggatggggccacattccacgatatgccgcggcgaggcaaggggtgcttatgcgcggtcggcgcgcaggcactcgatcacctgcgcatagtattgcttgctgatggggatggtcgcgccgctggaaagcgtcagttgatgggtgactttattcagttggcgcacgtgccgtaggttcgcgagatagctctggtggcagcgcacatagcggtagggcgcgagccgggccgccaccacgtccagccgcgcggggaagctttccgccgcgccggagagggtgtgcggatagacggatttgccccggctttcgaaatagaggatttcctcgtgccggatgtgcaagagttggcggcgggtttccacgatgaagaaagtggcgtcctgcccgtggtattgccagaacgttttgagcacggatagcaattgcgcgtcgtcgtgcggggcggcgacgcagcccagcgggcgcgtccacagcagttcctgcacgggaaagctggcgtgcggcacgaaggcgatttcgatttcctgcgcggcgcggcgcacggcgggcgcgctggcctgcggctccgccaaaaaagccagatcaaactccttcgcgcgcgcgcacaaggccgaaagcgaggcgaagcattccacggcgcaggaaagcgcgctgttctcctgggagaacagcgcgccaattcttgccgccaggcgctgggcgaagggagggtctggatcaaatacggcaattttccacatggttcctagccgatggcggcggcataaatggcgtccgcctggaactggcccacggcgctcaggcgcacatggtcgttgtgcacgaggtcgctcaagcggcgcgcttcgttttcttccaccatctgcgtggtggaatcgatgctcacgatgcacagcgagctcacgccttccagcgagcgggtcagatacacgtcttccagcgagaacagcacgaaggccgcgccgccaatctggttggcgctatattgcatcgcgccgtccgtaatataggcattgaagcgatagggttcggaaaccgtctgctgggcggccagcagctgggattcgctgatggtcatattggcttcggtcacaggttccacgctgagcacgaggctggccttatccaggtcgtattccgccgcttccagcgcctcgcgcgtgctgcggctgaggatcgtgtccaaattgaccatcaggatgccgccgtccacggccaacgccaggaagccgatgccatcctcgttgagctggttgatctgctccatggtgagggagagctggcggtattcgaacacggtcgcgttggccagcgcgtcgagcgcgagcacgttcacgccgttgcccatatcggcaacgcacacgttgtagcccacggccgcgcccagcttgtccttgagcgccgtgctataattcttgccagccaccatcagctcgttcatattgctcacgctggcgctgatttcgctggtgaaatcgtaatcgctggtcttttggttcacaaaggccgcctgcaccagcacgccggcgttcacggcttcgctcgtcatggtttcgcccaggtgggaaacgcccgtgatggtgccggtttccacctgtagcgtgctgccatagggcgcagccgcgctcacgttgcaatagaagtccacacgcaccgattcatcgcggttgatggcattcatcgcatcggtatacacgcgcagtttgttgccttcgtaggtcatattccagccgcggtcgttcaccacgttcaccagggagagaccttccgagagggaataatccatggagaagcccgccaggtggcccgccgtggaggtgaattccaacgagcagatcacgctggaaccgggcagcgtgcggcgcgtgtccgcgctggccgctgcgctgaaactgggcgtggctgcgctgatggcaaggctaaatgccacgtccggcgcggaaaactggtatgcgcttagatcctggctgccggtgatgccctggcccgtaatgccgctgagtgtgatggggatggtgtccccgcgggccacttccgaagagctcacgaagaagcgtagcgtcatgcggatggtttcgttcatgaaggccatattttcctggctggccacgccaatctggctaccctgcgccagcactgtccagccttcgggagcctgtgcgctcacataggacagcttggtctcgtcgtattccagcacgcccataaagccctggaacgcgccgcccatgggcgtgaagtccaaagcgatgtccacatacgcgccgggttccgcgtcgccaatggcgctcatggccgcggtgaagctgggcgtgcccgtgctggcgatggcgctcgcgtcgttgagcggatgctggccccactgggtgtccgtggcgcgcatgttgttgatggtgagcagtggcgcgctggaagccgcggtcttgagcgtcatcaggatgttcaccacaatttcctcagaggcgctgttcatggccggggcaatgccggttttggtgatggtgaaagaggattgatccgccgaatacgtccagtcgctgggaatgacgaaggaaatgcgggaaacctccatcaggttgtaatcgtagctcagcgagccggagaaaccggtggcctcgccgctgatcaggctatagcgcagctggaacgccacggtatcgcccgcctggttgccgctcatagcgcccgtcagcgtggtgcgcacggagggcgcttgcaccgggatgggcgtggcggcaggcgtggccgaagcctcgggccgggcagtgccgtccgaggaagaactgcggcccacggtcagcttcacgctcacgctgtccttgcgctgggccgcgccgttttccgttacgccttcaatgccggaaatcgtgagagtgaacgaatcgccgttctccgcgtccgaaggaatggtcacgggaatggtcaccgtgccgctggaagtggtagagcccgaaaggctggtggcgataaacccagaggaggacacgttcaagcccagggggctgagacccgaggcggaaggcgtgcctacagacaggccctcgctccccgagaaattcatgctaaagccgcgatacgcgccctgcgcgatggaaatggccacttggatgttcaccgtgtcgcccgccttcacattcgttttggaggcggaagcgctcacggaataagaatatccgctcgcatccggcgtgggcgtgggcgcgccaggggtgacgttcgggtcggtgggcgcgatgggatccgtgggattcacaggatccgtaggggatacgggatccgtagggttcgggtcgccagaaccaccgccggaaaccgtgatcgtggcggaaccgccgccgtaagtagattcctcgccactggccaattgcgcatcaaaactgctgatcccaaatgtgaaggtatcgccattttgcgctgtcatggggatgcgtaccgtgcaggaataggtaccgctcgaagagtaggtaccgccagcggccacaaatccactagaggaggcttcaacgaaaccaccagagaaggataggctggcgctgacaaattccaacccgcccaagcttacgctgttagaagagacaccttgataggtatcgcttcccaacgatatgcgggccgttaccgttacggtctgaccaggcgcggcggtcgcaggcgcgctcacgctcatgcttgcgctggccagcgccgcgccaggcgcaagcatcattgcgatcattgcgaagacgatcgccatggataccaccctgtgtttgttcataaaaatttcctcccactcatacctgccgcaagcaaggcggcggacatacctatatgctacgaaattataccatgtgtgcgcggcatatttcaatacagtggcaaaattaaacgccgaaaaggcaaaattgaacccttatcgttcctggccgcgcgggaagaaatttcagttattaaaatatttttacggctgcaatgttttgccctccgccgcgatcagcgcggccaccacgccagaatagctgctttgcccgcgctcgtccccgctcaggcgcagcaaaatatcgcccagcggcgcgctttgcggcgcggcaaagccgtgaatggaggccatttcgcgccgggcggcggcgctgagtttttggcaggccgcctgccagagactttcgtcgcgcaggtacagttcccccagcgcgtagcgcaacatgcacaggttggccgagtgcgcgaaggcggaggaacccagggaacggcaggcgtaataggccaccaggttcgcttccagctcgcccgccacgccgcgcgcgtgcgccaattcgtggcaggcggtgaagggaagcgtccaggcgggttcgccggggttgagcagggcttccgccgtccagggcaaatagatgcccgcgatggaaagcgcccgcatccattcgggaaaccgcgcgagcttgccaccgccgcccatcaacgcgttggcttcgcgcagcgtttccgcgggggtgggcgcgggaaattgcccggccagcgcgttcacctgcccggtcaaatcgtcgatcagcgccaccagcgcgccatcgtcgtattccggcgcttcggcccgcggcagcgcgtatagcggcatccacaagacggcatagcagaaatataggaaagaaagcgcgagcgccaagccgctggcccagcggcccaccctacgctggcgcagcgcgccaaacaggctatacgcggcaaaggccagcagcaaaaccgcggccaactcgcccacgggcagcggcgcgcgcgcaaaagcgcgccccatggccgggagcacatagaggcgcaacaggcccgtgagatggcgggaaaacggcgcgcacagccgcgcggccagggcaatgccccatccgccgctcgcaaaccccagcgcccaccacaaccgcttccgcacgcgaaacacctcgacacaaaaaagttccctataaattattgcatattactcgccacattttcaatggaaatcctttcatcgcggcgcgctggcagtcttttggatttaacgcagggagagtatactataaaaaaacgatctggaagggtggatgcgcaatgaatcggattcgattggacgcaaaccgcatgatggcggatatgttgggcgataagggcatttcccgcgcggaactggccgacatggccgcaaaggccaaggatgcctacgcgcaggtggaagcgaaccgcggcaagggcatgcagggctggatggatttgccgtataaccagggggacgtggtggagcgcatcgaagccacggccaagcgcgtggcacaggaattcgaggcgtttgtggtgctgggcattggcggcagcgcgctcggcccgctggcggtgcagcaggcgctcaaccatctgcgttacaacgaattgcccgcgggcaagcgccccggcccgcgcctgtacgtggaggacaacatcgatcccgagcgcatggcttcgctgctggatgtgatcgacctcaaaaagacgtgcttcaacgtcatcaccaaatccggcggcacggcagaaaccatgagccagtacctgatcattctcgacgcgctcaaaaaggctgtgggcgaggattacaagcgccatatcatcgtcaccacttcggaaaagaagggctttttgatcaagatcgcccagcgcgaaggctatgaaaccttctacattcccgacggcgtgggcggccgcttctccgagctgtgcccggtgggcctgctggcggcggcggtcacggggatcgatatccgcggcctgctcgcgggcgcgaaggacatggacgcgcgctgcggcagcgcggatctgttcgaaaacgtcgccctgttcgaagcggcgctgatgtacattgccatgcaaaagggcgcgaacatctctgtgatgatgccctacgcggattcgctcaagctgatgagcgactggtacgcccagttgtgggcggagagcctgggcaagaatgtcacgctttccggcaagcccgtgaacgtgggccaaaccccggtgaagaccttgggcgtgaccgaccagcactcccagctgcaactgtataccgagggcccgttcgataaggtggtcaccttcctgaaggtggagaacttccgcgccgaaacccccattccccacggctgcgacgacatccccaccatcgccttcctgggcggcaagagccacaaccagttgatcgaggccgagcgccggggcacggaatacgccctcctgcgcgcgggccgcatgagccagaccatcaccctgcccgccgtgaacgcggaaaccgtgggccaactcttgtatttcttcgaattggtcacggcctacaccggcgcgatgctcgaaatcgacgccttcaaccagccgggcgtggaagaatccaaaatcgcggcctacgcggtgatgggctacgatagcgaaatccacaccgccaagcgcgaagaaatgcgcgcctgccccgaaggaaagcccgaatacgtgttttaattctggcctttgatggccgcaaagccctttgtcccgcgtggcaaggggctttggcatttttggcgttaaagccttgcggcggccgcggttttgcggtacaatagaatcgcagataagaagcaaaccgccaagaaggaggttgcgcagatggaaaacaagaagctgccggtgggc

SEQ ID NO: 278 - DNA, 26532 bp, Unknown
  16S sequences of unknown bacteria
ggggcacgactgtgtcatcggccccaatacttatttggaaaatgcgatcatcggcaacgcgacccgggtcaatgcgtcccaggtcctggattcgacgatcggcagcgacgcgaagatcggcccattctcttacatccgggcggacagtgtgctggaaaaccgggcccaggctgggagcttcacggagctcaagggcagccatctgggcgagggcagtcgcgtcgcgcagctggcctatctcggcgatacggacgccgggcgcggcgtgcaattcggtgcggcgtcggtgacggcgaattttgaccgccgcgcgacccaccggacaagaattgaagacgatgcctttgtcggcagcggcgcaagcctggtcgcgccggtagagattggccgcggcacctatattgccgccgggacgacggtgacggaggacgtcccgtcccaggctctggccattggccgggcccgccagaccaacaaaaaagattgggccggcaaaaacaaacggtgaaaggaccggcctgtccggttttatttcgcaagcaaatgaatataatgagaacagagaggtaacatcatgattgcacacggtaaggaaatcaaggttttctgcggcaacgcgaatcgcaaatttgcggagggcgtctgcgcggaattgggcatcaacctgggcgacagcgaggtaaagtctttctctgacggtgaaatttccgtttctgtgaacgaaacagtccgcggctgcgatgtctttgtcgtgcagtccacctgcacaccggtcaacgacaatctgatggaactgctgattatgatcgacgcattccgccgggcgtccgccgggcggatcacggcagtgatcccctatttcgggtatgcgcgtcaggatcggaaagccaagggccgcgacccgatttctgcgaagctggtcgccaacatgatcgtcgccgccggcgctgaccgcgtcctgacgatggacctgcacgcagcgcagatccagggcttcttcgacatcccggtcgataacatgctgggcaacccgatttttgtcaagtactatgccaataagtttgacgaagcggtctataaccatgacgatttcgtcgtcgtttcgccggacgtcggctctgtcgctcgggcgcgtgcttttgcggcaaagctgcatatgggcctggccatcgtcgataagcgccgccagaaggccaatttctgcgaggtcatgaacatcatcggcgatgtcagcggcaagacctgcatcctctttgacgatatggtcgataccgccggttccctgtgcaacgcggcagcggccctgcaggacaatggtgcgaaggccgtctttgcctgcgcttcccacggcgtcctctctggcccggcaatccagcgcgttcaggatagctgcattgaagagctgatgctgctcaacaccatcccgctgcccgcaggcggcgcaggcccgaagatccgccagctggatgtttcgccgctgtttgcaaaggcgatcacgcggatctatcaggagacatcgatctccagcctgttctaagcatgctgtttcgaaaatcttccgtagactatatgctggtaggcctgggaaatcccgggcctacctatgcgcgtacccggcataatgtcggcttccgctgcatcgacacgctggcagcggccgagcatgtgacggtggaccgcctcaagcaccaggcgctgacatgcctcacaacgatcgcggagcgccgggtcctgctcgtcaagccaatgacgtatatgaatctctctgggcaggccgtgcggccgctggcggattactacaagatcccgccggagcggatcattgtcatgttcgacgatatttctttgccggtcggccgcctgcgggtgcgggcggagggcagcgccggtgggcacaatgggctcaagtccatcgtgcaggagctacagagccaggccttcccccgggtcaaggtgggggttgggcaaaagccgcatccggactacgacctggccgattgggtcctctcaacattttccgcgcaggaggagaagatgctggtgccggtcatcacctgggcggggcaggctgcgctggagatcatgcagcatggctgccaggcggcggcaaatctttttaatgggaaaacacaataagcgctgcggcgcaaaagaacgaacggaaagggagccggctccctttccgcgttgttatgttaatgggaagggaggtctgcgcggtggatctattgttagaggttttaaacgggctgccggaatatcagagcctggtggattgctgccggaggaatcaaacggtggctgtgaccggcgcggcgcagatcaaccggtcacacctgatcgcggcgttggcccggcagctggaccggccggttgtcatcgtctgccaggatgatatggcggcggcccggacggcggcagagctgcaggcgtttttaggaggcccggtggaaacgctgccgacccgggacctaaccctctatgatgcgacggtcgtctcccggcagtgggagcagcagcggctgcggcagctctacgacctggcccaggggcgtacccgtgtgcagatcatgtcggcagaagcggcggtgctgcggacggtcccccaggcccagctgcaggcggcagccattactctgcactgcggtatgcagcttgaaccggcggcactggcccggcggctgttggccagtggatatacccggggcagcctggtcgagggtgtcgggcaatttgccatgcgcggcggcatcgtggacgtcttttctccggccagagacgcgccggtccggatcgaatttttcggcgacgaagtggataccatgggccaattcgatgcgcagacccagcggcggacggagaatctggaggcactgacgatcctgccagtggctgaatgcctgccgcagctgcaccccggcggtatcgcggggttgtgtgcagatttagaagcgctgatcgcccggcagcagcgccggcgtcatcccaatgaagcgctgctgcagactctgcggcaggacagagagcgcctggaaaacggtgaggatctcccggcggcggaccgttatatggcgctgatctacccggcgcttgctacagcgttggattatgcgccggaggacgcgattgtcctgctgtgcgaccacggaaatatccgccgggccatccggcagcagcaggaccagatgggtcaactgctggacggcctgctggagacggggcagttggccggggagctctgcgatttttacagtccctgggagcagctgtgccaaagcctggccccgcggcagacggtctatctggatgccttcctggcggccagttacccagaacagcccgcgccccagaagctgctgacaatcaatgccaagcagttgccctgctacggcggcagcgtggagactgcggcagcggacctggcgttttaccgcaaggagcgatatgcttgcctggtcctgtgcggcaaccgccgccggggcgagatcctgcacgagatgctgcgggagcgggagatcccggccatcctggccttcccactgacacaactgccccccgctgggacgatctatctgacagacggcaccctgcccgcgggcatggaatacccggcgttgcacctggcggtgctttcagaagggcagctgctgcagaagaaaccggccaggcggccaaaggcacccgtcaaggcgtccaaccggcagaagctgcgctcgtttacggacctgacgccgggcgacctcgttgtccatacctatcacggcattggccgttatgagggaatggagcagatgaagctggacggtgtggtaaaggattatatcaagatctcttaccaggggacagatgtgctctatgtcccggcgacgcagctggatctggtctccaaatacatcggcgccggggaaaacggcgcggtgcggctgaacaagctgggcacggacgcttgggagaagacgaaggccaaagccaaaaaatcggccaaggatatggcggcgaagctgatcaagctctacgccgagcgcaaacgccgcccgggctatgccttttcgccggatacgccctggcaggcggagtttgaggagaactttgcctatgtggagacggacgatcagctgcgctgcatcgccgagatcaagcaggatatgcagcagtccacgccgatggaccggcttctgtgcggcgacatcggctttggtaagacagaggtcgcgctgcgggcggcgatgaaggcgattttggacagcaagcaggtggccatcctggtcccgacgacggtcctggcccggcagcattatctgacggcaaagcagcggtttgccgggttcccggtcaatatcgagagcttcagccggtttagtacagcggcgcagcagcggcagacgatcgccgggttgcgcagcggcgcggtggatcttgtagtcgggacgcataagctgctgcaaaaggagatcgaattcaaaaacctgggcctactcatcgtggatgaggagcagcgcttcggcgtgacccataaggagcggctcaaggagatgagcgccggggtggatgtgctgacgctgtctgccacgcccattccccggacgctgaatatggccctgtccggcctgcgggatatgtcgaccatcgagcagccgccccaggaccggtacccggtgcagacctatgtgatggagtatgcccagccagtgctggacgaggcgatgcggcgggagctggcccggggcgggcaggtatattatctgcacaatcgggtcgagagcatcgagcagacggcggcgggcatcaagcgccgcatcccggaggcggaggtcgctgtgggacacggaaaaatgacccaggagcagctctccgatgttatgcagcgcatggccgatggcgatgtgcagatcttggtctgcacgacgatcattgagacgggcattgatatacccaatgtcaacaccttgatcattgaggacgccgatcatttcggcctggcccagctgcatcagctgcggggccgcgtgggccgcagcagccgccacgcctttgcttatctgaccttccgccggggcaagaccctctcggaggtggcggaaaagcgcctgacggccattcgggattttgccgcctttggctccggctttaagatcgccatgcgggatctagagatccgcggcgcgggcaatctcctaggcgcggagcaatccggccatatgatgaccgtgggttacgatatgtacctgcagctgctggaggatgccgtcctggaagagcagggcgaggagagaaagaaggagccggtctgtacggcggacctggcggtgacggcgaatatcgctgaggcgtacgtccccgacggcgagcagcggatggacctgtaccgccggatggcggcggtccgcagtcgggccgatgccgacgatctgcttgatgagatcgtcgaccgctatggtgacccgcccaagggcgtgatgaatctgctggcggtggcgctgctgcgggccagagccgcggcggcaggcgtcgcggatatctcgcaaaagggcgcggagctgctctttaccatggcggaatttgactttgccgccgtctcagatctcagcgcggagccggcctggaagggccgggtgcggatgctgcctaaggcggagaagccgatcctcgccgtgcgcctggcaaaggcggagcagccgctgcgtcttgcggagcaatttgtcgatgcctaccggcagcgccatgcgggcataacttaaaaaaatcctaagatttttagattgggattgcatttttgggaaggcatctactataataaatagcgatagatgcagtagaagcgcgccgatgggcgtcgatttagtgaggcagagggggaactcaaaattaaaaagaagaaaaatgcagccgccccggcagggcagagcattgcagagaaaaaggctgcgcagaaaaacaccgggtatgaccgtggcgcggtagaaaaggaaatgtatcgccagtatggcgtggagcgggacgcgcccaccggcagtttgccgtcgcatgacgtgcaggaccagctggtcaatgcaatcctagacgaagagctgggcagagaccgcctggacgaggccccggcgcaggaaactacatcggagcctgctctgcagcccgatgcggcgctgccgccggaggatggggcgcaggacccggcggatctgtcgtcccagccgaaaaagcggggcaagcggattgccatcatcgcggggattgtcgtcgcggtgctggcgctggcctacggcgcgctggcactgctggactctggccggattttggaaaatgtcgtcgtcgcaggcgtcgatgtcggtggaatgcgcaaggcggaggccattacagcggtggacgctgtcgcggcggcgtatgagcagaatacgatgacgctacatttttccgacggcgacgagcgcatcacgccgcagcagagcaagctgcagctggatgtcaagggcgcagcgggcgcggcgtaccgctatggccgggtcctgggggtttctatccccggcgtgacgaaggccccggcgaaaaagacggcggtggatgtggaaaaatatctctcgctggatgaggatgccatcaagacgctgctgcaaaaacgggcgaaggcggcggagagcaagctctcccagcccacggtcgaagtgaagcctatggacgaagccccggccagcgacgatgtgcagacgtcggacacgtcgtcagatgcctcagaagacacgccggaggccagcgcggacgccgggaccggcaaagcaccgcagctgatgacaatcaccctgggcacggcggatcgccgcttggatgtcgatgcggcctaccggcagattttagaggcctacggcgtcaatgattttaacgatgtgaccatcgactatgacgagaccctgccggagcaggttgacgtgcaggcactgtacgatcagtactgcaccccggcggcggatgcctattatgataccgagacctacagcatcgtcccggaggttctgggctatggctttgacctggacgaggtgacaaagcaggtagccgaggccgaagagggcgccattctgctgatcgaattgaaggatatgcccccggagatgacggaggagaagctgaaggagtccctgttctcggacgacctgagctcctatgatagcccgcatacggcgatcccggctcggacgaaaaacctggagctggcctgcgcggccatcgacgggacaattttgaatcccggtgatgtcttctcgtttaacgacgtggtcggcgagcggaccagcgaaaagggctatcagcccgcggccatttactccagcggtacgacgacgaatgaggtcggcggtggagtctgtcaggtggcgtcgacgatctatatgtgtgcgctgaaggcggatttggagatcgtcgagcgggcgtgccaccagtttacggtgacatatgtccccatggggatggacgcgacggtctactggggctatcaggatttcaaattccggaataacacggaataccccatccgggtggacgccagcgtctcaggcgggtatgtgcacatcaagctctgcgggacggagacaaaggattacaccatcgagatgacctatgagatcctctcgaccagcagcccgacgacgatcgagcgtgtcattactgacggcagctatgccaacggcgaggtgatccaggcaccgcatacgggctatcgggtcgtttcctataagcataagattggcgcggatggcaaggaaatctcctgcgacgtcgaggcatacagcacgtatattaagacggaccgcatcattgccgtcgtccagcggcccagtacaccgagtactcccagcgccccggatacgccgagtacgccagatacgccgagcacacccaatacccctggtgattcgggaggcggcgattccggtggcacgccccccggcggagacgccggaggcggaacaacgcccggcggtgattctggcggcggcacgccccctggcggcgacaccggcgcataacgaggcgaatacacgagaaaaacgctgccgcactccaaagcggcagcgttttatagggctgaaaaagcaaaagcagcgtggcttggagagaaatccaagccgcgctgctttttaatactgggctcagcagtcgtcgtagtcggcaaactcttgctcaatctcgctgcggcgccagggcattttctgaatcagctcgtctttggagggaagcttgcttttcatttcgctgcaggggcaaagtgccaccagcttatcccaaaagacacccagcagacacagggcaccggcaattgcggcgatggctgctgccagagataccaaaacttttgcggtctttttcatggttgattcctcctgttgcttgaaatttgctgctgctttcgcttagacgcgtacgataaaatcagccttgcggggctttgcctccgggtcttgtgccggatagcccaggatgcaatgggccacggcggcataattttcgctgatgccccactttttcagcagggccttgccttcgtccgtgacgaagacctttttggcccggtggatccagcaggagccgacgcccaagctgtgggccgcggccatcaggttacccataatgagggagccgtcctccagataggtggggatgctcgtatcggccaggacgacgcagaccatcggcgcgccgtagaacggcttggcgtccggcttgcccattgccgcagcattgagccgctccagcagtgtcagggttggcttgtcttgtacgacgacaattttgccgctctgggcgcccttgccgcaggcggcgtaggtcccggcttccaggatctgagccaggtcctcttcccggacctgctccggcagataggcccggatgcttctgcgtgcgatcagtgttttgataaaatcattcatcttttgaaaacccctttccaacgtgtatagattaccagtttaaacatagccatagatgccgcggaccgagacctcaccgcaggagacagcctcctcggtgccgtctgggtaggcgacaagcagcgctgcttgctcattcaggccaacggcgtgcccgacgcgggcctgcgcgccctggatgatccggacgtccttgccgatcgtgatacagtcgtgggtgtactgctccagccacggccactgaccgtcgtccggcaggtgctgggcgaggttgcacaacgaggcaatctgcgctgcggcgaccaggttgcggtttaccgtgtggcccagggccatggacagagagatggcggttttctgcagctccggggggaaatcctccggccgctgattgcagttcatgccgatgccgaccacggcgtactgcaccaggccgctctcggcttccacggagagctccgtgagaatgccgcagatttttcgtttttggaacagcaggtcattggcccatttgatctgaggccgcagctggcaggcctgctcgaccgcctcacagacggcttcggcgatcattgccgtcagggtcatgagctgctccggctttgcattgggccggagaatgacagacagatatgtgccgagccctgccggagattggaagctacggcccaaccggccacggccgccggtctggtggtcggcgacgatggtcgtccctgccggggcgccctgggcggccagccgcttcgccacagtattggtggagtcgacacagtcgaagacttggatccggtcccgccaggggaagtcggccggcagagcggccaaaagctccgcactgcacagcgcaggcgtcgcctggactaagcgatagccccggcgggtgacggagtcgataatatagccgtcctgccgcagcgattccaccgctttccagacagcggtgcgagagacgccgcagcggtggctgatctcctgcccggagagatatccgttggcgccgcgcaaatattctagtaccttttgctttaacattttctcacattcctcttgctttttgcggggtgatctggtatactcctaacgtcaactaagcggattacaattggttaacaaaaggaggaacaccaaatgcgcacgcgtaaaattatattaaccggtctgtttgctgcgctcacagcgatcggtgcatttatcaggatcccgacgccaatctcgtcgtttaccctgcaggtctttttcacctgtatggcgggcctactgctggggccggggctgggcgctgccagccaggcggtctatgttctgctgggcttggtgggcctgccgatctttacgcaaggcggcggcttttcctatgtcacgcagacgacattcggcttcctgctggggctgatcccggcggcttgggtcgctgggatgattgcgcggcgcggcgcagcgtcattctggcggctgctgctggcctgcctggccgggacggcggcggtttatgtcattggcctgccgtatatgcactgcatcctgcggttctatctgaataaaacctggagcattcagcagactgtgatgggcggcatggtcattttcctgccctgggatgtgctaaaggccatcgtggcgagcctacttgccaagaagctgctgccgaccttgcataaggtaggcttgcaatactaattccaatttaccacaaaattgaagatcttgcaatatttttctggattgcaagtttttgcccggcgtgctatgataacaattgaagtgacaaatcatgcggcggcatgaccgctgggaggtacttgttatgaatattcgcgcatatttcccgctcaaccgcagaatcttcccgggcgatactggggcgctgatcgtgacgatcgtgctgtacctggtcatctgcggggtggcaggggtgctgcgctgggtcgtcggttggctgccggtcgtcggttgggtcatccggatcctctgctggctcattggcgtctactgcctggccgggatcgtgctggcgatcgtggattgcgtccggcaataacacgtctgggcattggcaagaaaaatggggaggcccgcggcaagcttacacggctgccgcgggccttctgcatcttgcagcggcgcagcagatggaatgggcacgcttactgcgttttgcccgcggcgtccatcaaaacgaggtccagctcgtaggaaacgccgctgcggtaaatgcgcagctggacggtatcgcctgcctgacactggtttttgaccgcgttaagatcgtccatcgaggtaacgcttgtgccattgaaggcggtgatgatatcgccgggctgcaggccgcgggcataagcgtcagaggctttgtcgatgctgcggatatagacgcctgcgggcagccggtaatacgcccgcgctgtcatcggtacggtctcgccggtgatgccgatggcaggccgcccggcgacatagccgctggagagcagctcatcgacgatgcgcttggccgtcgagatcggaatggcaaagcccaacccctcgaccgccgtggcggaataggtggcggagagcttcatggtattgatgccgatgacctgcccctgcatattgatgagcgggccgccggaattgccggagttcagcgctgcgtttgtctgcagcagtgtcagggtgcggccgtcaaaggccaggtccctgttgatggcggagatgatgccgtcggtcatcgtcccccgtagctgggtgcccaaagggtcgccgatggcgacgacagcgtcgccgacctgcagcgcgtcggaatcaccaaattctgccggggtcaagccgtcggcgtcgatttttaggacggccaggtcgctggtctcgtcgctgccgatgacggcggcctggtagctgtcgtcgttctgtagcaggacctgcggcgtgtcgccgtcttcaatgacgtggcagtttgtaataatatacccgtccgcagtcatgatgatccccgtgccggtgacctcgccgctggaggtctggctggtgatggagacgacgctggggatgatcttggcatagatctgctgcagggttagcgcctgggtgtcgtccgcgccgctaatctgcaggctgacgccgtcggtcgtgccagtggcagccggggccgggacggccagggcgctctgcgtctcatccggactgatgctgtcggcggagctggtcgattttttctcgccgctgccgatctgcaggacgatttgaccgtcatcgcgtttgatctgcacccggaggttcatcaaaagcgagagtaccgcgcacagcaggatcatcagcagtgccagcaggacaaaaagcccctgccgctgatgcgctgcgggcttgaccgtgccggtgcagtaatagccgaagatcgggtcctgggtactgcgctcggatgggtcctctgtcgaaggcgcatcaggatgcgcgtctggctgcggtggcgctgcattgtgtttcaattcatcccaactcatacaaaaatgcctcgcttttgctgctgcccggcggtcagctgacgaccaccggcagggagaacgtgaagacagtcagcccatcgcggctggtcacactgatgtcctccccgtgggagcagataatggtttttacgatataaagcccgagcccgacgccgtcacggtcgatgctgcggcttttgtctgtcttatggaaacggtcgaagatccgcgacagctcattttccggaatggtcaggccggtgttggagacactgacaaagatcttcttatcctccggctggatcttgagccccagggtgccgccctgctggcagaatttgacagcattgtccatcaggttgtagatgacctgggtgatggaatcggcgtcggccaaggtgtaggtcgcctcgtccggcatatccacctgcacgtccagctgcttctgggtgatcttctgctcaaaggagactagcacctgccccgcggcctcgcagaggtcgaagacggtctttttctcctccgggatcgtctgatcctgcaggcgggagatatccagcatcccccggaccatccgggacagacggcggacttcgtccgagacgatctgcatgtaatggcggtgctgctccggcgggatcgtgccatccagcatgccatccataaacccggcgatggtcgtcatcggcgttttgagctcgtggctgacattggcgatgaattccttgcgctgctgctcggatttttccagggagtcggccatgttgttaaaggcgacggccaactcttcgatctccgccggattatgctcatccagctcgacccgggcgtccagattgccgtgcccgaagcgccgggcggcgccggccaggtccttcagcggctgactcgtccgccgcatcagcgcagaacaggcgatgaccgccagcagcaggacgacggcaccggtcattaggaaaatatccgtcatctggcggatcacaccgacaacctgggtctgcccggtcgaggcgatgacaatgccgctggccacaccgtcagcctggctgataatggggatggagacgacagagcggctgtcgtcatacagcccttggaggatcccggcgtccgctgtcttgccctcttggatcacttgatcgacaaaggcttggggtacctgcaggcccaaatgctcacagcgaaactcactgcaggagcagagaatgacgacaccggtctcatcgcagatgacggtgtccgtcccggcggcttcggcggcgaaggagaggttgatgtgaaattcccagttgttttccaggtccccaatggattcatacgccgaggcaagctctgccacggcttccgcgctctggtagagggatttttggctctccgactgcacgtatttttgaataaagacccggaagctggcgcctaagatcaaaatgctgcacaggatgcaggcggctgtcagcaggaattggcggccaaacatggttttcatttctgcacgacctcaaacttatagccgacgccccagactgtcttcaggcaccattggtccgagacaccctccagcttttcccgcagacgcttgatatgtacgtccacggtgcgggagtcgccaaaatagtcaaagccccagacctcatcgagcagctgattgcgggtgtagacccggttcggcgcggaggccagatggtacaaaagctccatctccttggggggcgtgtcgatcttcttgccgtcgactgtcagctcaaaggcgtccatgtcgatgacgagcttgtcaaaggtcagccggtgggatttttgttccacctcgacgccgctgcggcgcagtacggcttcgatccgggccaggacctccttggcctcgaacggcttggtgatatagtcatccgcacccattttcaggccagagaccttatccgccgtctcgcccttggcggtgagcatgatgaccgggcagtcggactcggcgcggatactgcgcagcacgccccagccatccagcaccgggagcatcaggtccagcaggaccagatccggcttgacctgccggaacagctccacacccttgccgccgtcgggcgccatgtggacggtgtagccgtccttttccaggtaaagccgcagcagatcggcaatattaaaatcgtcctcgacgatgagaatcgtttttgccatggtttccatccctttccgtggtatctctttctacgatataatacctatattatatacatgccggggctgtatgcgtgaacaatttgtaaaattcaaagtatttttcgccctgcgtggaataattgcaaagaaaatcttgcagttttccggcaaatatgctatatttctaatttgatagactggctgaaagaagggagcgcaccatatggcgcagcaagataaaatcagaaatatcgcgatcatcgcccacgttgaccacggcaagacgaccctggtcgatgagatgctcaagcagggcggtatttaccgcgaaaaccaggccgtggtcgaccgggtcatggactccggcgatctggagcgggagcgcggcatcacgatcctggcgaaaaatacctccgtccgctataagggctataagatcaatatcgttgacaccccgggccatgcggattttggcggcgaggttgagcgaattttaaagatggtcaacggcgttttgctgctggtagacgccgccgagggccccatgccgcagacccggttcgtgctgcagaaggcgctggagctggggcacaaggtcatcgttgtcgtcaacaagatcgaccggctggatgcccgcatcgaagaggtcatggacgaggtcctggagctgctgctggatctggatgcaacggaggagcagttcgactccccaacactgttttgttccgcccgccagggcatcgcgtcttacggcccaacggacatcggcatcgacctgacgccgctgtttgaaacgatcgtcaactatatcccggcccccaccggcgactgcaacgcgccgctgcagatgctggtctcgtccatcgactataacgaatatgtcggccggatcggcatcggccgcatcgagcggggcacaatccgccagaatcaggagatcaccatctgcgactatcacgacccggagatgatggaaaagggcaagatcgtcgcactgtatacatttgaaggcctgaaccgcacgccggtgcaggaggcttccgccggggaaatcgtcgcattttccggtatttcggatctgaccatcggccgcacgatctgtgcccccggagaagcggagccgctgccgttcgtcaagatctccgatccgacgatcgagatgacattctccatcaacgacagcccgtttgccgggcgggagggcaaatatgtcacctcccgcaacctgcgtgaccggctggaccgggagcttttgaaggacgtctccctgcatgtgacggagcaggggacagacgcgttcaatgtcgcaggccgcggcgagatgcatctttctatcctgattgagacgatgcgccgggaaggctacgaattccaggtctcgacgccccgtgtgctgacgaaggtcatcgacggcgtgcgctgtgagccagtcgagcggatggtcgcggatgttcccgaggcgtccgtgggcgcggtcattgagaagatcggccagcgcaagggcgaccttgtctccatgacgccggtgggcagccgctaccggctggaattcctggttccctcccggggcctgttcggctatcggaatgaatttttgacggatacccggggcgagggcattatgtcctccgtgctggattcctactgccccatgaagggcgagatcgcccgccggagcaccggctcccttatcgcctttgagacgggcgaggcgacggcctacggcatcggcggcgtgcaggaccgcggcgcgatgtttattgcccccggcgccccggtctacgccgggatgatcgtcggctcctgcaaccggaacgaggatatggctgtcaatgtctgcaagaaaaagcagctgacgaatatgcgggcagccggcagcgacgaggctgtgcggctggtgccgccgcgggtgctctccctagagcagtgcttggaatatctggcagatgacgagttgctggaggtcacgccgcagaacctgcggatgcgcaagcagattctggaccactccgtccggatgcgccaggtcatgaaaaatcgccagagcgggaaataaaaacgagggcttgctgcgttttcttgcagcaagcccatcctgcgttttgaagtgccgcaaaagcacgcccgactgcgtgggacagccccatattttatagcatctctggggtgacgtcgcccttttgcagcagaatgctggcatagggggcaagctccccagtggcgacgacggcataggcccgggtggccatggtatagaatttatagcggtcggtccagtcgatggcggcggcgccccgggcgtcatatttggcgacgatggccttgtagtcctcccagagggggacgggcagatctccgtcagcgcttgtccgttcgaccaactgcaccgggttcgggacgttttcatccaacggcagcagcttgaggattccctccagcagcggcagcgtcccgacaccgtcggcccggaggagaatcgtctccttggcgcaggcggctgccgggaaatttgccccagccaggaccaaggtatctccgcagcccatctcactgaggacctgcaagagcgcggggctgatgcaggccgcgattccttttagcatagcgtatcgctcctttcttgcggccatcgtaacacggattgcaccccgccgcaagcataattcacgccgcggcaaaaaagaagtgcgaatccctaggaaaatcccgggagaaaggatttacaaacggaaaaaaatgtgctaaggttatataaataataaataaaaatgaatcgaataccagtgcggctgcacctgtattttctgcctgcgcaggataagcccaggcagcgccgaatcccatggaaagtaggtggaatgatttggaaaaacaagaattgatgatccgcaactgcgtgctgacagctttggcccggcaggcggtgcggtttgtgcctgtgggtatctccgcgcggcacgtgcatttgtcccaggcggacctgcaggtgctcttcggcagcggccacgcgctgcagccgaagaaggagctgagtcagcctggccagtttgccgccgaggagcaggtgactgtcgtcggccccaaggggaagctggagcgggtccgggtccttggcccggtccgcagcgcgacccaggtggaacttgcgatgacagacgccatgaagctgggtatcaaagcgccggtgcgcatgtccggcgatctggcgggctcaccggggtgcaagctcatcggcccggccggggaactggagctttcccagggcgtcatcgtcgcggcccggcatatccatatggccggggaccaggcggaggcctatggcctgcacgacggcgaccgggtctcagtgcgcgtccagtcggcccggccctgcgtttggggcgatgtcatcattcgcgcagggaaggggcacgaccttgaaatgcacattgatacggacgaagccaacagcgcgctgctttccaacggcgcttatgtagaattagtggcagatacggcggcatgtcaggctccggcagcgcctgcggtgcaggcggcgccgtcggtctcggccattgcccaggcggcagcagcgtcctttgcggcggcggcatcggccgtcccggcgtccacggtgctagatctggtgacagagcaggacgtgaatgacgccatccgcgccaatcaggcggagctgctgtgcacccagcgggcgattatcaccccggctgcggcggaccgctctgcggcgactgggctgcagatccgccgggtataggaggctttatgcagatagcaagagtaattggcaacgtggtcagcaccagcaagtccgaaaagctggatgggctgaagcttttgatcgtcaagcccattgacctggatacgttccaggaaaagggcgcgcccatcgtcagcatcgacaccgtcggcgcgggcgagggggagattgtcatgatcgtcagcggttcgtcctcccggcagaccacgctgacagacggcaagccggcggacaacgccattatcgcaatcatcgaccacattgatatccatcacaagagaatttttaccaaagatggtggtgcagacaatggaactaattgagaaaatcagcgcggcgggcgtcgttggcgctggcggcgcagggtttccgacccatgtgaagctgaagtgtcaggcggagcattttatcgtcaacggcatcgagtgtgagccgctgctgcggacggaccggcatacaatggagcgccatgcgccggagatcgtcgagacggtccagatcatccagaagcatctgggcgctgcaaaagcgaccatcgcgctgaagcggcattatcacgaggcggccaaggctatttccgacgccgctgccgggacgggcgtggaggtctatctctccgaatcgttctatccggcgggcgacgagcagaacctggtctactgcattacgggcaagacggtccccaccggcggcatcccgctggatgtgggttgtgtggtcagcaatgtcagcaccgtcctcaatattcataacgccctgcagggcaagccggtgacccacaagctggtgacgatcgccggtgcggtggcgcacccgatcacagtggaagcgcccatcggcgcgccgctggccctgctgctggaggcggcgggcggcacgacctgcgactgccagtttatcgtcggcggccccctgatgggcaagctgacggacgatctttcccagcctgtgacgaaaacgaccggcggcctgcttgccattccgaagggccacccgctgctgcagaaaaagacaccgagccccgcccgggaccaggtgcttgccagagcggtctgctgccagtgctccatgtgcacgcagatgtgtccccggaacgccatgggcctgcatgtggagccccataaggccatgcgggcgctggcatcgggcaatgatgcgctgctgggcgatcacaacggcatcttcagctgctgcgactgcggcatttgtacgtactacgcctgcaacttcggcctgaagccgtccgttgcaatgcagcaggcaaagggccgcctgcagcgccagggcattaagccgcgcaaagaagtcaaatatgccccggatggcggcattgaaaacaagcgggtgccgacggaacggatgctcctgcggctggacctgaagcaatttgacggtgacgcacccatgggcccggccatcacggcggacgcggtgcgcatcccgctgaaaatgcacatcggtgcgcccaacaagcccgtcgtacagcaaggcgaccgggtcacctgcgggcagctgatctctgagccgacaggcctcggcgcaagaattcacgcttcgatcgacggcgtcgtggcggcagtcacggcggattacattgagataaggaagtgacaccatgagcgcaattggcatgaacgaatttatgagcattcccaccgggatgttcgcctgcgacgcaatgctgaaagcggcggacgtggagctggtcagcgcgggctgtgtctgcgccgggaaatattatatcgtcgtcaccggtgatgtggcagcagtccgctcggcggtcgaggccgggaaggcggacagtgaaagctatctcgttgacagcttggtgatccccaatgtggattcgcaggtcgccccggcgatctgtgcctgcacgtccgtggagcaactcaatgctctgggcattatggagtgctactccctatgcgctgccattcacgcggcggatgccgcagctaaggcagcggatgtcacgctgctggaggtccggcttggccggggcttgggcggcaagtcctttgttttgctgaccggcgaggtggccgctgtcgaggcgtccatccgtgctgcagaggcgttggaggagacacagggcctgatggcccgcagctgcgtcattccttcaccgcatccggatatgctgaaggccatcggctgaggcgatccccccattcatttgtcaatccatacacgttgtttttaggaggaaccaattatgaaagaagcactcggaatggtagagaccagaggcctgatcggggccattgaagcagccgactccatggtcaaggcggcaaacgtccatctgatcggcaagcagcagatcggcagcggtcttgtgaccgtgatggtccgcggtgatgtcggtgcagtcaaggcggcggtcgacgcaggcgcggcggcagctaagcgtgtaggcgagctgtatggcgtgcatgtcattccgcgtccgcatagcgacgttgaattcatcctgcccagcatcgaggcgcaggcgtaatgtaccggggcatcgtggccggcacggtcgtcgcgacggtcaaggaatcccatctggaaggggtcccgctgctggtcgtccggaagatcgaaaacggagtggaaaaggggctgatcgtggccgctgaccacacacgccaggcgggctatggcgatgaggtctatctcatcggctccaaagaggccgcccggatcttccggcaggatctgctgccggccgatgccgccattgtcggatttatcgacacctataacgaagaaatctaagaaagggggtgccgccggtgcgcttggcacgtgtggtggggaatgtcgtctccaccgtcaaggatccgtgttataccggctataagctgatgctggtcgaatatctggacccggatacccgccagccggacggcgcccgccaaatcgtgttcgactgtgtggatgccggggtcggcgatattgtcttggtcaatattgacggcggcgcggccaacatgctgctgaacgacaaagtctgcatcgccgatcagacgatctgcgggatcatcgacagctacaccagtcacggtgagcagacatttgcgccgttttcggactaagcccggttccgggccgcggcgcggcgatatcgcataccggggctgccccaggcggccccggggcaaacgcatttttgcggaggttcattacatatggaattcgacagagacttacaatcaattcaggaagtcagaaacctgattaccaatgcgaaaaaagcgcaggaagcctatgcctcgtttacccaggcgcaggtggatcacatcgtagaagagattgccaaggccggcgcggcccatgccgaagagctggccaaaatggcggttgatgagacaggcttcggcgtctggcaggataagatacttaagaacctgctaggcagcaccatgacctatgactcgattaaagatatgaagaccgttggcatcatccgagatgacccggcggcgggtattttcgaagtggccgttcccatgggcgtcgtggcggcgctgatcccctcgacgaacccgacctcgacggtcctgtataagagcatcatctccctgaaggcgggaaatgccatcgtcatcagcccgcaccccaatgcgaagaagagcattctgcgcacggtggagatcgtcaaggacgctgcccgccgggcgggtgcgccggagaatctggtgcagtgcattactatcccctccatggaagggacgagcgcgctgctgaaggatcgccggatcggcatcattctggccaccggcggcgaggcgatggtccgggcggcctattcttccggcaacccggccttgggtgtcggccccggcaacggcccggcctttattgaaaaatccgccaatatcccactggctgtcaagcgcatcttcgacagcaagacgtttgacaacggcaccatctgtgcatcggagcagagcgtcgtcgttgagcgctgcagcaaggatgccgtgatggcagagctgacccgccagggcggctatttcatgaatgcggaggagtcggagaaggtctccaagtttatcctccgggccaacggcacgatgaaccccgctatcgtcggcaagagcgcggcgcgcattgcggatatggctgggatctccatcccggcgggcacccgcgtgctgatctcggagcagacgacggtcggcaagaagaacccttattcccgggaaaagctctgcccgatcctggcgttctatgtcgaggacgattggcatgccgcctgcgagcgctgcattgagatcctcaataacgaaggcgtgggccatacgatgacgatccacagcgagaacaaggaagtcatccgggcctttgcgctgcgcaagcctgtctcccggctgctggtcaatgtggcggcggcactgggcggcgtcggcgcgacgacctctctgcccccggcactgaccttgggctgcggtgccgtcggcggcagtgcgacttcggataacatcacgccgctgaacctgatgaacatccgccgggtcgcctacggtacgaaggagctgtccgacctgcgcggcggccatccggcgccggacactgcggcacctgctgcttccggcagtgcggcaaagctcagcgcctcacagatcgaagcgatttcccagtccctgctgcagcagctgcggggctaagcgatttatcaaacgaaaaaacgatcccgcacgtcagagaaactgacatgcgggatcgctgcttttgcttaaaaaggacacacgcttcgtccagcttctggacctttgccgttgcgacctctttgctggaacggtgcagcaggctgcaggcacccacgtaagcaaaaagcaagcccagaccgagttcagagggggcggcgcgcaggaattcagtgccctccatcagcaggatggagaaggtggtgggaagctctccttttttctgtggcagcatagcataccggccggggaaagtcaataaagcagggaacgcagtggaaaacttgcgcggcggcgggattttcccttttcgcccggcgggttttgtggtatactatacaaataaggcgacggcttttgccgtttgctgccgatatggacggcttttctgccgaaaaggaggcattttgaaatgatcacatgttacaactgcggcaagcaggtttcggacgagacgctaatctgcccggagtgcggcgcgctggtgcgccggtacgaggcaccgcggcagacccctgagacggaccagccgctggcctatcagccggtccggcagagcgcggcacagcaggcgcagcccgggcggttttatttcaccggcgggttcaaggtctggttctggctgtgtatggttttttttatcatctatacctttagctttgccgtgacggggctgagctttttgcaaaataaccaggcatcccagatgctgacacagctgtatagcgatatgggcgtcaatctggtgcagacctttggctctttggatcaggctgggctctatatgcttatcaatgccggcggctgcctggtagccggcgtgttgctcctgctggtgtatacgacgcggcagcctaaattcctgctggtgcagttgggcggctcggttttggctggtatcgcactggcggtgctggttggcataaatctcatctgcctagcggtggtggtctgcgcctgcgtgacgctgctgcttctgcggcgccaactgccgcggcgcaaagagtaaaataagcggcaaaccggcgtataccggtctgccgcttttgcaagacgctataaagggttcaatcctactataccgcggtttttcctcggtggcaactgttttttgctggcggtgggaaattttgtttgatcggggcagaatagggtggtccctctggaaaaagttgtaaaacattgcgcgttgattttgaaaatggaatcgtgtaaaatgtgtccatattttttgaatgcgcgtaccgcggcagtcatttgccgctgcgatagatagatggccgtaggacacgtcagcccggcacggaacacgccgggcaaaccgtgaggaggaaagacacatatgaaggaaaagaaagacagaattcccaatctgttcggcagcatggtattcggcgaggagaccatggcccagtatgtatcgcctggcgcgatgaaggcgtggcaggcgtgcctgcaggaggaaaagccgctgaatctggatgtcgccaatgacattgccgacggtatgaaaacctgggcgctggaaaacggcgcgacccatttcacacactggttccagccgctgacgggtatcacggcagagaagcacgacagcttcctgagccctatcgggcatggtaaggtcattatggaattctccggcaaggagctcgtccggggcgagccggacgcatcgtccttcccctccggcggcctgcgggcaacctttgaagccagagggtacacggcctgggacccgacctcgtttgcctttatcaaggacggcagcctgtgcatcccgacggtgttctgctcctattccggcgaagcactggataaaaagacgccgctactgcgctccatggaggaggtcagcaagcaggcggtgcgcatcctgcgcctgttcggcgatacgcagacgaagcgcgtcacgccccaggtgggcgcggagcaggagtacttcctggtggataaaaagctgtatctgcagcgggaggacctgcgcctgacgggacggacgctcttcggcgccaaggcggccaagggccaggagttggatgaccattacttcggctccatccgcccccgggtcgcggcgtatatgcaggagttggacgaagagctctggaagctgggcatcccctcgaagacgaagcacaatgaggttgccccggcgcagcacgagatggcgccggtctattgcgatgccaataccgcctgcgatcacaaccagctgacgatggaagtgatgaaaaaagtggccgaccggcacgatctggtctgcctgctgcatgaaaagccctttgccggtgtcaacggctccggcaagcacaataactggtcgctctccacggacacggggaagaaccttttctccccggggagcacgccgagccagaacgctcagttcctgctgttcttggcggcgttcctgaagggtgtggatgaatacccggagctgctgcgctgcagcgttgcctttgcggggaacgaccatcgtctgggcgcgcaggaagcgcccccagccatcatctccgtcttcctgggcgaggaattggacgcgatcatcgactccatcgtcacaggggaggactgcacggatatgcagaagggtctgctgcgcatcggcgtggatgtcctgcccaatatctcccgggacacgacggaccgcaaccgaacctcgccagtggccttcaccggcaataaattcgaattccggatgcccggctccagccagtctgtcgcagggccgaataccgtcctcaatacgatcatggccgaggagctggagcagtttgccagcgccctagaagaggcggagaatttcaatgaggcgctgcacaatctgctgcagaaggcctttgccgggcaccgccggatcatcttcagcggcaacggctatgaggagaactgggtcgaggaggcgcagcgccgcggcctgccgaatctgcggaacacggcggaggcactgcccgcttatatcctgcagaaaaatatcgacctctacacgcgccacggcgtctataccgaacaggagatgcaggcgcggcatgagatccatatggaaaagtactgccatgtcatcaccattgaagcccacacgctaatcgacatggtgcagcgggggatcttctccgccgtctcccggtacagctccgatctgtgtaagaccgtcgcccggaagaaggggctggggatctcgcatcgcagcgagctggcgctggcggcgacgatcagtgagctgagcgatacgctgatggaggagactgttatgctgaaaactgccatcgagacgatcccggatgtcccgctggaggagaaggtgcggtattaccacgatgtcgttttcaaccggatgaaccagacgagaaagaccattgaccagctggaggcgctgaccgcagcgtcctattggccgtacccgacgtattaccatctgcagttttctgtgtgattttctgtaaactgtgttcgctgattcggcagaagggggcatcgctgtgaagtatattttcgtgaccggcggcgtggtctccggcttgggcaag

SEQ ID NO: 279 - DNA, 32759 bp, Unknown
  16S sequences of unknown bacteria
tgcggacggcgaggagctgaagagccccaaccccgttcccggaagagctaatcccaccggaaacatacttgagttcgacgatctcaccggcgcggctcccaagggcgcgtccggatactccggaatcgactccaatcttttcaaagttgacccggtcgatgaaaatgacggttggaccatggtattcgatgccatggtaaccaagcacgagcccggcaacaacggtcagcttgctcaattcatcttcagccccgatgcaggaactcaccagatgggctactgcttctcgagaaagcacgttgcatttgaggtttccttcgcaagatggccgacctacccgccctcccttctaaccggttacaaagttttcgcttccacccaatacgatctccagaagggcacctgggcacgctatgccgtacagatgcgcggatgtacattctccgtatggatgaacggtgaaaagatggtggagtatgagttcaccgatgacgatcttctcgacgaaggaagagaagaggtccgtatgcgcttcatcctcttctatcccaccaacctgaccatgtatctcgacaatatcgtcgccgcggctcccgactttgacgttgcaaccgaaaccggtacgatctacaacgttctcaccttcgacggcgacgcggaaaatgttcccgccgctactaagatcggtaaagaacccgaggagggcgaagaggatacccgccccgtatattccatatacgaagaagcagaagctgctcagggtaaggacagaccccgcacggtttatgttgacaaggacaacaaccccttcgtttacgaaaacattctgaacaacgagaccggcgagtatgaaagtcagctcgttccgtttgacaagtcgatcaaaattcttcccaccacccatgtaaagacttttgcggaagagaacggctggttctttgccggcggtaccggcgcttacacgatcgtcaagcttgagcaggagatcctcctcggcgacggcaacaacgacggcaaggttgacatgaaagatattatcacggctatacgtgcaagcctcaaatacaagatcgatactctcgcaaacttcgacgcgcttgacgtaaaccgcgaccgcaagatagacaccaaggatatcatccttcttgtccgctacgcaaacaactacactcagaacattccgatcggtcagcccatatcgtctctcaccgcataagttataatgtgcataccgttaacggaaaccgccgaaagacggtttccgttaacggtttaataagcaaaaaacaagaaaagcttttccgcaaaaatgaaaaagatcatctcattcgcacttgcgcttctcgctgcgctctcgacggcttcattcgcggtctttgcggacggcgaggagctgaagagccccaaccccgttcccggaagagctaatcccaccggaaacatacttgagttcgacgatctcaccggcgcggctcccaagggcgcgtccggatactccggaatcgactccaatcttttcaaagttgacccggtcgatgaaaatgacggttggaccatggtattcgatgccatggtaaccaagcacgagcccggcaacaacggtcagcttgctcaattcatcttcagccccgatgcaggaactcaccagatgggctactgcttctcgagaaagcacgttgcatttgaggtttccttcgcaagatggccgacctacccgccctcccttctaaccggttacaaagttttcgcttccacccaatacgatctccagaagggcacctgggcacgctatgccgtacagatgcgcggatgtacattctccgtatggatgaacggtgaaaagatggtggagtatgagttcaccgatgacgatcttctcgacgaaggaagagaagaggtccgtatgcgcttcatcctcttctatcccaccaacctgaccatgtatctcgacaatatcgtcgccgcggctcccgactttgacgttgcaaccgaaaccggtacgatctacaacgttctcaccttcgacggcgacgcggaaaatgttcccgccgctactaagatcggtaaagaacccgaggagggcgaagaggatacccgccccgtatattccatatacgaagaagcagaagctgctcagggtaaggacagaccccgcacggtttatgttgacaaggacaacaaccccttcgtttacgaaaacattctgaacagcgaaaccggcgagtatgaaagtcagctcgttccgtttgacaaatccgtagagatcgttcccgcttactgtgtagtcacgaagagtgacaattggtcgtttcccggcggcaccggagcttacgaaataataaagcttgagcatgaaatccttctcggagacggcacgaacgacggcaaggtcaacatgagtgatatcatcatggctatccgctcaagtctcagctacaagatcgatactctcgtaaacgtcgatgcgctcgacgtaaaccgcgacggcaaggttgacacccgagatatcatcattcttgtccgctatgcaaacaactacacccagaacgttccggtaggacagcccatatcctccctcaccgcataaatcagccgcgtgcatttttcagggaaagtttacttcttccgaacttcccgacacataattaaagaaaggcaaagcattttcaaatgaagaaaatcatttccgtaattcttgccctgatcaccgccgcttccctcgcatcgttcggagtcctcgcaagcgattccgcagagggaattctcggcgacggaaaccgcgacggtaagatcaacgtaaaggatatcgtcatcgcaatccgcgccgcgatcggtcagacaatggacaacatcgatctcgacgcgctcgacataaaccgcgacggtaatgtcgatgtaaaggatatcatcatcctcatccgccactcgaccggatacaagcaaagctacctcatcggttacccgatgtcttcggttccctccgcaaagccggcaattaaggtcgtctcaggtgtggagtttatcacctatacgagcagcataacctacaagggacaaaaggatgaatacgcctacaccgcacagaacgacggacttgtgcggatcgacatatcggagctgaaaagcagcgtgcatgttgatttgtatgtattcgaccgtctcggtgaggatgtgactcgtaggcttaactgctcgaacaactccggtgtcagcattcagaatgcaaaagccggtgatacttaccggattcaggtcagatacaacaccgaattcggagactacgttctcacgatcggtcagcccaagcccgtaatcgacgtaacctccttcaaggaagtccgcgacagcatacagtataaggaacagtacaattcttacacattcacgccctcggttgacggtctgtaccgtttcgacctgaataatatgcagagcgactttcatgcaaatatttatctgcatgaccgtctcggatatacagtatcatcacaactgtactgctcaaataataacggaataaccggaaccgatcttaaggcgggagaagagtatagtatagtgataaagtatgcaagtggattcggagattactctcttgtgatcggcagacagaatcccaccgtcgatatcagcggcttggctgaaatatcggaccgcataaccttcaaagaacagaaaaacatttactctttcacggctccgtccgacggtgaatgcctttttaagattaccgaaatgaagagcgatgttcacgtcggactgtatgtatacgaccacctcggatatgaggttgtgtcgcgcggatattgctcaaacaactacggcgtaacgcttagcggcatgaaccccggagaaacctacaaggtcgtagtaatttacagttccggattcggggattacactttaacgatcaaccactgaggctttctccgcaggattccggcggatgcctcatcgaaatcggaaattgcggctctctgcaccgcatccggcggataaaaacgttttccgtttgcgcatcgggcatacaggtgcgcagatcggacaagataatcaaagaaaggcagttcaacgatgaaaaaacttatcaatgcagtttttgcggctgcggctcttcttgcctgcgctctgccctgctatgcggcagaggtcagccccgtcaccggtgatatcacgatgtacgtcgtcatcgcgttgatcgtcgcggctgtggcaatcgtcggcactctgatctactcgaagttcaagaaataaggtatcggggatgccgcagcctgcgcggatcacatcggcgcagcgtcaatgtcatagcaaaacagctccggaaaatccggggctgttttttcggcggagtcgacgggaagagtgaaaggcggaacgaaggcgttccggcaaaggtcacggagcgaagcgagagcgacgatgcggcgcgttcggcaagatgaatcgcgcggatccagcggttcggcaaatcaatggtgctgcgaatcggaggaagcgcgtgcggggagggtgaatcggcggagtctgttcaaagccgccgctgcaagcacaggcttcgataagacgttatctcccgcccgtaagaatcgcggaaaatggctgagcgccgcgtttcgcggattatccgcgccgtcgcgcctcacgctgttgtttctcgcatcttatccacgccgcattcttctgccgattcatcttatcgctgccgttgtttgcgtcatatatattagcatctcgctccgtaaacgtaaaaaagctgcaagtgaaatcacttgcagctttttgtaagatcacgtcaacggaatctgtttataccgttttctcggtgaattactcagcaacatcaacgagcttgatgagagccatctccgcagcgtctccgcggcgaggtccgagcttatagatctgagtgtatccgccgtttgtatttgcatacttgggcgcaatctgatcgaaaagcttagaaactacatcttccttcgtgatgtacgcaagagcctgacggcggcttgcgagagtgtttgcttttccaagcgttatcatcttctcggccattgcacgaacttccttagcacgggtcagggtcgtctcaatggaaccgttctcaagaagataggttaccattccgcgaagcatagcctgacggtgcgcggtcggtctgccgagttttcttgtaccgggcatttcattgtcctccttttaagtttgagtgtgccggatgcacagcgttactcctcttcgctcttcagatcaagtccgagagagtgaagcttctgtataacttcttcaagtgatttctttccgaggtttctgacctttatcatgtcttcctcggtgcggttggtcaaatcctcaaccgtatcaatgcccgcacgcttcaggcaattgaagcttcgaacggacatatcaagctcctcaatggtcatctcaaggactttctccttgatggtctcttcgcgctcgaccatgatttccgcattcttcgcctcgtccgacagatcaacgaacaagttgagatgctcattgagtatcttggctccgagagaaaccgcttctttcgccgtgataacaccgtttgtaagaacctcgatcgtgagcttgtcataatcggttatgttgcctacacgggtgttttcaacggtatagttaacattatagaccggagtgtagatcgaatccgtgaaaatagtcccgatcggcgctgtaataccgccgttctgaagtgaatagagctgcttattgcgctcctgagaaacatatccgcgtccgctgtcgaaggtgagctccatgtagaagcgcacattgtcgctgatcgttgcgatatggtggtccggattgagaatctcaatatccgagtcgcacttgatatcgcccgcagtcacttcgcaggcaccggtaacgtcgatcacgacggtcttcgggatcgaatctccgtaaagcttggcagtaatgccctttacgttaagaacgatctcgcacacgtcctctttaacaccggttatggtggagatctcgtggagaactccgtcaattctgatgttcgttaccgcaacgccgggaagcgagctgagcagcacgcggcgcagagaattcccgagggtaacgccgtagcctcgctcaagaggttcgacgacgaattttacgtttttctcgtcttcagaagggacagtcgaaatattcggcttttcaatttctatcataaataataaccctccgtttttatcaataaatagttacgtttgccaattcgtatccgaccggattgttcatccggtttgccgcctgccgcgtaccgcagacaagagcggcgaggcaggttattacttggaataaagctcgatgataagctgttcctcgaacgggaagtcaacgtctgcacgctcgggaagcatgatcatcttcgcggtgaaattgtcggtatccacatcaagccacttcggcgggatgacggctgccatctgctcggcgagctccttgaacttatcggaggcgcggctcttctctctgagagaaacgacatcgcccggcttcagaatgatggagggaatgtctgccttcttaccgttgagctcgaaatgagcgtgacgtacgagctgacgtgcctctttacggctggaagccagacccattctgtatacgacgttgtcgaaacggcgctcgagaaggctgagaagattctcacctgcgataccgttctgcttgtcggcagcaacgtagtacttcttgaactgcttctcctgaacaccgtagtagcggcgtgcggtctgcttctcacgaagctgcataccgtattccttaacggtcttgcgtccggcaccgtgctgacccggaacagtggagcgtcttacgacggcgcacttatcggtaaggcagcggtcgcccttaaggaaaagcttctttccttctctgcggcacagcttgcaggaaggtcctgtatatcttgccatttaggttgttcctccttataaattatacgcggcggcgcttaggcgggcggcatccgttgtgcgggatcggtgtaacatccttgataagggttatgttaagtcccgtagtctggagtgcgcggattgcgctttcacgtccggagccgggtccctttacatagacctcaacggttttcataccgtgctccattgcgatcttcgctgcggtctcggcagcagtctgtgcggcaaacggagtggatttcttcgagccacggaagcccatctcacccgcggaagcccacgaaactgcgtttcctgccgtatcggtgatcgttacgatagtgttgttaaaagaagaacggatgtgagctgcacctttttcaatgttctttctctcacgacgcttctttataacctttttaacgttagccatttaggtttcctcactccttacttcttcttatttgcgatagtcttcgcaggtcccttgcgggttctcgcgttggtcttggtgcgctgtccgcgtaccggcagaccttttctgtgacggataccgcggtagcagtttacttctacgagacgcttaatgttcatcgcggtctcgcggcgaagctcaccttcaaccgtatagttgttctcgatttcgtcacgaagcttagcgatatcgtcgtcggtaaggtcctttgcgcgggtgtccggattgatgccggtagccacaaggatcttcttcgcactcgtaaggccgatgccgtaaatataggtcagcgctacttcgattcgcttctgattcggaatatcaacacctgataaacgagccatttgcagttgttacctttctcttaaatttcaggctctcagccctgtctttgcttgtgtttggggttctcgcagatcaccatgaccttaccgtgacgcttgatgatcttgcacttttcacagattttctttactgaaggttttactttcacagtccgtaccacctttcattattttgtacgccatgttatacgtcccttggtaggatcgtaaatcgagacctcgacggtgactttgtctccgacaagaatcctgatataattcattctgagctttccggatatgtgcgccgtaactatcatatcattcggaagcttgaccttgaaggtcgcgttcggcagcacttcgactaccacgccttcaaactctataacgtcatcctttggcagaataatccctccttaatcatctttaagcggtatttttgattcccattcccgtatcatcccgcagagtgcgtcatcatccgtatcggaagtaaaatcccgaagaacgctgccggtaatgcgtagatgcttcagctttttcctcttcggagaggaaagagtgtgaagcgagccgtcggcgatatacaccgttccgctgtcttcatcggcgacgccgactataacgaacggacgctttttatcccgcccggcgaccgaataaacgaccgtgcccgcacagtcccggaaaatatccgtcagactgcggtcaggcatatcgctccgtcctccgtgatcgcaacggtgtgctcgtaatgtgcggaaagctttccgtctgcggtcactactgtccagccgtcgtcaagctcacggacatcgggagttccgatgttgatcatcggttcgattgcgatgaccataccgcggcagatcctcggaccgtgtccggcgcgtccgtaattcggaacactcggatcctcgtgaaggtcgtgacccacgccgtgaccgacgtacttcttgaccgtcgaaaagccgaatccggtaacgtagccgtcgaccgccgcgccgatgtcgcctatacgcgcaccctccgcggcggcggcagccatgccgagctcaaagcttttcttcgtgacttcaataagctttgccgcctcctcggaaattctgcccacgggaaacgtgttggcagaatccccgtgaaagcctccgatgaaggctcccacgtcgatcttcacaatatcgccctccttgagtaccaccttgtcggaggggataccgtggatcacctgagaattgacgctgatgcaggcacttccgggaaagccgccgtagccgaggaacgaagggcgcgcgccgcatttttcaatgtggttgcggatcttcgtgtcgagctgctttgtcgtgaccccttcgcggaccatctcgcccgcaatggcgatggcctcgccggtaattcttccggcttccttcatctgctttatctgctcggaatttttgatgaaaatcatttctccgcctccagcgctgcctgagtcagcgccgtagtatcttcaagcttctcctgtccttcaacaagcttgagaatccccttcgcctcgtagaaacccttgagaggctcggtctgggagtgatatgtttccaaacgctttttcacgacctcgggagcatcgtcggaacgaatcgtgaggagctcaccgcaatcgcagaattctccgttttcggaaggattgaactttacatgatacgatgcgccgcagctcttgcagacgcggcgtccgcccattctctcgacgatcttctcgtcgggaacctcgatgcttataacatcggtgatctccacgcccatgtcgtcaagcgcctgcgcctgaggaacggtgcgcgggaagccgtcgagaatgaatccgttttcgcagtccggcttcgccagacgctctttgattatcccgataacgacctcgtcggggacgagcgcgccggaatcgatgaagctttttgcgtttctgcccatttcggttcccgccgcgatcgcctcacggatcatattgcccgtagaaattgagggaatagcgtatttttttgagattatctcagcctgggtgccttttcccgcgccgggagcacccaaaagaatcagtttgatttttctcatcggctcaccttattcaaggaatcccttgtaatgacgcatggtcatctgagattcgatttcacgtgcggtctcaagaacaacaccgaccacgattatgatcgagcttccggtgaaagcgagcgacgaaagcttagctccggaaatgatgttcgcaacaagcggaacgactgcgatcacgacgaggaagagagcaccgatgagggtgattctcgaaagaaccttcgtgatatagtcggacgtaggcttgccaggacggataccggggataaatccgccgttcttcttgagattgtttgcgacttcgatcggattgaacgatatcgtaacgtagaaatacgcaaaagcgacgatgagtattgcagtcagggcggcatagagccaaccgtcggtgccgaagagattgaagaagcccgcccagaaggatccctgcttaggatttacgaacatctggatcgtagccgggatggagacgatggagttcgcaaagatcataggcataacgccggtcatgttgaccttgagcggaagagttgagctctgaccgccgtacatcttacgtccgacgaccttctttgcatactgtatcggaaggcggcgttcactgtcggtaatgaagacgataagcgccgttgccgcaaggctgacgatgataacgccgataccgagaatgatcttgcctgcgtttccggaggtaaggtatgcggaccaaaggttgtgaatcatcgaaggcagacgggatacgatattcgcaaaaagaatgatggaaataccgtttccgattccgttttcgttgatcttctcggcaagccacataacgagtgatgagcctgcacagtaggagagaatgataacgaatgcagggaaaacgcccttgttcgtaattgcgttgttgttctcaaggagcttgtagtagccgaagcttgttacaagcccgagaacaacggttgcgatacgggtaagctggttgagcttcttctgtccctcttcaccctctttggaaatcctctcaaggtaggggatggcgatcgtcaaaagctgaatgacgatcgatgcggtgatgtacggcgacacgccgagagcaaacagcgttgcctgcgacattgcgccgccggaaagaatgttcagatactggaagagggatccctgtgacgacagcagagagcttgaaagcacctgtgcgttaaggaagggaaccgggatcgctgtgccgactctgtagagaagaacgatcagcacagtgaagagaatcttctttctgaggtccaccgtcttccatgcgttgacaatcgtcttgaacactcagatcacctcggctttcccacccgctgcttcaatcttctcttttgcactttttgaaaagacctttgcctgaacggttatctttttggtaatttcgccgttgccgaggatcttgagtccgtcgagtgctttcttgatcttaccgcagctcatgagagcctcaaggtttacggtatcaccgtcgttaaagctgttgagagcgtcgagattcacaatggcatattccttcgcaaatctgttgttgaagcctctcttcggcagctttctgtaaagcgggatctgaccgccttcaaatccgggacgtactccgccgccgctgcgagcgttctgtcccttgtgaccttttccggccgtttttccgtttccggaaccgggtcctctgcctttacgccatgccggctttacggatccttctgccggtgaaagttcatggagcttcatggttttaagcctccttacttaaaattattgtttttttggagggcttacgccttctccacgactacaagatgtccaatgaccttgagttttccggcgagtaccgcatcatccttatggacgatactgtcaccgatcttgcgaagaccgagagacgccgcggttgccttctgattgggcaacgagccgatcaggctctttttaagagttactttaagcataatcgcgcctcccctcagcctttgaccttttcgacgtcgattccgcgaatctgtgcaacctcttctgcggtacgcagggtggtcaggccctcgaacgtagcctttacgacgtttgcggggttgttggagcgaaggctctttgcacggatattcttgattcccgcaagctcgaccaccgcgcggacggtcttacctgcgatgattccggtaccgggtgcggcgggcttaaggagtaccttgcctgcgccgaactcaccgattacctcatgcggaatcgtcgtgtccttgagggacactgtgatcatgtttttctttgcatcctcgatgcccttgcggatcgcctccggaacctcggcagccttgccgagaccgtaaccgacgtgtccgttctcatcgccgactatcataagtgcggcaaaacgcgcgatacgtccgcccttgacggtcttggatacacggtttacgcaaacgagcttttccttaaggtcgagcgtcgatgcatcaattctgttagacatatttaatctcctgttaattcgtttgatctgcacttgcgtgctaattaaacggtgtacaaaccggcgtttgaccggacggggaaaagtcagaacttaagtccgccttctcttgcgccctcagccaattccgatacacgtccgtgatagatataaccgccacggtcaaagacgaccgcttcgattccttttgcctttgcgcgctctgcgataagcattccgaccttcttcgcagcctccttgttggagccgatggaagcgaaatccttttcgttggaggacgctgctgcgagggtcacaccctttgcatcgtcgatgatctgcgcgctgatgttcttgttagagcggtaaaccgcaagtctgggacgctcagcggtaccggaaatctttccgcgtacacgtgcatggcggcgaagacgctgctcgtttttatcctttttggtaaccatgtcttacgtctcctttccttacttaccggtctttccggccttacggcggatatgctcgtaatcgtacttgacacccttgccgaggtacggctccggaggtctcttctcacggatctgagccgcgatgtagccgaccttctgcttgtctgcgcccttcacgattatcgtgttggagtccggaagctcaaaagtgattccgtcgccctcttcgaaatagatcggatgggagtgaccgaggttaagggtgagagtcgtgccggactttgctgctctgtaaccgacgccgttgatctggagggtcttcttgaagccgtccttcacgccgacgatcatgttattgaggatagtgcggctcgttccgtggatggaacggctctccttctcgtcgtcgggacgctcgataacgatgacgtctccgtcgcgcttgaagttgagaatatcggaaaacttgaactcaagagttccgagagctccctttaccgtgatgtggttgccttctgcgattactacgtccactccggcgggaaccgttatcggatttctacctattcttgacattgaaatctcccctttcccttaccagacaaaggcgatgatctcgccgccgacattctctttgcgcgcacgcttgtcggtcataatgccctttgaagtcgatacgatggcgataccgaggccgttcataaccttcggcatatcctcgcagttcgaataaatacggagaccgggcttggaaacacggcggataccgtggatcgtgtttttcttaccctgaccgtacttgagagtaacgcggatgattccctggcgaccgtcctcgatcacctgaacgccctttacgtatccctcttcaagaagaatgtcggcaatcgccttcttcatgtttgacgcgggaatgtccacagtctcgtgacgggcagttccggcgtttctgattcttgtcagcatatctgcaattacgtctgacatctgcataattttatcctcctgtcatgcaagtaattattcttgctgccgctcgcaggcggccgcacaccgacggttaaactcggtttcctatcggtggggatgggttttgccgtctgcgctccggcgatcacgcaccagcgcagcgcggcatgtctttaccagcttgccttacgaacgccggggatttcacccttgtaagcgagttcgcggaagcagatacggcagatgccgtacttgcgcatataagcgtgaggcctgccgcagatcttgcagcgattgtactcacgggtggagtacttctgctttttctgctgcttcagtatcattgctttctttgccatttcatagcctcccttatcttgcgaacggagcgcccatgagagtgagcagctcgcgcgcttcttcgtcggtctgtgcagtggtaacgaacgcgatatccataccgcggatcttctcgacctgatcgtaaacgatctcggggaatatgagctgctccttcagtccgagggagtagtttccgcggccgtcgaagccgtcgggattgattcccttgaagtcacggacacggggaagagcgatgttgaagagtctgtcgacgaattcatacatacgctcgccgcggagagtgaccttcgcgccgatcttcatgccctcgcggagcttgaagtttgcgacggatttctttgcataggtcgggaccggcttctgaccggagatcgtctgaaggtcggtcatgatgctgtcgataaccttggagttatcctttgcatcgcctgcgccgacgttgataacgatcttttcgagcttcggaatctgcatagtgctcttatactcatactttttcataagagccggtgcgacttccttcagatacatttccttgattcttgctgccatctgtcacacctccgtcagagctcggcgccgcacttggcgcatactctggttttctttccgttctcgatcttgtgtgcaatgcgtacgcccttggagcacttcgggcagacgatctgaaccttggacgcatagattgcgccctcgacctcgactacaccgccctgatccttcggcggacgcggcttgacgtgcttctttaccatgtgcacgccctgcacgattacttttccctctttcggggaaacctcaaggaccttgcccttcttgcccttgtcgttgccggagacaacgatgacggtatcgccggtctttacatgaaccttctttatcatcttcgttcctccttaaagtacttcgggtgcgagggaaagaatcttcgtgtactcgtgatcgcggagctcgcgtgcaacgggtccgaagatacgggttcccttaggatttttgtcttctccgatgatgaccgctgcgttctcgtcgaacttaatgtaggaaccgtcgcttcttccgacgcccttcaccgttctgactacgactgcctttacgacatcacccttctttacgactccgcccggagccgctttcttaacgcaggcaacgacgacatcgccgatcccggcataacgtctgcccgagccgccgagaacacggatgcacataagttcctttgcgcccgtattgtcagcgaccttcataagtgactgctgctgtaacacttgtcttcctccttaggtaattaaaacttgcccggtttttccgggaagggtgacagcccgaccgttcggtctgctgcccggtccacgtgattcggcgtggccgctcgaaggatttattttgccttttcgattacggaaacgagacgccatctgattgtcttggaaagcggtctggtctccatgatctcaactttatcaccgacgccgcactcgttcttctcatcgcggatgtgaaccttgagtgtgcgcttcatgatcttgccgtaagtggggtgctttacgttatcctcgatggcaacgactgctgccttgtccatcttgtcggaaataaccttgcccactctggtctttctaaggttgcgttcttccatcactatctcccccttaagcattcttctggcggataacggtcatcacacgggcgatgtccttctttacatccgcgatcttgtgggggttgtcaagctggttgatcgcatgcttgaagcgaagaccgaacagctcttccttgagctccttcagcttgctctcaagctctgcttctgacattttagtaagttctgttgctttcacagcttatccctccacttcattatcaagctgctcccttgttacaaagcggcacttgatggggagcttgtgcgacgcaagtcgcattgcctcttttgcgatctcctcgctcacgccgtccatctcgaacagtacgcggcccggcttaacgacagccacccaatactcgggcgaacctttaccggaacccattcgggtctcggcaggcttctcggttatcggcttatccgggaagatcttgatccatacctgtccgccgcggcggatgtaacgggtcattgcgatacgggctgcctcgatctggttgctcgtgatccaagccggctcgagagcaacaagtccgaattcaccgttggtgacgcggtttccgcgcattgccttacccttaaggcggccgcgctgaacacgtctgtatttggttctcttaggcattaacatcagtctgcacctccctcagtggtctgctcgggagccgcatccggcgcgggagctgccttcggagcgggtttcttgtaacccggtctcgtctgacgtgcgcctgcgttgatattgcgtccctcgtcgcgtcctccgcgtccgccttcacggcgtccgccctcacgacgtccgccctcgcggcggtctccgctgcggcgctcgcggcgctcgcccggcttcttggagcggcggttgtcgcggcgctcgccggtacgggatacctcggagaggacctcgcccttgtagatccagactttaacgccgatcttaccgtaggtcgtgttagcctccgcgaagccgtagtcgatgtctgcgcgaagcgtctgcagcgggatagttccctcatgatactgctcgcttcttgcgatctcggcaccgccgagacgtccgctgaccataatcttgatacccttcacgccgaggcgcatggtgcgtcctatggactgcttcattgcacggcggaaggaaatacggcgctcgagctggccggcgatattctcggcaacgagctgagcatcggtatcgatgttcttgacctcgatgacgtttacggaaacggacgtgccgagcattgcctcaagctcagcgcggagcttgtcgatctcggagccgtttcttccgatgatgataccgggctttgcgcagtggatgaacacgcgaacgtgtccgcggctgtcgcgctcgatctcgatcttcggaacgcctgcaaggtaaagcttgtttttgaggtacttgcgcaccttgtaatccgaaacgagggtatcgccgaatttctcgtcacttgcgtaccatctcgaatcccaattcttgattacgccgacacgcagtccgtggggattaaccttctgtcccatttttcagcctcctccctcaatctctttctttcaccgcaagggtgatgtgacttgttctcttcagtatacggtctgcgcttcccttaccgcgcggcatcattctcttgagagtgggaccgggggtgacgaagcactcggatacatagagactatcacggttcatgtggaaattgttttcagcgtccgcgaccgtgcggtcgaggagcttgatgatatgctcgcttgctgccttcggcgtgtgcttcagaatagcctttgccgtggctgcatcctttccgcggataaggtccagaacgatagaaaccttacggggagagatgcgaacatatttgagatatgcttttgcttccatttcattctcctcctatggcttatttaccgttattggacgtttttgatcccgcgtgacccttgaaggtgcgcgtaggagcaaattcgccgagcttgtgtcccaccatatcctcggtaacatataccgggatgtgcttgtgtccgtcgtgtacggcgatcgtatgaccgacgaactcgggaaaaatggtggatgctctcgaccaggtcttgattaccttcttgtcaccggaagcgttcatagcctcgatgcggttgaacagcttctcttcgacaaagaacggtttctttaagcttctgctcatttatcgtgcctccttccttatttcgcgtttctgcgcttgacaatgaacttgtcggttcttgccttcttattgcgcgtcttgtaaccgagtgcgggcttgccccacggggtaacaggtgccggacgtccgatcggggagcgtccctcaccgcctccgtgcgggtgatcgcacgggttcataacggaaccgcgaactgtaggacggatacccttgtgacgggtcttacctgccttaccgaccttaacggtgtcgtgctcgatgttgccgatctgaccgatggtagcgcggcagtccatacggatgtaacggacttcgccggagggcagacgaacctgagccatctcgccttccttagccataagctgagcctgggatcccgcggtgcggacgagctgagcgccgcgtccgggataaagctcgatgttgtggataaacgtaccgaccgggatgtttgcgatcggaagggtgttaccgggtttgatatctgcatcggcaccggtgtagagtacatctccgtcggttacgccgagcggagcgatgatgtagctcttcttgccttcgtcgtcctgaagaagtgcgatgtaagcggtgcggttcggatcgtactcgattccgacaaccgtagccttcttatcgacatcgcgcttgaagtcgatgatacggtacttctgcttgtttccgccgccgcgatgacgaacggtgatgcggccgtagctgtttcttccggcattcttcttcttgattacaacaaggcttctttcgggggtgaacttggtgacctcatcaaaggtgggcacggtcatgccgcgacgacccggagttgtaggcttatatttgatagtaggcatttatccgcacctcctcagttgagtccctcgaagaactctatcgtcttggagccgggctcgagagtaacgatcgcctttttccaagcagccgtgtatccctggctgtaacggagtcttctgggcttcttcttcatgttgatggtgttgacgctctttacgtcgaccttgaaaagctcttcgaccgcagctgcgatctcgggctttgtcgcatcctttgcgaccttgaaaacatacttcttatcagccgtaagatccatcgatttctcggtgatgatcggcttgattatgatatcctgtgcaagcttcattctgcgtacacctcctcgatcttggttacagcgtcctgcgccgcaacgaaggaatcggcattgagaatgtcgtagacgctgagcgtgttggcaagcgttaccttgacaccggggatgttggcaaggctctttacgaccttttcgtccttctcggggagaaccacgagcgacttcttgcctgctccgatatcggaaagcatctgtgccattgccttggtcttgaattcagcagcagcgatcttgtccacgacgatcatctcgccggacgcaacctttgagctgagtgcgctgaacattgcgactctcttgaccttcttgttgagcttgaccttgtagaggcggggcttcggtccgagagcgactccgccgtgcgtccactgaggagcgcgggtcgatccctgtcttgcgcgtcccgagcccttctggcgccacggcttgcggccgccgcccgaaacctcggtacgggtgagggtggactgtgttccctgtctctgattggagagatatgctcttactgccgcatggaggacaggcgcgtttacttcggcggcaaatacgcggtcggaaaggttcatcttgccgacttccttgcctgccatatttactactttaatttccggcatgttcgttcctcctatgctttgacgccgtcgcggataaatacgatgccgccctttgcgcccgggactgcgcccttgacagcgataaggttcttctcggcgtctaccttgacgacctcaagattcagaattgtaacctgttcgttaccgtactgtcccgccatgtgcttgttcttgaagactctggacggagacgagtttgcacccatcgatccgacctgacggtgaatcggtccggtaccgtgtgtcattttaagaatgtgggcgttccatctcttgaccgcgccggtgtatccgcgtcccttcgtgatgccggtaatgtcgaccttttcgcctgcggcgaaggtatcggcggccaccacgtctccgagattgagatcagcggcgttctcgaggcggaactccttcaggtgtttcttcgcggaaactcctgcctttttgaaatgtccctgtgcgggtttgcccgtatgcttatccttcgcatcctcgaatgcgagctgcacagcttcgtaaccgtcggtctcggcggtcttcttctgtgttacgcagcaggggccggcctcgataaccgtaacggggataacgagtccgttttcgtcgaaaatctgggtcatgcccagcttctttccgatgattccttttttcatgatttcctcctgtaaggttattggttggtgcgcttggaattcccggcagccacgccggacgcgccaacttgaccttttccgtcatcaagtctccgatcccgacgggatcccggactctgtgcggcggattcggctttttcggcgtttatgatgcctgacgcgatcttatttaagatcaatctcaacgccggcggggagctccacgttcacgagagaatcgatgagagccttggaaggcttcgagatctcgatgagacgtgtgtgggtgcgctgttcgaactgctcacggctgtccttgtacttgtgcaccgcgcggagaatcgtgatgatctccttcttcgtgggaagcggaatgggaccggatacttcggcaccgccgcgctttgcgatctcgacgatcttcgccgcagccgcatcgacgagcgtgtgctcatagctcttgagtctgattctcactttctcattcactgccatttaggttttcctccttattaatctttgatgaggagggaacacggttccgggtgtatctttgcccgtcttaaacaagccggacttcgcgcggggttaagacacgcgaactccggacaaacaaagacggcggatcaccccgcgggacggctgcgcagcatacactgccctcccccgcgttcgccttcgcccggttaacggacatactctgcggaaattaccctctcaggcgcagtcacccatagaggcaacctcccgcttcatcgcacatcaagccttttgattttaccacatttcactatataatgcaactgtttttttgttccggtacgatttttacggtgtagaaattttccgtattttcataatcattttttgtaaaatatgcacaacggattttcgggcgcaaaaaaggcaaaacttattcggagaacttgttccaaaaaacataccgcgctattgcgaaatgcgaaaatttatggtattatataaaagtatcttattttatatatacactatatacacgccttcgtctccggacgttttgcaccgtcccgtaccggaaatcacgttcgcggtctgaagacggtaaagaaacgcatcatgtttcctgccgcgtaaaaaacgtgcagtacacagaacatataaaagaaaggaagcctttttcaaaggcatgtcaaaccgaaatgaaaaaatcactcacatcgacggcgatatctgccgtctcaatcataatcgctgcgatctccggcgttctcttctgggtttcgttcaggacaagttttgacatgaccgtggagcatttcagccgcacacctatcgttgcggcatcatacatcatgctcggaatatcggtcgtgcttgcagtctgcgccgcgtttccgatcctctcggtgccgcgcggcatcgagcttcgtgattcctcggtgttttccttgttctcgtatattctttgtgcggcagcgtttgccgcctacgctgcggaaacgctgatcgcctaccgctcccgcctcgcgtatctgtttacaaaagcgaacgtgcttcccgcgcttatgacgttgctcgcgcttgtctccgcggcatacttcctgatctgcgcattcgcgccgaaattgaagaacgcacgctcggttcttgcattcgcaccgatcgtctgggcggggctctgcacgctcagcatatattttgacagctccctctcgataaacaatccgacaaaagcgctgaatcttctcgcagcggcgctcatcctcatattcctctgcgaagacctccgctacgcaatcggaacgcagtgcgcctccatcggagttttcacctcggcagctgcggtttcgtgctcgattgccgtcgcatttccgcgccttgcgatatctctcgcggattccgagggattcggcttcggcataatagattccacgctcttcgccgcagtcggcattcttgcggtctcgcggctcatatccgcgctttccgccgcatcacagcgaaatcacacgccccgccgcgcttcaggcggcaataccgatgacacacccgccgaaagcgatgaggtcgccgcgtccggcaaatcgcacgactgtgcggaaagcagtgcggacgaccgcgcggacggctgagcgcgcaggcagaatatccgcaagcaaagtccgcgttacgcggcaaagtgcaataaaaccgtgccgccgtgcggcaaaggagttaaaaatgttttccagaaccgtttcaaggataatatgcaccgcccttgtgctcgcattcgccgttctctccgcgatctccgcggtatgcgccgattttccggagcagcgtgcttccgtatatgtgtacgattccgccgacgtgatctcctccgaaatcgaggacgacataaaccgacgcgcggacgcgctctatgcgatgtgcggtgcgcagataatcaccgtgtgcgtgacgaccacgggtgacacgcccatcgacaagtacaccgcagagcttttcaacacatggaagatcggctcggttcagcgcaacaacggaatgcttctcataatggcgaccgaggaccgcgaatattggattctccagggcaacggcatcaagaacgacataaccgacagcgatcttcaggcagtgaacaacgaatgcctcgagcagtatttccgcgatgagaagtacggtgagggcgcgctcgcggtcttcgaccgcctgctcgaaaagtttcaggctctctactcgatcgacatctcgaattgggacggcaagtacatcgatttttcgtatcccgagacggaaagcgagagcggcgacgcgcagaaacagacctcccccggaaaaccgctcatgggattcttcaagacggtcctctggatcgcggcggcggtactccttatcgtgatcgtatttgtcgccgtatccgtcctgcgccgctcggaattcgcaaacggttcattgctccgcaggcgcagaaacaaggtcggacacagcccgtacgtcggaattccgccgaaagtcaacctctccggaaaccgcggcggcgcgcgccgtcccacgtccgccggcgatccccgcgcccgtcagaacggctatgcgcagaacggaatgaggcaaaacactccccccgcgcgtccgggacagcctcgcgaaatgcagaatccgcagtacactcaggatccccggatgcgcagtcagcagcagtaccgcgccgatccccggtacacgggagagcgcgatccgcgccgcgttcagcgtgacgcacagaataccgtatatccgcagaatccgccgtacatcggtcagggaggcaatgtgccgagcggcaatccctacgggcagataaatcaccgaaacggcgacgtccggcggacgcagggaaatcacggcggtgcaaacacagccggaaggcagtatcccgacggcagtcaggacgggagacaatgatttcaatcagtgtaagcgacctctcatataaaataggagagaaagtgattctcgattccgtttcgttttcgctcgacgcgggggaccgcctcggcatagtcggcgtgaacggtgcgggaaaatcaacgctgctcgggatgattacgtcccgtctcactccgaccgagggcagtgtatacattgcgaaaaactaccgcgtcggagtgctcgagcagaattcgctgtcggacagcgccctttttgcggacggcggtgaggaaaccgtgctcgaccggatgtacgacgcattcggagaactgcgttcgatcgaagcacggcttgccgtgcttcaggaaaagctcgacaccgcgtccggcgcggagcttgagtcggcggcatccgaattttcgtcgctgaacgcgcgtttcacggaaggcggcggactgtactacaaatcgaaatgcaaaagcatactcatacatctcggctttcccgagagcatgcactcgcagccgctctccggtctgtcgggcggagagcgcacgagactgcttctcgcgcagcttctcgcatcggagccggagcttctgatactcgacgagccgacgaaccacctcgacacagacacgatggcatggcttgaggagcatctctcgtcgtatccgaaaaccgtgatcgtcgtgagccacgatcgtttcttcctcgaccgcgtgacgaacaagacgctcgacatcgagaatcggcgcgcgacgctctacaaatgcccgtactccgcatttgccgagcagaagaagcaggactaccgcgcgaagatgaagaaatacgagctccagcagaaggagatcgcgcggcaggaggcgatcatcgagcagcagcgccgctttaaccgcgaaaagaacttcatcaaggcggaaagccgcatgaaggcgctcgagcgcatggaaaaggtcgagcgtcccgacgacgcgccgaaggggatcggtttttcgtttcgcgccgggatcgaaagcggaaacgatgttttgtcggtgaaggagctttcgatgggcttcggtcagaacacgcttttttccggcatatcgtttgatgtgaaaaagcgcgaacgggtgttcatcctcggtccgaacggctgcggaaaatcgacactcgtcaagattctgtgcggactgatgcgtcagaagagcgggcgcgtggacttcggatacaacgtggagctcggctactacgatcaggaaaaccagaatctcaccgacacgaaaacggttctcgacgagctgtgggacgcataccccacgatggcggagcgcgatatacggagcgtgctcgcacagtttcttttccgcgcggaggatgtgtcgaaaagcgtatccgtcctctcgggcggtgaacgcgcgcgtctcacccttgcgaagctgatgttccgaaagatgaatcttctgatcctcgacgagccgacaaaccacctcgacatatcgtcgcgcgaggcgctcgaggacgcgctcgccggatacgacggaacgctgatcgcggtcagccacgacagatactttatcgacaagctggcgacgagaatcatcacgatatctcccgacggcgccgtcgatttccgcggaacatacagggaatacgagcagaaaaagcgcgcggcagccgaaggagcggcagaggtgtccgccgccgcaaaggagagcatctcctcggcgaaggacgagtatctcgaaagaaagaagaatgccgccgaggaaagaaagtaccgaaagcacgttgagaaagtgcgtgcggagatcgccgcgctcgaaaaggagcttgtcgagatcacggacgagcttttcggcgaagcggcatacaactatatgcgcgccgccgagcttgaggacaggcgcataaccgcggaggatcgcctcatgcagctttacgaggaagaggagaccttcgacatctgagcgcgggaacgacgcgaggttgaaaggcgcgcatgaatacggacacacaagaaggaggatctgacgatcctccttctttctcgcatgggcgattttcgttttttcgattgtgcggtcggggcgacgtcgggtcggatcagcagatcgcaacctcgtgcatgaagcggtcaacgagatcaagctggctcagcttgttctcgcggagccacgactcgcggtagggcttgagccacgcttcgacatcgtacagaagagtgacgcggtcggtgtagccttcaacgcccttgatcttcaggcagacgcggttcataagctgtatcgcgcggcatgagagaatgagatcggatattctttcgtcatcctcgccgataccgcgaagtgcggcaattaccccgtcaagctccgcaatatgcgcgatcgcggcatcggtatcgcaggcaagctccgtggtcttgccctcgacggtgttcgcgctgtaccaatacatgaactccatccaatcgcagcttctctcgcagcggcccatcgtgcgtatgagagagatcacgtttatgtcgtcggaatcgtagagcagcgagcttgccgcctcctcgaattcctccgtgaggacggcggagcatctccaccccttctgcgcgccgatcaccattccgtagagcgagcagttgaacgggcagatgttgccgaaatctccccaatttgtattgaggatgccgagcgcgccgtacttcgcgccgtaatccgcaaggcggattatatttccctctgagcggtcgatctcctcgacgaagcggttccagctcgacgtgccggggcacacgatctgattgagccccgcgtcggcgaacgccttgaccttgccctcgtcgggatccgaaacgtacgtccagttgagcatgaccgtatccttggggatatagtggagcttatcgggatggctgagcgcaatatcgccccacatcatgacggtcttgccgcggctcttcacatgctcgattatcttcatgaggaatttgaagtattcctcaccggcatccttgcccgcgttgcgtccgcggcagaggtcaaacgtctcgtcgcagcagatattgaatctgtccgaacggaaaagcgggataaactgatctatcaggctcgagataagcttgatgctctcctcgttcgatacgtcgatcgtgtggtgcgccatcttttcaagccaatacatcttctccggcttccaatcctccatttcgcagagatgcttgtacttatcgctctgaaggaggttgtagaggtgtccgaacgtggcaagcgacggaacgagctcgatgaaattgtcgtagcagtaatcgtcgagcgcggtgatctcctcggcggtgagcacgttctccggggtcatgatcccgtcgtactcgacgaattcgaaagcgtcctcgacgtaaagctgaagagaattgatcttataatacgcgagcagatcggcgatatggcatagctgcttcagcgtggggacgcgccctctcgtcacgtcgtgatagaatccgcgctccgcaaattccggcttatcctcgatcctgcaatggggaagcgaatcgccgtactcgtgaattatctgacggagagtctgcacgccgtaatatgcgcccgccgctccgtcgccgacgatcctcacaccgccgtcgtcaatatcgagcgtgtagccctctcccgcttctccgtgggaaatgcgcacgcgcgcgcagcctttgcccgtgcattcggcggagcaggcccgcagcttcaccggagcggagcaaagctcctcgatctcacgcttcagtgtaacggcgatcttggttattctgcggtcgcttccgttttcaacggcgacagcggcgattttcccgagatcgatagatccgcccgtcagctccgctttgttcggtgtggggattattttcatgataataccgtcctttttcaaacttgacccccgccgatatccgcacggcgggcatatgctttaatctattatagccgtttgcggacgcgatttcaatatatcggcgaaaaaagcccgcacaatttcgccgcctgacgatcggattttctttctccggcatattcgctgccccgtgccgccgtaggcggctcgcagtgcgggtcggaagcgtacaagccgaagcgtgccgcaaaagtgcacgactcataaatcgccggacactgcgtgtacgccgaacgtatgcggaacatatatcctccgaaaaagctgccgaagggcggtttttcgcacctcgcgtgctgttttgcccctccctctcggtgtttttcaacaaatttataaaaacccctttattttttaaaaacctcatgatataatctaaaggttagaaaaggcagaaatataaaaacgaaacggagagatatttttggtaagaacagatttgcgcaacattgcgataatcgcacacgtcgatcacggtaagaccacgcttgtggacgaaatgctgaagcagtgcggcgaataccacgaaaatcagcaggtcacggagcgcgtcatggactccggcgatctcgaacgcgagcgcggaatcacgatacttgcgaaaaacacgtcggtcatccgcggcgatgtgagaataaacatagtagatacccccgggcacgcagacttcggcggagaggtcgagcgcatactcaagatggtaaacggcgttctcctgctcgtcgatgcggcggagggtcccatgcctcagacgagattcgttctcggcaaggcgatggagctcggtcacaagataatcgtcgtcatcaacaagatcgaccgtcccgacgcgcgcctcgaagaggtcgaggaggaggttctcgagcttcttctcgagcttgacgcgacggacgagcagctcgattcaccgatgattttctgctccggacgcgcgggcaccgcatccctctcgccttacgaaaagggagtcaatctcgatcctctgttcaacacgatcatcgactacatccccgctcccgaaggcgattccgatgctccgctccagcttctcgtttcctcgatcgactacaacgattacgtcggacgtatcggaatcggacgcatcgagcgcggcacggcgaagatcggcgatgaggcggtcgtcgtaaactatcacgatccggatgcgaccccgaagaaaatgaagcttgtttcgatgttcgagtttgacggacttgacagagttcccgcgcagagcgcgacggtgggcgacatcgtctgtttctcgggcgcggaggatatcacgatcggtgacacgatcgcgtcgccgctcgatcccacgccgcttgagttcgtcaaggtgagcgagcctacgatggagatgaccttctccgtaaacgacagcccgttcgccggacgcgagggcaaattcgtgacctcgcgccagctccgcgagcgtctctacaaggagactctgcgcgacgtttcgctccgcgtggcggacggcgaaacgaccgactccttcaaggtcgcgggacgcggcgaaatgcacctctcgatcctcatcgagacgatgcgccgcgagggatacgagctcacctgctcgacgccccacgtcctctacaaggagatcgacggaaagaagtgcgagccgatggagagagtctacattgacgttcccgaaggctcggtcggcgcggtcatagaaaagctcggctcacgcaagggtgagcttgtgcagatgacaccgtccggcagccgcatgaagatcgagtacctgatcccggcgcgcggacttctcggataccgctcggaattcctcaccgacacgcgcggcgagggaataatcaactccctcttcgacggatatcagccctacaagggtgagatcaccatgcgctacaccggctcgctcaccgcatccgaggcgggcgaggcgacctcctacggactttacaacgcgcaggaccgcggcgctctcttcatcggagttcagacccccgtctatgagggaatgatcgtcggacagtgccccaagatggaggatatcgccgtaaacgtgtgcaaaaagaagcacctcaccgcgatccgctcgacgggcgcggacgaagcgctccgcctgacaccgccgatcatattcagccttgaagaggcgatcgaatttatcgcggaggatgagctcattgaggtcactccgaagtcgatacgcctccgcaagagaacgctcagcaccgagcagcgtctcaaggatcaggcgaaaaagaaaaaggggctttgataagtccggtgtgcaaatcaaaaatatacatataaaatatacggaggaaacaaaaatgtcagacaagattttagttgaaacctcggcgcgtcacgtccacgtcaccgaggagcagatcgcaattctcttcggcgagggcgcgtccctcacccccaagaaggatctcagccagcccggacagttcgcctgcgaggagcgcgtgaccgtcgtcggaccgaagaagtccattccgaacgtgatcattctcggacccgcacggagcgcggcacaggttgaggtatccctcaccgacgcacgctcgctcggtgttacggctcccgtccgcgagagcggcgacgttgccggctccgctccctgcaagctcgtcggaccctgcggagaggtcgagcttaccgaaggcgttatcgccgcaaaacgtcacatacacctcgatcccgcaaccgccgaaacgttcggacttgaggacaagcaggtcgtaagcgtcaagatcgactccgacgagagaagcaccgtgttcggcgatgtcgtatgtcgcgtaagccccaaattcgctcccgcgatgcacatcgacaccgacgaatcgaacgcagcgtgcgcattcggcgagtgctacggcgaaataatcaaataatctttgaaaacgggggatccccccgttttcattaatccgggaaacgcgtgtacggcgcgcggcgaagcggctttattcgaaaagcgcatcggcggcgctgccgcgtccgacagacacggagaaattatgataaaagcaattattttcgatctcgacggcacgctctgcgacaccatggaggatctcagagaggcgatgaacgccatgctccgctcgttcggctgggcggagcgctcccgcgaggagctgctccgcttcataaaccgcggtgcgcgaaacttcgttgcggattcgatgccggacggctcatactcatccattgacgacgaatcggtgacgcgcgctctcaaaaagtacaacgactgctacgcggagtgctgcggcaatgcgacccgtccctacgacggaatcgtggaggctctttccgagctgaaaaagacgtgccgtctcggcgttctctcgaacaagcaggaaccgttcgtcaagaagatcatcggcgacatcttccccggcgtgttcgacagcgttcacggtcaggtcgagggtatcccgacgaagcccaatccgctctcgctcgagcgcgcgatctcggagctcggggtgacagccggtgaatgtgcgtttgtcggtgacagcgatgttgatatgaagaccgggcgcaacgctctcatgcatcccgtcggggtcacatggggataccgttcgcgcgagatcctcaaggcggcgggagccgaggcgctctgtacctctcccgaagcgctcggcggtgtgatcgcatcgctctgagctgaccgtatgatgcttttcggcatcgctccttgtttcgggagttatgccgattttcgcattttcgcatcggcgcgcgcaggagcaatacgctgtgcggcggttcgttgaaagccttgcgcagttcagcgattcgccgccccacacacgttttatcgaaagccccgcgcggcttcgcaagtccgcatgatcccgccgcggcaaagccgaaaaaatcccccgcacgaaagccgtatgccgatcgttcgaccgggcaggcggggtgaggaggatttttattttgagagcgggtcgggaaatacacggcggcaaagctcgccggagatcggacgcgcggcaaagcacgccgtccggggcgatcgtcccgggcagactgttcatccggccgcatcggataaaccgacagggctatcagcacggtatatcagccggcggcggtcacggactcgaatccgaagtcctcgatcgagatatcgtcgattccggactcggagatcatctgctcggttcccgcgattgccaaatatgcaagagacacggcaagctcggtgaaatcgctcttatactcggcggggagcacgggatcggtcagggaaacggtgatgcctttttgagtttcgaaatcgaattttgcgggatcgagcgttccttccatatacacttccatgtcgtctgcggaaacatacgagaagaatccgcactgtgccttgcgcgcttcaagttgaattgtgaaagtgattcttgatccgacggaatcctccatgacgacaagcgcaagtatcttgttttcgacctccatattctcgatcgtgtaggagatatcgttctcggcatccgttccctcaatatacactctctgatatccgagaaggtaatgtctgtatacgatgtatgcgtaatcgggggatttctcgtcgcagcgggtgcattttccggtcaccttcgtatcaaaattgtgaccgagcgggcgcgtatcgacctcggcactgtctccgcagacacggcaggtgagcttcgcttttcctccgttcagacagtcggcggcaacagtctcctccttggtatcccaatggcagaggcgaacctctttccatcccgcaagcgctttgataagctgaataagatccttcatgtcgatcttgccgtcgtgaagcgtatccgagtttgcctcgtttatcgtcacggggtaatccgaaaggctgcgaataagtataattatatccttcattccgacgctgccgtcgccgtttacgtcgccgggggtgatcccgtcggtgcagttatccgcagcatgcgcgggaaatgcggcgacacatacggaaagcgtcatcacggcgcaaagcaaaaacgcaagtattttcttcattatcgttcctccgttgtatttgtcttgttcaactgtggattttatcacaaaacggtatttttgtcaatagaaattgaggaatcggaagaaaaacgcaaaaaagactattttcattccgaattttattgacattgccccccgc

SEQ ID NO: 280 - DNA, 2854 bp, Unknown
  16S sequences of unknown bacteria
tggagcggtagacgagattcgaactcgcgacatccaccttggcaaggtggcactctaccactgagctactaccgcataatagcaattggtgcgggcgaagagacttgaactcccacgcctgatggcattggaacctaaatccaacgcgtctgccaattccgccacgcccgcgcgtttgcatcagcaacgttgttaattttactcacttttcttggatttgtcaaccactctttgccagtttttagattattttctgcaaaaccatttttgtcaaccagatatgctctatcctatgccatgcgccataatcctattccgtttcgctttaagttaagagaaaagcaaaaacccgaaacagagcgtttcgggttttttggtgatccatcggagactcgaactccggacaccaaattacgacttttttacgacagtttttgttctatataagccctaaattagtcttatatatcccctccatctatcgcgctcttttgcccctcttagccgatagggataactgctaaatcacacccaagagctgtggcaacctttaagagagtatcaagctgtggtacgactttcttactctctagtctagcgattacaggctgagtaagctttgctgcctttgccaattccctttgcgtaagacctttagcctttcttcgttctataagctcgtcgataatggcaacacagctatctggcaaccgctacaccccctacagcttcgccatgttcgtaaagatattcaggggcaatatcaatatcgccgtcattccagacagttaccccatagtctatataaacagaatcaaaaacggctttatcctttagtggtaaaaaagctggagaatccaactcttttgcaaaatcaaaaattttgatttccccattgctgaatctcagccatagtttatagttttcaagaggccttacaccgcttacctttaagggctgtttttgttctcctgcatacgcgattccatttttaatatacatgtgtggtccctccatcatcttaacggctctatcttgccaaacgggatatttcttaccgcattattccaggcagcatataattcatcttcatggatggccgcccatgcctggacaagctttaattgttttacaggtagacttccggccagcaattctccatctacccctacagacgcttcatattcggcataatacacatgaaaatgtggcttatggtgttgatcgctgtcactgtaaatcatcttgataataatgttaaaaaatctgcatagctcgggcattttgtccatctcctttattgcaatatcattataccaaatttgctatcaaacatcaatcacaaattggccccctcttgggaatattttgacacattctttactattttatatcagtattcatagtttctttatttcctctcaagcagtttgctgtaatattcaaatatatccttgtcctttatcaccctgtatcccgattcccatggttttagccccgccctggcgcgttgaaaaggttcttcgctatatacgatattcgttaattgatcttcgtcaaaccttccatatgtgtaccaaacggattctaatatcctatcaatacgtttatcatatatttttatttttccatcacgttttggtatttcatatgggcgaaagtttttgtatctctcatacaaagttggcaattcggccccatcgcccatccttggaaagtatcttcaaaaagcttgtgttttatattctcatttttgttcaagaaaacaagtgaccaagcataggcgtaataacagagtatttgtagttttagcagcgtcatagaatctttatataagaaccagtttactacactaaagactcccatatcaaatcttcctccgggttatattgttctttcggcaattttgtacaaacgctttcttgatcgatttcgacatccaacaatgaattataatattcaaacatgctttcttttgtaatgatcgaatctttatactccttcgcttttttccaaggatcttcctcgcgaaccagttctctcaaccagtatggttccttgtctccgtaatgatccaaaacggcacccatggtctttttccggcttgtggtaaatccatttatctcaccatgtatgtcattttcagagagtctatacaatccaatatgcttttcatacagttccttgcacactggcccattgtcccatgcataaaagttttcttcaaacaaaggttcatcgtcccaaactaaagaccatgcttggcaatagtatataagcttgtgaagtttccaaacttggattgctcctaattcatgaagaatatattttgcaacatcaaaaacattcatataaaacgcctcgcatttcccccaataaataaaaaaggccggattgctccggccctttcttttgttattcgcttttcaattcaggcaaaccagcaacgctggtcaacaagctaagtaccccagataatacagacgcactcgctaccattacccagtctacctcggagataaccacgctcgtgccgatcatcgccaccgccgtttgggccaccgtcttaatcgcgcggatgcccgctgccttgatccattgtttcatttgtttttcctcctaaaaaaataacaccctttcggtgtcaaagtcctatttttactgccagcaaccccagtagtgctaaggttgcccaatttacaatgatgcctagcacttgttcccatctgcgacgcggctgctcttcgatctccgccgttcttttttgcagttctttcagctgttccaacgtttgccggttgatctctgcctgcatggctacatgctcggcaaaatccaccgacaaggcgtccag

SEQ ID NO: 281 - DNA, 23845 bp, Unknown
  16S sequences of unknown bacteria
cgatgccaaagcattctgatactatatgaacctctgcgggtaattcaattgaattgtaaaataatgttttcataaataaatcctcctatttttcatatattttttttattgtttcaagataggtctttatattatctacaacgttttcgggagaaagaactttaagcttatccccgaacgaacagcaccaacctaaaaatgtagggctaacctgcacctcggctttaaaagtaaccatattgtcgttcagcggttccaacgcaatgttatcgccgaatacgtcgaatatcacgtccagaagacacttatcggcttgaaattcgacttcctgcgtttcgccctgaaacattccaaaaatagtctttttatgatgtttcagatcaatcggctcgccgttataaagatctttgctttgctcttccaccatttccaccctgtccatacggtcgattcggtaatgaacgacgccgggatgcttcccgtaataagcaatcagatagtaattatcgtcatcgaatatggtcgcaagcggatttacaaaataccgcttatggtctttacgatatacgcgctcgtgcttttcattgaaatcgaaatactcgaacgaaacctttttattgttctctatcgccgaattgatttcgcttatagcataaaagatattctcgttcgtgcttttagtcgtattaaaccgcacgatattactttgcagaagttcggcgcgatggcttccgccgagatcggcaatcttatcaagcaaaacttccgttttactcggcgtaacaaagctcgccgcttgcaccgcatccataagaatacgcagctcgggaacatcgaaacttctatcggcaacacaatagcaattcggctttcccggggacttttcgcaaagaacctcataaccaaaattattcagcacctctatatccttatataaagtgcgacggtcgcagacgattcccatatcggcaagtttatctataagctccgtcgtccctatataatgatcctcgtcggagtcctgccgtaagatttcgagtaacttcaagagtttgattttataagcgttttcttgcttcatcggcttttacctatacctatcgcattttacaataacattataccatattcgaccacttttgtaaagaacaaggtgtacaagaaaacagacacctttatgcataaaataagcgcaaccaaacggttacgcttaaaatgctactcttataaaatttcccacacgagtgttgctgtatcgcttgtttttatatcgtcgggctgaatatcgatattcgataaacaagccgcttttgccataaatcggtctccgacttcgtaattcgtatcggaatacagatttatttcgccccaattataatcgattgatacaagttcgccgagttttacgccggaagccaaacacagtatttcggctttctctttcgcgtttttcactgccgacttcagaagttcgccgctcaccgccgacggatctttcacggtaaacgaaatagaaaattcgggctttgcaagagattcggaaattgcagacaaaactcttgcaagcgtctttgtatcgaaatcgaattccacttttaagttatgattgcaaacgtatcctttgaagacgcttttgtaattaccgctcttatcctttacgctttcataattcgtgcgaacgttaaaatcggtagttttcacggaattcttttcaaatccgattttttcaagcgaatcatttataaggcttatccgttccgcggcaagttccattgttttatcatactctctgtcttctgttcccaatttcatagaaacaacaatcaaatcgggtttaaccgaaacattccctacgcctttaacggtaatcgtcttcgtcatcttacaacctccgataaatttttcagtgtagttattatactataaaaatcacataaagtaaataaaaaaggtgtccgccaaatcaggcaacgatacaataaaaaaattctaaaaatattttttaggttggtgctaaaatgtagggcaaacctcccttaaaaaatgactaaaatcggtatgttgtaagttcaaaccttgatttttcaaaaaaacgccaaaaatcagcaatgaaatcgacatggtcaactaacatatgttgaccttaaaatcaccctcaaaaatgggcaaaaaacacacaaaaagagccaaaaacgcttgtttttggctcttttttgaccgaatcagtaatttcggtcaacgtagatggctgcccctgacagactcgaactgacgacacttcggttaacagccgaatgctctaccgactgagctaaggggcaatatggatgcggcaactacctatcctcccgtgggtgagcccaaagtactttcggcgtaagagagcttaacttctgtgtttggaatgggaacaggtggatcctcatcgccattatcaccggaatggctccgcttgttggacttatacaagaaaagcgcaagtgacaggcttgcgcttttccctattatattatttcaaaatgagccagagtttctttaatagccaaaaccatcttttctgtcggatgcgatcgcggacgttttaattcttcaactgcgttgggagcatcatacattggcaaccccaaattacgcttaacctccgcaatatatgccgtatgcactttgaatccataattctcttcgacatatttctgtatttgtttataagtcgtttttgctttcggttttgaatcttctacttgcttttgtgtttcagccaaagaaatttgcccttctttctcaccaaactcaacttttacgctgatacgactgtcgggttctttgtgggacaaaagaaccagcgtctcaacgtgtgtataaaaggtaaataactacttcaaaatatattgaagtagtatatggaaaccattcttatcaatctataattgatactcttaaagatgtaaactatgcagattatatcaataaggttcaagtcctgtttttgctcagaaaaggcaaaaagtcagcataaaattaaaacctatcttactataggaaaaatcccctatttttaccagaaaagtagcaaaaaccctgaaaaactcatcgtttttcagggtttttacagtggacagcatttttatccactaaacatggtggaggtggtgagagtcgaactcacgtcttacgcggctgccaaaaaactttctacatacttagtttatctacttttcttaagaagcgcaacgcggctaaacacgctttgcgtcccgcaggaagctaaataatctcaaagaacacttcccgatccgcttgagatttttccgtctgtttgacgccgcacccccgaccgacggataaatcgggcgcgacgttcgctattaaataacgaatttacgcagcaagtgcgtaatttgcattgttatctgcatttaaatttagcggaatttttttaatgcggtcactccgtccgcagtatgcttattttttcgctcaccggcaatcgaatccggtgcacccccgtacaacgccgcctttcgcaagcggcgcttctctatatttattatacacgattttgactaaaaagtaaacacttttcaggcttttttcttcttatgaagcatttttttcacggaagtgcggtgttcttcgcccgacaaaagccgtaaaatatttttacggtgggcaaaccaagttaaaaagttaatgagcaataccaacataaacaacgcaatcacatacggattattaatctcagttctataacgaagccaaaaaatcactccctgccagagaccaaaccccgaaacgccgatcagcgatcccatagagccccattccgtgcccgcgatataaaaagcaatcagccaaaacgcggcgaaaccgacgagaaggaaccagggattctcgcagccgagattgatccaaaacaagcccaaggtggaagcgattcccttaccgccgtgaaatttcatagtaatgggaaaaatatgcccgataatgacgcatgcgccgcaaaagtagcgcgtaaaatcggaaacgacgacgtttgtgcccgaaaaatagtaacttctatagacaaaatacgtgatcagcgcgggaatgccgcccttgaaagcgtcgcagaaaaatgtgatgatccctaccttcaggccgaattcccgactcatattcatcgtcccgggatttccgctgccgattttcgtgatgtctttatgcttaaagcgtgcgataagtttcgcaaaattgaaacagccgatgagataacacacgacggccataatcaggaattgataccaattttgcgaaaaagaccactctttcataggtattctcctctcgtttcctttattcctcttctttcttttcgcggacgactatcttaatcggcgttcccgaaaaatcgtacgcggcgcgaatggtattttccagatatctttcgtacgagaaatgcaaaagcccctcgtcgtttacaaacagaacgaaaacgggcggacagacgccgacctgggaggaaaaatacactttcatgcgccggccgagataggagggcggctcgttgaggcggacggcatcgccgatgagatcgttgagcgcgcccgtgggaatgcggaaacaggcgtgcgcgtaaacctcctccgccgcggcgagaattttttccactcgctgtcccgtctttgccgaaatatatacggatttataataatccataaatttcagatcctgtttcagcttttcctcaaacttattcaccgtgtgggcgtctttttcgatcagatcccatttattcatgagaataacggacggcttgccctgttcgtgcacgtagccgataatctttacgtcctgttcggtaagcccttcgacgctgtccaccaccaaaaggcagacgtcgctccgccgcaccgcgtcgaacgcccgcatattgctgtaatactccacgtcgtcatctacattctttttcttgcgtatccccgccgtatcgatcagcgtatatttttttccgccccgttcgaacagagtatcgatcgcgtcccgcgtagtccccgccatgggcgtaacgatgctgcgttccgtccccaaaagcttgttgacgaggctggatttccccgcattcggcttgcccaccaccgctatcttgagcgaggaaacgggctccgaggtattttcggggaataagcttaccgcctcgtccagcacgtcgcctatcccgcgggaatgttctgcggagacggcatacggttcgccgaggcccagcgaataaaactcgaatattttatcgggagaatactcgtcgattttattgacgacgagtatcacgggttttttactgcggcgcagaatatccgcgacgtcgtaatcggagggcgtcagcccttcccgtccgtcggtaaaaaacaaaatcacgtccgcggtatcgatggcgacgtccgcctgttttgcgatctccttccacatcacgtcgtccgacttcagctcgattccgcccgtatctaccatggtgaaatgtttgccccgccattcgccgtccgcgtaaagcctgtcgcgcgtgactccgggacgattttccgtaatggaaattttccgtcccgccactttattgaaaaacgtgcttttccccacgttgggacgccccactagagcgatcaaaggattagccatatacactccttgccgttactgaatcattataacgtttttattgcgttttgtaaagaaaaaaagcggggttcctcgaagaatcccgctttctctttaattatccgacattaaaaggcgcggataataccgaatacgcagccgaacagataaatcgccagcgcgacccaatagatgaccttccaggctatctttttaccgcgggtgtagtcgtacgcgggtatcccgataccgataagcatgaaaagctgaccgatcaagttgagaacagactgtaccttgcccgaaaaaatacctccgaacaggaacatgaacgccgcgataatcagcgcaaagtagctgcatgcacggatcaaccagccctttcccgtgctctttctcgcagtcgtggtagtcgtcttttttgttgccataattatgtattcctccataaaaaatttatatgtcatgaaaacttccgctttggacgaaagataatcaacgatttattttctcagcagtcggaaagaaacacgccgtcctcgccgtccgtctccttaaagcgtacaaacaccttttcctttcgggaagtaggcacgtttttgccgatataatcggcacggaaaggcaattcgcggtgtcctctgtcgatcacttcgagaaggcgtatccttttcgccctgcccagcttaccgcccagcgccgtaacggcggaaatcgccgcgcgcaccgtccggcccgtatagagcacgtcgtcgcagaggacgaccgtttttccgccgatatcgaaatcgatctgcgtgcccttcaccaccgcgtcgcagcttaaaatatcgtcgcggtagagcgtgatatcgagaattcccagcggcagcgttaccccttccgaagccgcgatatagttttgaatacgcttcgccacgcatacgccgcgggtgcgtatgccgaccaggaccaccccgtcaagcccgtcgtttttctccgccacttcgtgggcgagacgtctgagggcgcggtcgagcgcggaagcgtcgagaatttctttcataattccactccgtattgcctgccgagcttttcgagcaggctttgaaaataatcgggcaggggcgcggtaaattccatgcgctcgcccgtggaaggatgcgtaaaaatcagtttataagcgtgcaggagctgacctgccaaagaaaacttttgcctgcgtatcccgtagagcgggtcgcccacgacggggtgacccatatactttgcatgtacgcggatctggtgcgtccgtcccgtctgcaaggtgaagcggcaaagggtgtagtcggagccgtaatgcgtcaacgtctcgtagtccgtaacggctgttttgccctttccttcgggcagaacggccattttgagacggtcggaaggactgcgcccgatatccgtgacgatgcggcccgagtcggtttttacgttcccttcgagcagggcgagatatatcctgtgacaggacttttccgcgatttgtttggccagcgaggcgtgcgcgcggtcgttttttgcgacgacgagcagccccgaagtgtctttatctattctatgcacgatccccggccgcaataccccgccgatcccgctcaacgaatccagcgcataaaggagcgcgttgaccagcgtgccttccgtatttccgttgccgatatgcaccgtcatgccctgaggcttgtttaccaccgccaggtctttgtcctgatagacgatatcgacgggaatgggttcgggctttacggcgtatgcctcggcgtcggggatctccgcggccacttcgtcgcccgcctttatttccgcgctcgccttggcgggacggccgttcaccgctaccctgcccccgtcgatcagctttttaatgcgggaacgggtgaaatcctccatctgttcgctcaaaaaaacgtcgaggcgtttgcagctttcttcggcgacgaaaaaacgcttgtccatgcccttattccgatttcggcagagcggcttcttcctccgccgcttccttttcctttttcatcgccttatatttccccaccggaatcagcgcgtcttcgtcgaaaaaaaggaaagaaagaatcagcatgatcgcccccgccgtaataaagaaatcggcgaagttgcacacggcgaacccgaaacggctgacgtccaccatgtccctgacccccatgctccccgccgttgcgggctcccacaccttataatatatcctgtcgatcagatttcccacgccgcccgcgacgataaacacaaacgcggtccgcatgagcttcctgtcctttttcaccttgaaatagaggacggctatggcgagcatcatcacgcctgtcgcggcgatcacggcgattttaatcgcgggcgaggcgtcgtcgcccagcccgtaggaaatgccgcggttatagacgatacgcagctccagccatcctttgacgacgggaatagattccgacggggttaaaaaggccgccgcggccgccttcgtaacctgatcgataaaaatcagcacggcaaagagcaaaatcccccacaggcaggaatttttcagcccctgcgcatttttttgtctgtctgttgtctttttcatattttatccttttttatcagtcgtccgaaaggccgagcgtttccagcaccgccttcagatcccagtcgccgcccgcgtccgatgcgggttccgcagaagaaaaagtgagttccgtatgtacggccgacgagccttcctcggcggacggttcttcaaaggtcggttccgctccgtccgttccgtcctcgaaaagcgatttcagccgtttttcaaacgtcgaaaatcgagccgacgtctcctcgtcgggatacgccgcgcgcacgtcctcgagcaatcgctgcgccttttcggccgcctgtacggcgagggctttttgagccgccgaaaaagcgtccaattcccgctgcatctcctcccgcttttcgcccgcggcgatgatggcgtccgaaatggactgtttctgcgcacggagcagggaaatctccgccgagagacggcggttttcttccttcagctccgttaaagcggcctgaagctctttcagccgcgtctcgtattcctcggagagagaggacagttcctcccggtggcggcgcgcggaatacagccccggcatcagccgttctctccgcgtatctcgtccagcattttactcttcagcgcgtgaagcttttcggaaagatcgaccttatacaattcgggcatatctagacggagatattcctcccagaattttgaaagctccgccttggaaaaggcctgcacttccatcagctcgggaaattcgtaaacgagctttccccgctttacgatggtatgaagcaagggctccgcgcggaaattttttaccgtcgtgcgtttccaggtttccagagggtggaagatcgtcaatggccgttcctcctccaccgcttcctcccgcatggtgatgaggtcggcgatcgccattccgctctccttatcgtataagcggaaaagatttttgaaagaaggattggtaatcttggccgcgttgtcggaaagcttgattttcggaatcatcgtcccgtcctctctgaacaccgccgccagcttatacaccccgcccagcgcgggcatctcctgagaggtaatcagctttgtgcccacgccccaaagatcgatttttgcgccctgctgcatgagagaggtcatcgaatattcgtcgaggtcgcccgaggcgcagatgatcgcgtcgggaaaacccgccgcgtcaagcattttgcgcgcctttttggaaagatacgcaaaatctccgctgtcgagacgtatgcccctcggcctgtgccccgcggcagcgagttccttaaacaccttgattgcattggggacgccgctccgcaaggtatcgtacgtatccacgagaagcaggcagttgtcgggataggactccgcatacgccttaaacgcctcgtattcgctgtcgaaatccataatccagctatgcgccatggtgcccgaaacggggataccgaacagctgtcccgcaatgacgttggaggtagaagaacagccgccgatcaccgccgcccgcgcgccgtaaatgcccgcgtcggggccctgcgcacgccgaagcccgaattccatcaccgccccctcgcccgccgcgcggcagattttggaggctttcgtggcgatcagcgtctggtgattgataatgttgagaagcgccgtttccgcaaactgcgcctgaatgagaggcgccttgaccgtcaggatgggttcgcccggaaatacgggttccccttcgcgcaccgcatagacgtcgcccgtaaagcgcattttttccagataacgcaggaagtcttcttcaaaaagcttcagcgaacggagatagtccatatcctcggcggaaaaacgccagtttaacagatagtccatcgcctgttgaagccccgccgccaaagaatacgtgatgagcttattctggcggaaaaagatatcgaatacggcctcttcctcatgctttttgtgcttatagaagccgtaagccatggtgagctcgtaaaggtcggtgagaagggtaagatttctcatttttcctctccttgtttcggttcctccttgggaggctttttcacataattttcggggaaaatcttacacatcatattgacgttggtgagataagccacttcctttttaccgtctttcagatactcggtaatcccgtacgggtcgccgtttgccgagccgatatacgcgccttcctttttcttattgataaggagcagcgtaatcaaaagcgcgacgcccgcagcaaacatcagcagggaaaacacaaacgaccattgaaccccgcccccgttcaggatataggacggatcgcgcagcggctccatgatcgagcgcaccagcccgtaattgataaagtaaaacgccacgttgaggccgttcggctttttggggttcttccaggcgtgcgcaaaaaggagcgccgcgacgacgagattgacgaagctttcataaaagaaaaacgcataatgccaggttccgcccgagatatcgctgctgccgccgaatatcttctgaaacgtcagcgtaaaggtctggagacagctgcctcccgcccccttattgatatacaccgcaaacgggaaaaactgcagcgcctcgttggtaacctccgcgccatatacctcctggttggcgaagttcccccaccggccgatcgcctgcgcaaggagcagccccacgacgatacagtccgccgcacggaaaaaattgatttttttgaaataactgaccaaaagaacgctgattgtgccgccgagtattccgccgataatcgaaagcccgccctggcgtatggattccatcgaaaaccagtcctttaagggcagtccgtcggtaatgcaataaaagagacgggtggtaacgagcgccacgggaagcgttacgcaaaaatatgtcaaaaacagatccgaggacatatttctgcgtttgaaaagaagcgaaatgacgaagaatgccgccaccatgccgctgacgataataatcgcatacgcgtaaattttgaacccgaaaatcgtgattccgggattatccgaagccaaaagagcattgagcataaagccgtctccttatttttccgataccgtatcctttattggacatagccgcctatatccgatacggcgcgaaaatgcctgcaaaaccgtacgctactacattttccttttcattatagcacaatataaaaaaatcgtcaaggcctgcccgacgatttttttaagtttccggaagttgttacattgttacgaaatgcggattttcaagggttttatgtgatttaatatgggaataaccgcaaacaaaagggtataattggcgacgcagttccatatctgtccgccgaaaaacatgcggtaacagacataactccaatacgtggcgcccgtaccgaaagtatctgttacatattggataaatttcgaagtaaatcccactttctgccaatagaaataaaatcccgtcgtattgatcccgatcgtacagacaaacagcgacagcaaacagacgagcgaaagctttacatagagcgaaccgcggaaattcgggcggaacagattgaatacaagccccgccagcagggcgatcatgcccgtggaaagccccacccaaggcatatacagctgtccccagttattataaaaatatccgcaaaggtcgccgatgtaacagacggcgaagccgctgaccggccccagcagaatccccgtcagagcggagaccacaatggtgatcgaaaactgaatgtccagcagccgaaattccagccacatatttgcgaccacgctgagagccgccataacggccatgtaagcgagcctgtgtccctgcgatttcgtaaggagcagatcggaaaaaatcatccgtttgagcgctgtgtttcctgtgttttgcataaaataaaaacctcccgataacagagaggtccgcgaaagtacggaaaacccgtttcaacgctccggaatacatcaaaaaggctttcctttaggcttagcggacgcgccacggcaccgcagaaaagccgaagttggatttgcttttctttcgttcatcgacaacgtcccgttcgatgacactttacgcgccggaggctactcttaaatctttaaccctattataatcgtctttgcgtttttttgcaagcgtttgaagcggaaaaatacataaaaggaaaattttcggaaatactgcctatatgggtttaattttcatcagaactatcatcgttttcataacgctgctcgtgattatgcggctgatgggcaaaagacagatcggcgaaatgcagcccttcgagctggtcatcacgctgctcattgccgagctcgcctgtatccctatggccgacacctctattcctctcttatacggtatcgtctctatcctgacgatctattttctgcaccagatcgtgtgcctgctggatcttcagtttaagccgatgaaagcggtattgagcggttcgccgagcatcgtgctcaacaaaagcggcatagacgacacgcagctgaaaaagaacaatctcgacgtttccgaccttatcgaaagcctgcgcggcgcgggatatttttccctcgacgccgtggattatgcgctatacgaggcgaacggctctttttccgctctacccaaatccgaatacgcagacatgcagagctccctgccgattattttaatcgacgagggaaaattcgaccagaaaaatcttgagctcacgaaaaggagcaggcagtactttaccgatattttgaaggaacagggctgtaaagatctgaagcaggtgctggtgatgaccgtagatggaaacggaaaatcttatctccagaaaaagggcgagaaatataaggtattcgatctcaattgggaggaaaaattatggtaaggacgcttgcgagcatatttgtttctctcgcgctgatcttggggatttccgcttacgatatttatacggtgggaaaaacgtttcataccttttcggaggcgctcgtcgctttgtacgaaaaaacggaagaccagaccgccacgcacgaggacggtaaagcggtgcgcgcttattggaaagaaaagaaaaagggattgcatatatggattccgcacacgagcatcgaaaacgtcgattatcagctcaacgaagccctggggtatctgtacgagaaaaaatacgacgacgccctgccgaaaatagaggtactcatcgaaatggcggagaagattccccgctcctattcctttagttttgaaaacatcttctaaaaaaggacctccgcggcaaaacgccccccgaagtcaatataactttggggggcgcttttttatttttgtgaatttttcagattttcctttgcggtagcgagcatcagcttgatacggttttcctggttgacgcgggtggcggacgggtcgtaatcgatcggcacgatattttcgtccttatacatatttttcagcgcgcgcaccgctccctttcccgcgatatggttgggcagacagccgaacggctgcgcgcagacgatgttatccgtccccgtctcggccagcgccgccatttctgcggggatcagccacccctcgcccatcttgacgccctgattgatcactttgtccgcacagcggcgcagatgctcgaaatcgtgcggcggctcaaacgtcccgtcgtttttgaatacctcgataattcctttctggatatggtaggcaaacttatacaccagccaatagataaagcccagcttttttgttctgccgtaaaattttgtatcgttaaaattatttacgatacagtacagaacaaaatccatcaacgcgggaacgacgggttcgcacccttccgaaaggagaaattcctcgagatgggaatttccaagcggagaatatttgacatagatttctcccacaatccccacttttacctttttttcgtccctgcgttcgactcgcttaaaccgcgcgatcatgccgcggataatttttttatactttctgaaagacttgccgttaaaggcgctctcaatcgtcttaaagcactccgtccgcgctttgtccgtatccccttcgttcgcctcgtaaggcttgcattggttgtagagggtcatcaaggtgtcgccgtaaaaaatgccgaacgccagctctatcagcaaagaaatattcatttctatgccgtttcccttttccaggcccgaaaaattcagcgacataacggggacctgcggaaattccgcctttaatgccttgcggatcaacgaaatatagttggaagcgcggcacccgccgcccgactgcgtaatcatcaccgccgtgcggtttacgtcgtatttgccgcttttcaaagcgtcgagatactgtccgatcacgcagagcgcgggataacaggtgtcgttatgcacatgcttgagcccctcgtcgataaccgcgcgggaatcgtttttcagcacctccatgcgatagccgcgcttgcccacgatatggcgtatgatgtcgaaatgatacggcagcatatcggggacgagaatggtataggtgtccttcatttcgggcgtgaatttgggatattcctcggtataatccgccgttttactcttttcgttttcctgcatatgccctccttacgcttccgcagaagcgaccgcggcttccagaaattccgcttcctccgccgcgcgggcggcctcttgagcctcccttgccgctttttgttcctctatcgccgccagcatactgcgcagacgaatgcgaaccacgccgaggttgttgatctcgtctattttaatctgcgtataaagcttgccgttgcgctcgagaatggtacgcatctcgtccgtcgtgatcgcgtctatgccgcacccgaacgaaacgagctgtacgaggttcatgtcctcgttatgcgcgacgtattccgccgaccgatacagacgggcgtgataagtccattgattgaggacgttgaccttgacgatcggcgcctcctcaaacacgctgtcctcggaaagcaccgccagctcgagagaggtgagcagcttgccgataccgtgactgatttcgggatcggcgtgatagggcctgcccgccaaaacgatgatctgccgtccctcggcgcgcgctttctccgtgatctcgcgccctttcctgcgcacgtcctcgtggtattccttcagtcgggcaaagccttcgtcgagcgcctcttccacctgctttttagagaacttatattttttcaacgcgcggcgcagatttcttaccgccgacccgcgcatgttgggatcgagatacggcatcacgaaattatcgtcgcaaagccgttcgttattggctttcaaaagctccgcataataggccaccacgggacagttatagtgatttgtggaatcgtgctcgtcaacgttatagctttcgcagggatagaaaatgaaatccacgtttttatccaacaggctttcgatgtgtccgtgcatcagcttcgcgggatagcatgccgtgtcgctggccaccgtatgctggccgcggaaatacagctcccgcgagctcttgtcgctgagcaccgtttcgaagcccagcttctcgaagaatcccgcccaaaggggcagctgctcgaacatgacgagctgaaagggaagccccaccctcccgagcggcttttttccgttttcgccaaagggagtaaggctctcctgcaagcggcgatatttataggcgaagatgtccaactcgtccgaacggacttttttgcccgcgccccgctcgcatttgttgcccgaaatatattttctgccgtccgcaaacgtgatgatattaatattgcattttgaggtacagccgtggcaattggcgcagcgggaagcataggtgaaagcctcgagctcaaccgccgaagccagcgagctggacgcgacaaaggcgggctgggtttccctggcgtacagagccgccccgaaggcgcccatcagccccgcaatcgcgggacggatcacctccttgcccgtttccttctcaaacgaacggagcaccgcgtcgttcatgaacgtgccgccctgcaccacgatatgacggccgagctcttcgggcgtcttggcgcggattaccttataaatcgcgtttttgacgatggacgaggaaagccccgcggagatatcttccacggtggcgccctctttctgcgcctgcttgacggagctgttcataaataccgtacagcgcgagccgagttcgacgggatgcttcgcaaacagccccagccgcgaaaaactttcgatatccatattcatcgccttggcgaaggtttcgataaacgaaccgcagcccgacgaacacgcctcgttgagcatgatcgaatcgatggcgcgatttttcaccttaaagcacttgatgtcctgcccgccgatatcgatgataaaatccacttttggattgaaatgaagcgccgctttgaaatgcgccaccgtttcgacgattccgaaatccgccttgagggcggccttaatgaggtcctccccgtagcccgttaccgcggcgccgcggatattcacccgctcctctcccagcgcataaatctctttgagcttttccgccacgatgtcgagcggctgaccgttgttcgactgataatgagaatacaatatcttcgaatcctcggtgatgaggatcattttcgtcgtcgtggaaccgctgtcgataccgagatacgcgtctccgcggtaggtgtggatatccgcgaactgaagatcgctgcgcttgtggcgcgcgataaaggcgtcgtattcctcacgatccttgaaaagcggctcgcccgtgacgatgtcgtcgctgtttttgctgttttcaattttgccgatgatctcggacatggacgcctcgtccgcattttgggaatagagagccgcgccgagagacataaaacagggcgcgttttcgggaaagacggcatgttcttcgtccagcttcagcgtctccgtaaacgcgcggcggagcgctttcaggaaaaagagcggcccgccgaggaacaatacttttcccttgatacggcgtccctgtgccagtcccgccaccgtctgatcgacgaccgcctgaaagatagaagcggaaatatccgattttgccgcgccctgattgaggagcggctgaatatccgattttgcgaacacgccgcagcgtgacgcgatcgggtacgtcttttctgcctgcaaagcgagttcgtccatttcggatacgttaatgttgagcagggttgccatctggtcgataaacgcccccgtaccgcccgcgcagctgccgttcatacgctgttcggtgccgcccgtcaaaaagataatcttcgcatcctcgccgcccagttccaccgccgcgtccgcgtcgggataataatggcgtatggcgataaaggcagcctgtacctcctgaacaaaggatatgtggctcttttcagccaagcccagccccgcgctccccgtaacggaggccttgaagctttcggcgggaaacagcgaatccacctttttcaattcttccagaacgcattccttgacgcgcgagaaatgcctttcatagctcttatataaaatttcgtccgtcgcggactcgattacagtcaccttgaccgtggtcgatcctacgtcgatacccaataattttgtcatcagcaacctctttccgatgaaaattttttctgtccgaaacttacggggcccgtcaaaggcctttccgtttcgggaataaccgtaaaagcacccgcctcttaagcggatacgtgtttattatatcacaaatacgttcaaaaagcaattccacgaaggcaaaaaccatgttaaatttttaccaaaaaaggcttttcccgatcgggaaaagccttttgtttcctacactttacgatcttatacgagtccgtaagccgtgagaatagagatattcgcatcgaaaatattccgcagaaatttttttaccgccacggaagtcgcggtatcgaaaaagacgctttcgttgcttttcagcatggcgataatcgcgttgaaattccgataaataatttgacagtcctcctcgatggccgtataggcttcctccgtgcccttctgctgaatggcgtacatctccaaaatcgtatcgttcattttatgcagcagctctgtctttcccgtggaaaaggcctcggctgtctcatggttcagatcgcttaataattgtataaaacgctgtaatttttcgtttccgacaagatccgttgccattataaattcactccgttttttttcagcagctcgcgggcggtttccacgctgtccgttcccgttttgtttttgatcggggcgaactctttttcccgctccaccacgaagggaagaacgctctccataggtttgatgagatccaccgccagcgtttcaaatttcttgccgttttccgtctcgggcttacagacgttccccttttcgtccacatattcgatctttttcctgacaatatggacaggtatgtgcctatcggccgtttcctcaagcttagacaggcggaaaagatagttcaaaatgacgccgtaacggtaggaaagactgccgttttcctctctttgcccggccatttctttcgtaagctcgtaatattcgataatggcagggctcgaatcctccagacagagcacgcccactctctcctcgggacaggccttcaaaaccactttcgcgccgcagttgacgccgcttaaaatggtcgcccccacaaatacgggctcggcgatccgctgtaaaacgttatctacggcataaatatttatccattctatgccgcgtttatgcagttcgttgcacagtcctgctcggcggagagaggaaaaccagccgccgtttccgttgggagacaatgcgggcatgtccttgctttcgagatagatttttccgttgaaatccaccgcgggagccatatcctgaataaaaaatttcacctccgtttcgggataaccgaaatagtcgtgagacttccaaaacgtctccgtttcgtcgcggtttttctcgctggtcatgatatacagcggcacgtatgccccgcattccccgattacgtcgagcaggttccgcatttgctgttcaaagatagataaatgccgcgtaacgccgatatcgtaggcgcccttcggcccttccacacccagcctcgtgccttgtccgcccgccagtaatacggccgctacctttccttctttgattgcgcgtatccccgcggccttgaattccgccatgcgacattcgatttctttacgctccataccttcgatcgggcggatatcccgcccctttccgctcaaatcctcgggatgtttcaagtcttcttcgaagctccaatcgatctttccgataccagcaagaagacgctgttttcccgcgtcgtccaattcatgataaaacctcaaaagctgggtctggtctttttctttcaataatttctgcgcctgctcgtaggtcatgctcttaccccttttgcgtatgtacttcttaagctcttactattgtagcaaacttttttgataaaatcaagcctttcatgataaatttttactttcagggtatttacttttcggaaaaaatgtgatacactaaacgtatgaaattaaagagatttttcaaacgtcttcttatccgttggcggaagaaaaaatacgacctgcgttttcccgtctgctgtaaagcgcacggggtgagttttgccgaccgtcagggcgctcttgcacaaagccgcagcggagacgaactgcagctcgttcaggttcccgtggaaaactatccgcagaacgtttatatctatagtatcgagctcaaccgtattctcggctatctcgaaaaaaatctctcggacaggctgacgtccgtcttcggaaaaggtttttgcctcgacgggcagatttcggaaattacgggcggcccgccctatccgtatttcggatgcaatatccgaatcttcgaaacgatggaaatgatgctgccttatcttttggaataagctcaactgtaaataaagcgtccgaacagaaatttttttgctcggacgcttgttttattttaattgattattcactcgctttttcttcggcctttcgttcgggcaatgtcacgatcacccgcttgatacaacgatcctccacgctcaatacgcggacgttcatttgctcggtactcaattcaaaggaggctccgtcctcgggcagggttcccatcattccgcacacataaccgccgaacgtctcgaaatgttcgctttcctcttcgggcagttttacacccagcgaagcttccactttatcgatgggcgccagtcccgtaatctcccattcggtttcactcaagcgggaaatttcatattcttctttatcgtctttctccgtcagatcgccgacgagcagctcgagaagatcgtgcatggtgacgatgccgctcattccgccgtattcgtccaccacgacggcaaaatactcgcgcgaaattttcattttataaaacagcgtatttgcaggagtattttccgtgacgaacacagccgccgaaacggcttttttcattacgttttcgcgcgacttatcgtcgagacggaagtagtccttggtggacagcacccccgcgatatcgtcgatccccttgccgcaaatgggataataagtatggcgagtagaggcgatacgcgccgcccattcttcgtcgctttcggagagaaacaacagatcggtatccttacggtgcgtgcatacctcgccgacagtctgttccttaaactcgaaaatatttttgataagttcgttttcctcgctgtcgatcgagcctttttcgcttcccgcttccgccatcatcataatttcttcctcggtaacttcctcctcgtcctcgccgggattgatgccgaaaagccttaaaagtccgtttgtagaggcggtcaaaagccatacgatgggcgcaaaaattacggagacgaaacgcaacactcccgagattcccaaagccgttttttccgcacgcttcattgcaatacgcttagggacaagctctcccaaaacgatattgaaataagccagaatcaacgtaatgagaatgacgcaaatggaattgatgacgctcgcgggcaagggaagccctgcctttaccaagacgttcgttaaaggtcccgcaaaattatcggccgcaaatgcgctgcctaaaaatcccgccaacgtgattgccacttgaatcgtagataaaaaacgtgcgggttgagaggtcattttgacgaggcgctttgcgcgtttgtccccccgttccgccattttttgcagctttgtctcattggttgagattaccgcaatttccgcgctggcgaaaaccgcattaagaaatataagtacaaattgtagaataattgctccaaacataaacattttcactccgaaaaagattttttaatacaaaaaggcataactcatacgcaatacacgtataagttatgcttaaatcagaaatcttttcgaaattaaaacgaaagtcaaaagcgaacttgggctactactgccgtctgcgtccacattcaatctccttataaaagtcttattattattttacttcatttggagagaatttgtcaatcattaatgggctaaaaatataaattttttcactttttctttcaattttttaaggaaggggcttcaaacagtcgagtttagccttccagaatgtacttttttgataggccgacaatgcctctgcgggaacatatatatttttcaaggcattgcaattcgtccaaatagccgctttactaatagtcgaaagctttgaattatataaatagatggtttctattttcgaacaattttgaaacaatgtattattcatgatggaaatataactttggggaacaactagttcacgcaaatccttgcaagttcctccaacgctatataaatttccggaaatagtcgttaaggccgagcctttatccgaaaattcaggaagtatcattttttcaggtaaaatagaaaatccggttttattttttatagaaagtctagttgcttctatcgtaaaataatccaatcccgaagaaagtctggttatttcaaaaattttatcttccgtaaccggttcagtcaaagtatagcttccgccttctgtcgttctcccccgtccgtctatccaaaaagacaactccccgtattccgcataatttctgacgctgacggttgtctcgaaaatgccgccctctgcaatctccgccttttttaccgatatatccagaagcccctgatactcgctgcagtctcttatttcgcaggtatagcgcgtaatgcttccgcaaacaatttcctgcgcttctaccgtttctccgaagcaaacgagcaagcttgccctgccctccgacagagaagttatgacgccttcggaatctacgagaaatacagacggattggcggacttccaatatagaggtataaacgcgctgagatcgtaaacggtctccaggtcaggatattccaccactatacttgccgaagccgaaaaggtctctcctgtcgctaattttctgtcggggactgccaataatgagaggcgaatattcctttgcgtcacagcttcggactcttgctccgaaaggcccgcggcgcaatccgcactctttgctataaaattttttaacagtaataaagcctcttccgaatagcttatatttgtgtcattcaaagcggcggtcgccacataagatacagaacgggccgaggataaacaatttttcggaaaagccgcataagtataagtcacggcttcatccgtagtcgtttctacgtatgctacggcggcaaattccaaattggtatttgcatataatatttcaacgaccgagccctgaacaatataacctccattctgccaaactggttcgcaaaccatcttcaaggcaggctttgccccatattccctctctaattgagcgagcgcctcaacatagttaatcccatcctcccctccgtttaattggattgctttttcaaaataataaacgggcgctatcacaaatttgaagtgctcgttttcggatgactttaccttttccaccaatgtctcgggcacatgtgctttgaaacgaatccccgttacagtatccaaacgaatacttgccccgttctgcatgacaaatccttcatatgtttggttgccattcacagtatcggcagaaagcagcacattagctttttgctttacagtcttgtttggagtaaacaagcaattctttggcgtaaaagttatatcacatacataaggatcccgggcggttgtatatcctttctgcaacactgcgccgacaattagcaataagaaggaaacaacaaacaacaaaatcgaaatcagtacagtgcttcgtgtaaaaatttttttcctgactctgctcctcatacgtaccccctataaaatatagtattttgaaaattattattcaaatattaaatataatatttgaataatattcgttcgtaaaaatataatttatttttacttttccattttaccatattttaccaataaaaaacaagtcttttaagtgatattttagctcttatgtctatttttttaagataaaaatgcaattttcaaacaagagagacctgcaaaaaaaagtcaaggaaaaagcaagaagtttttctaagaaattttg

SEQ ID NO: 282 - DNA, 2005 bp, Unknown
  16S sequences of unknown bacteria
cggacagagcggtgttttcgttgagtttcaattcgtcgccgacgcgcttgaaacccataaggtattgcttttgaaaacaggtcgtcaatttgccgctgacgttcttttccgagagggaaagttgtgcggaaagttcctgcacggtgtagatatgctcttcgacgacggcgctcacgagccgatacagcgaacgtttttcggcgtagcctacccacgcgacgggcgctccgtagaacccgacgacggtcgcgccgattccgatccccatcaccgccccaatgccgtttacggctccgagcacgatggcgggaattccgccgacgaaaagaaaggacaagatcgccgcgagaaaaaaacttttgcgaagagcgctgcgaatgggttgcattagggaaacctcgtgatgtatttataaatagtataagcgaaaacgcggtgtttgtcaaatgctctttataaaataatattgacttttcagccgctttatgctatattatttccatgctgaacaacggaggatactgtaaaatatggctattttaaaggtaatcgagtggacggataattcgcccgacgtcatcgtacataaagtggacatggcgggaaacgtgatcaaacgcggctccgctcttaccgtgcgcgattctcaggtcgcgatcttctgcgataaagggcgcatggcggacgtgttcctgcccggtttttataaactggataccgacagccttcccttcatcacaaagttactgtcctggaaatacggtttcgaaacgccctataaatccgacgtgtatttcgtcaatacccgtcagtttaccaacatgaagtggggcaccgccaatcccatcatcatccgcgacgccgattacggcgccgtgcgcgtgcgcgggttcggtacttattctttccgcgtcaaggatgcgttcgtgttcatgaacgaactttcgggcacgcattcttccttccgcacgcaggacatcaccgactatatccgcagtatgctcgtgatgggcatttccgacgccgtcggcgaatgcggcattcccgttttggatatggcggggaatctgatggagttgagcgcgatcgtgaaaaagacgctttcgggcagattcgaaggattgggcctggaactttgcgcctttaatttcgagagcctttccatgccgcaggagttggaaaaggcgctggacgaaacgacgaaactgggcatgatgcgccgcaatatggacgtttatacccagatggcgcaggcggacgccttgaaagaggcggcgaaaaatcccggcatggcgggcaccgccatgggcgcggggctcggctggggcatgggtatgaatatgggaaaaatgttcggaaatgcgcccgcggcgcccgtacagagcgaacctgcggcgcagagcgcggggcgcaaatgttccgaatgcggcgcggcgctcgctgcgaacgcgaaattctgccccgaatgcggcacgcgcgttctgaccgcctgccccaaatgcggcgccaaacttcccgctacgggcaaattctgccccgagtgcggcgagaagatccgctgacgcggacaaaggagcggttttatgactgtggaacaaattatcatcttggtgcttgcggtactgcttgctttcgccgtggtggcggtgatcgtactgcttgctgcgctcagaaaaaaacagacgggcggccgcgccgaggacgtgaaaatcatcgacggcgtgcgctattcgagatcggacgccgtgagcgaaaacggcgaagtacgggcgacgcaccgcgtgggggatttcgtccttgcccgcggcgaagaaaaaaccgcggaaaagaacggcgaattgctgcccggaacgtacaccgttttggcgacgagcgacgggactgcggctttcaagttgcgcctgggcgggctggtgcgcgaatataagcacggcgataccgtcgttctgggcgacggcgagagcatctgcgccgtatcttgctcggtaattttgcgttaaacgcg

SEQ ID NO: 283 - DNA, 10125 bp, Unknown
  16S sequences of unknown bacteria
taatccagggtttcacccgtctgtgcaaaacccccggcttcgccgggggatatttatttttcatttcgatcagcggaaaagggacagaatcacgctactcaaagcagagcaaaaaagagcgatgaccaacaccaaggctccgccgggcaaatggaaggctacgccgggcagaagcatccccaccaaggcaaaaaacagcaccatcaacgcagcgctgcccagggcgccatacagccttttgggaaagcgggcggaaagcagaccgcacagaattcctcccaggcctacggccagatagggacaaagagacagatattccgccggaatcaccccggaataaagggaaaaggccatgatccacaacagggcaatgacgcacaggatgccccctccagcggcagtgaacaaatggatggtggcctgcacacctttgttttcttttttcttgtcttccggcataaaaaaacctcccccatcaagatacacagtatctttatgagggagattcttttttcagtacggtttttacttcttttcctcgccgttctctttggcctgcacacaccattttttcatggtgagcttggtgcgatccgcgccggtttcgatgacgatctcatcctctttcaccgagatgatcttacccacgatgccgccgatggtgacgatatgatccccggcctccagggaattgcgcatgatccgctcttttttctcccgcttctgctggggacggatcagcaaaagatagaaaatcgcaaaggtggctacgatccagatataggcggtccattccatagttcggtatcctcctgatgatagacagtagtaaaagtatactgcattttttctccggtgacaagccccaatccctgtttcgccgaagccttagatgcgttttcccagtttttcgctgttttcccgccggaaagcttcaaaatttccctgatccagcgcatcccggatctgctgcatcaggtggttatagaaatagaggttgtgggtgacggcaaagcgcatggccagcatctcttccgccttgaacagatggcgcagataggcccgggaatacccctggcacaccgggcactggcactgaggatcgatggggccgtcgtccagctggtacttggcatttttgatgttgatgataccctgggaggtgaacaggtgtccatgacgggcattgcgggcgggcatgacgcagtcaaaaaagtccacgccccgtgctaccccttcgatgatgttggaaggtgtgcccactcccatgagataccggggcttgtccgccggcatatgggggtccagctgctcgatgatctcgtacatcacctcggtaggctcccctacggccaggccgccgatggcatagcccggcagatccagctgagcaatctgcttcatgtgctcaatgcgcagatcggtataagtgccgccctggttgatgccgaagagcacctggccggggttgatggtgtcctcctgctgctggagccgatgcagctcctttttgcaccgctccagccagcggacggtgcgggcgatggaggccttcacatagtcatagggggccgggttttcgatgcactcatcaaaggccatggcaatgtcgctgcccagattccactggatgtgcatgctctcctccgggcccataaagatccggtggccgtcggtgtgagcggcaaaacgcaccccttcttcggtgattttccgcagtccggccagggagaagacctggaacccgccgctgtctgtgaggatggggccatcccaccgcataaatttgtggagtccacccatctgacggatcacatcatccccgggacgcacatgaagatggtaggtgttggacagctccacctggcagccgatgctccgcaggtccttggcagacagtccgcctttgatggcggcctgggtgcccacattcataaaaacaggggtctggacggtgccatgaggacaggtaaattcgccccgacgggcccgcccctcctgcttgattactttaaacatggtctcctccttcaatggataagaattcttcctggctttcggcggacaattccacttcccgcaatgtgcgctggatctgccgggtgcgcacgcccaccagcttgtccagctcttcgttggcctggttcagccgcttctgggctccttccagcaccaaggcgaatttagaaaattcgctcttcaccgcgcccagcaccttccacacttctgccgagcgcttctgcaccgccagagtgcggaagcccagctgcaaactattgagcaaagcggcggtggtggtgggtccggccagattgactttgaactctttttgcagctgctcgatcatgcccaggcgcaccgcttcggcatacagcccttccaccggcaaaaacatcagagcaaagtcggtggtgttcgggggatcgatgtacttgtcatgaatgtcttttgcaaaactgcgcagccggtcccgcagcacccggcgggcctgctccacctgctgggcgtcccctgtgtcataggcatccaacagctgctcataggcatcccccgggtatttggaatccaccggcagccacaccggcttttctccgtctcccggcagtttgatggcaaattccaccacagcggcgcttccctttttggtgcacacattccgggcgtattgctccggcgccaggatctgctccagaatggcccccagctgcaattctcccagcgtgccccgggtcttcacattgctcagcacctttttcagatcccccactcccacggccagggtctgcatttctcccaggcccttgtagacctgttccagacgctggctgacgatggcaaaggaatcgttcagctttttctccagggtggtctggagtttttcgtccacagtggagcggatctcatccagctgacgctggttctgccgctgcacctgatccagagaaaagctgagggtgcgccgcaggttttccagcttttgctcggtctgcattccctgctccacctgctgctgccgcaggatgttcagctgttctcccagagcgcgggactgggaagaaagcaaagcttccatctgggcccgcagggcggccagctcttcattttccttccggttctccagctgccgggccagatcgcccagctttttttgctgaaacaccagcagaacaagcattgcaagcagcagaaatgccgcaatcaaaagagcgaaaaattccatctttgctcctttcttcgcctcttcaccaaaaaagcgcctttccggcgcttttttggcattgttttctcagccgatcagatccaggatcatgccggcgtacatcttgcaggccgagatcacatctttcacatccaccgtctcgttataggtatggatgccttcggcattggaggggccatactggatggtggagatccccgcttcccggaaataccgggtatcgctgctggcccactgataagcggcgatcaggtcgatgtccatcagctctttggcgcaccgccgggccgaaaggacgatgggatcattgatagagcagtagtttccggtgcggccgccccggtactctgctttgcaccgatcggcaagacccagacgctggatgatctcggccaccttctgctgcacctgctcaccgtctacgccgatgggcacccggcagtcgatgtccacctggcagctgtcggccaccatgttgtacttggtaccgccctggatgacgccgaagttcaccgtcacatgatccatgcagttttccaccccgggcaccttctggatatcccggatggcctgcttggacacctccatcacctgggcaatctctccatcgtagctgccatggatctcccgcagctccttcagggcctggcacagttccatcatatcctccacggcgctttggcccacataaggagaaagactcccgtgagcgctgcggccggtgagggtcagatgaatgcccaggttgcccttctgccccacctcgatgttgtcaaaaccggtgggctcgggcacgatgccccagtcccctttgatgtatccatgctcaaagagccactgggtgccatggtatccgccggtctcttcatcgggcacgatggtatacagaatttcaccgctcagctcggcgttgtgctgagccagcatggcaatagcaaagagggaggaagccagaccgcacttcatatcggaagtccctcttcccagaatacggccgtctttgatctccccggaatagggcgggaaatcccactttttttcgtccccggcgggcaccacatcgcagtggccgttgaacaccacccgtttgcccccttttttgccgaaggtggccagaatgttggggcatccaggcaccgggcggacgatctcataagggatatggtatgtatccaggaaatcgcaaataaacttggtcacatcctccacatcgccgggagggttttccgaagggatgcgaatgatatcctgacaaaagcggatcaggtcctcctgccgttcatcgatgatcttccaaatttcatgtcgctgcataaaaacactcatcctttctggcggccagagggccgcaacagtctgattatagcacatcccgctccctcataaaagaggccggagaaaaaatcattcctctatctcgccgatgaattcccgcaaaagggaatcaccgggcacattctcctgggaaagagagggcagaaattccaaaaaccgccggagctttccggtaaggcgatgctggggcaaattttcccctgtgagcaagctggcatagaccgctccttcatagggcataaaggaatccagctcataatcggcaaagcgcttgaagggcaggatatgatcttcctcccctgccgtcacagagggcagaagatccatggtctccaaaaagctgcggccccggtaacggctgtcccgcagcagacggcgcatcaggcggatatgggaggggtgaagacactccccgttttcaaaacgcagacgggtacgcacgctgatatagatccggctggaaaaatccagagccgccccggtgaccagagggttcagcgcgtggatgccctcaaaaatcacaaactcgtcgggctggcgctggaacaaaaaccccggcttacggctttgggtgggaaaatcataataaggcacataggtgggacgacaggcgaaaatgtcctccatctgtttggaaagcagggagatatccagccggtagggggattcaaaatcgatctccccgtttgcgtcccggggcacatcagggttgatggccggcagaaagtaatggtccatggagatggcccgggccggaaagcccagtgcgtgcagctcctgagccaggcggctggctgtggtggtcttgcccgaaccggagggcccgcaaagaagcaccaccggctgtcctttgtgctttgccagctgccgggccaatttgcggggcttttcccggctttcctcttcacagaaagcgataaactcctcctggttttcttccagctgccggcgcagcttttccatggaataaaaagtgatattcatcggtttatttctcccatttgtcgcaaagttcctggatgcggtcggccagacgggccaggtccttgttggcccttccctggctctgttccaccagatcggtgagccgctgcaaagcggccttgagccgggccatggccggggagggcttttgcttgccccggcgcaccggcaccagcaccggcggatggagatgggcccaggccccgttcagaaggtcatagctggagccgctgtatggcgcttcggcggcatagtgcagctgggtgcgcagccgctcggcaaactgctcacacacctgggcttccccgtgctggacaaacaccagccggggcttgggagaaaaatactgaagccagcggatcaggccgtccacatcagcatggccgctgatgcccgccaggcttttgatgtgggcgttcacctggatgtcctccccgaacagccgcacccgtttggctccgtcaaacagcgcccggcccagggtgtttttggcctgataacccacgaacaggatggtgttttcccgccgccacaggttatgcttcagatggtggcggatgcgcccggcttcacacattccgctggccgacaaaatcaccttgcaccgctcatcaaaattgatggctttggattcttccgccgtcaccgtggtgatcaggccggggaaagtcagggggttttctccccggtgcaccatttccatggcttcttcgtcaaaattgcccagcatattctcccggtagatgtgggtggcctcgatggccagggggctgtccagatagacggggaaatcatcgtggccctgaatcaacccatcccggcgaatcttgtgaaggaaatataagagctcctgggtgcgccccaccgcaaaggagggaatgaccacgctgccgccccggtcaaaggtctcctggagcacctgggtcagagcggtgatgtaatcgggcttttccccatggctccggtcgccgtaggtggattccatcaccacataatcggcctggagaatgtactggggatcgttgagaatgggtttgccggtgttgccaatgtccccggaaaagacgattttccgctcctgttcctcttcggtgagccacagctcgatactggaagaacccagcagatgtccggcgtccacaaagcgcacatccacccccggggccgcggtgaaccggctgccatagggatgagggcaaaacagctccagcaccccttcggcgtcctccatttcatacaaaggcacatacccttccccgccggagcggcgggctttccggttgcgccattccgcttcgaacatctgaatatgggcgctgtcccgcagcatgatgtcgcacagctggcaagtggccgtggtggcatggacctttccccggaagccctggcggtacaaaaggggcaaaagtccggcgtgatcgatgtgggcatgggtgaggatcaccatgtccacctggccgggagcaatgggcaagccaatgttcacataggtgtcctgtccctgctccatgccatagtcgatgagcacattctgcccattcacctccagcagactgcaactgccggtgacttcatgggcagcgccgataaaagtcaatttcatatcgtttctccttgtctcctcgtctctatgaaaaagagtgaatcggtttgcattcctttcttttattatacaaaataagccactttccagcaagtgctggcagtggttgaatcgaaaaaggatttgcggtataatttctttgtatgtttcgctagcgtatagggagaaaaacacatgaacaaacgaaaaaaatccattctttccttatttttggccgcgctcctgctggtttcctggttgcctgccccgccggcccaggccgcagccgccgaccccattttgcgcatcggcctgtattatggcacaaatgccctacccgccgccaatttgcagaatgtgaccggctatggaagcggctaccggttggggtatttttccggggatcaattcgtctccctgctggagacctccacagtggagatcaccgtggtcaaggacaagcagctgtatatcaatggagaaaaggactattatgatgtggccccggcctcctatcataccgttatccggccctatcacctgcaaaccagccgcaccttctcttcggcatcggaagcccagaattttgcccagtccctttcctctctgggcgccttcccggcctatgtaaacggcagctatgtggtgcgcatcggccagtattcctccacttcggaggcccaggcggcccaaagcgccgtttcggcccaggccggggcggtgagtgtgtgcggatacagcgaaagctgctataccatcaccaagaccggcaccaatactatcctgtttgaactggacagcggcgggaattatctgggcatccaacccatgggagccgccaagccccagacctggttcaagggcttcaaatactacggcgcttttgaatacaagcgaatgcagggcaatgacctgacggtcatcaatgtggtggggctgaccgattatgtcaaaggggtcatcccctatgaaatgagtgcctcctggcctgcggaagccctgaaggcccaggccctgtgcaccaagtcctactccatgaacagcctgggcaagcattcttcccagggctttgacctgtgcaattccactgactgccaggtctaccagggcaccaacgccgccaacgccaattcggacagcgccgtggacgccgtttatggccagtatatcctttatgacggccagatcgcccaggcctattaccacgcttccagcggcggggccaccgaggatgtggagaacatctggacttcctatgttccctatctccggggcgtggaggacacctatctcaaaaaccccgtcaactggagcgccactttcaccaatgaaacggtggccgccattctgcgcagcaaggggtattcggtgggcaatgtgaccaatgtgtatgtgagccacaccacctcccacggcaatgtggacggcctcacggtggagcaggacagcggcgaagacctggtcttttccaaatccagcgcccgctccattctcaatagctcggcctacggcgtttccatcctcagtcaccgctatactatttccggcggttccggctctggcggcggcaatgtggacggcttcaccatcaacggccagcccttttcttccctgtcgggaatgtacgccatcggctccggcgggatcatcggttcggtatattccggcagtctgtccgccattaccggttccggcacggtttccatccccgccacccagaaggccaaggccagcagcggcacctacaccgtcaccggcacgggcaacggccaccacatcggtctgagccagtggggtgccaacggcatggccaatgcgggattttcctatgaggatatcatcaaattttattttacaggagtgcaggtaggacctgctgcataagaattatgaaaaaaagtgatttttattacgaccttcccgaagaactgatcgcccagactcccctggagaagcgggacacctcccggctgatggtgctggacaaaaagaccggccaggtgcagcacaagcatttttatgacatcatcgattacctccaggcgggcgactgtctggtgatcaatgacaccaaagtcatcccggcccggctctatggacaaaaaaccggcaccggcggcgccgtggaagtgctgctgttgaaagacctgggagacagccgctgggagtgcatcgtctatcccggccgccgtctgaaagaaggggccaacatcacctttggcgacggccggctcaccgccaccatcgacaaagtgctggaaacgggcaaccggatcatctctttccactatgaaggcatcttcctggagattctggaggaactgggggaaatgcccctgcctcactacatcaaagagcacctttccgacccggaccggtatcagacggtctattgccgggaaccgggttccgccgccgctcccacggccgggcttcatttcaccccggagttgatggagcgcatccgggaaaaaggtgtggtctttgcccccgtcaccctccatgtgggcctgggcaccttccgcccggtgaaagaagaggagatcaccgatcatgtgatgcactcggaacagtatttcatcaccccccagtcggcggaaatcatcaaccaggcccggcaatcgggccaccgggtcatcgccgtgggcaccacctcctgccgcaccctggaaaccgttaccgatgaaaaccatgtgacccacccaggcacaggcaataccgatatctttatctatcccggctacaccttcaaaggcctggatgctctcatcaccaatttccatctgccggaaagcaccctggtgatgctggtctctgctctggccggacgggaaaatattctcaatgcctaccgccaggcggtagaggaaaaataccggttcttcagctttggcgacgccatgttcatctgctgaaaacacaaaaaaagaagcccttttggggctttgaactgccccatcttgtgcggacagtacaaaaaagccccctggcaggaaatattaag

SEQ ID NO: 284 - DNA, 12026 bp, Unknown
  16S sequences of unknown bacteria
agaagaagttgattatggaacttttatgagtatgaccgaggagcaaaatataggccgggttcaggtagaggacaatcaaattctcttttcggataaggatggaaccgtcatatataaaacaggcgtgatgaacgatcccggtcttatagaacgtcttaaagcatcgggcgctgttttctcatcgcctattgtaaatgaagcctcaccgatgctgtcatttttactgacatggattatgccattggtaattttcatcgttctgggccagataatttcaagaaagatggtagacaaggccggaggcccaaattctatgatgttcaatatgggaaagagtaacgccaaaatatatgtgaaatcttcggatggtattaaattttctgatgttgccggagaagatgaggctaaggaaaatcttgcggaaattgtagactatctgcacaatccggataaatacaaggaaatcggtgcttctatgccaaaaggtattttacttgtaggccctccgggaacaggcaagactatgcttgccaaggctgttgcgggagaagccaacgtaccgtttttctctatgtccggctcggaatttgtagaaatgttcgtgggaatgggtgcctctaaagtaagagatttatttcagcaggcaaaagaaaaggcaccatgcattgtttttattgatgaaatcgatgcgataggtcaaaaacgaggaaacggaaggataggcggaaatgatgaaagggagcagactttaaaccagctgcttacagaaatggacggttttgaaggtaatgctggagttgttattctggctgcgaccaacagacctgaaactcttgatgccgcattaacccgtcctggacgttttgacagacgtgttccggttgagctgcctgatttaaaggggcgagaagaaatattaaaagttcatgcgaagaagataaagttagaaaacgacattgacttttctaaaattgcgcgtatggcatccggtgcctcaggtgcggagcttgctaatattgtaaatgaagctgcgctgcgtgcggtccgcgctgggaagaagtatgtaagtgaacaggatatggaagaaagtattgaagttgttattgcagggtatgaaaagaaaaacaaaatactcaccgacgacgaaaaacgtgttgttgcatatcatgaaatcggtcacgctctcgtcgctgcaatgcagaccaattctgcaccggtacagaaaattacaatcgttccccgtacatcaggagcgctcggctacaccatgcaggtcgatgaaggcaatcattatcttatgagcaaggaagagcttgaaaacaagatagctacttatacaggagggcgtgcggcggaggaaattgtatttaattccataagcaccggagcatctaacgatattgaacaggccacaaagcttgcgcgggcgatgattacacaatatggaatgagtgatgattttgatatggtggcgctggaaaccgtaacaaatcaatatcttggcggagacacatctcttgtctgctcatccgaactgcagtcaaaggtagattataaggtgattgagcttgtcaaggagcagcatgagaaggcaaaacgtattttagaggaaaatcgtaccaagctggatgaactggcacagtttttatatgaaaaagaaacaatcagcggcgatgaatttatgaatattcttaattcttaaagcaatatgctgcaaaaaagcgcggtcaatcttaaaagcagattgaccgtttttttgtgggtagattctgattttgcatgctgcttttatatttgcttttcaatgttcaattattttctatctttgagcatcgcaaattcacgcgctatacgatcccagggaaaacctatgacattgttaatatcgccgtttatgcgctctatatagttgccgaaagtgccctgaacggcgtaaccgccggctttgtcatatggctcgtcggtttttacatattcagcaagcatagcatcgctgtagtttttgaaaaatacttcagtaacttcacagaaaacctttcttttaggtatgcctgtctgaattattgcaatccctgtagcgacaaaatgtgagctgtttctcagctttttaagaatttgcagagcatcgtcagcatcgtggggcttgccgatgatgccgtccttatagacaatcgtatctgcggctattatatacggcggctcgtcagatataccgcatttgcgctttccgctgttctgcaaagcgcggcagcagctttcactgagcagctttgcttcaacattcagggcctttttcaaggataaaaacattactgcatcctgcattcctatgtttgcggggagcgtttcactgcagtcaggctttattataattggatttatgccgtgagcttccatcatttctattcgcctgggtgatgaggaagcgagaattatattttcgtttttcattttttacttccattttgatttaaattttatcattatcattatggcatattttttggtatttttgaagtaatctatataatattttcagctattttagggcataatgtactcaaatgagagcttttgaatagataagtgcaaaatataaatgatggaaaagcggaggaaagcataaaatgagtaccaataggaatggaaaaacaagtgggggaagcggggctaagaccatacagaaaaaagaagtggcgaaagcatatgaaaaatacgccgaaaaatttacacccaagccaacatatttaaaaaattgcattatagcctttatcgtcggaggccttatatgcatggcagcgctttatgttaagaacaggcttactgccggaggcataggcgaggaggatgcaggaacattcgtgacaatgatgctcgtctgcacggcgcagcttttgacaggattcggctggtttgatacaataggtaaggtatgcggagcaggagtaatagtaccgattacgggctttgccaattcgatggtggcgccggcaatagagtataaaaaagaaggaattgtactcggagttggttcaaagctgtttagccttgccggacctgtgctcgcgtgcggcatatcggcggcgacggttgttggtattatctactgggctatggataaattttaattagttatagaacttgcagaaacacatatgaatttatgatatatgataacaaaggagctgatttaatgcgagtgtttgatatgcactgcgatacgatgacgcttataaataaaaagggacttgacctcagtaatgagcaaacggcggtatcgctgccaaaagcgcagcttgcaaaggcggaagcgtatgtgcagtgctttgcgctgtttgtcaaaaacgatgacagcgatgaagcggaaaaagaatgggcagagcactatgagtggtttaaaaatcagatggcgaaatattcggagaaagtggaacaggctatgacatacgatgatattttgcgcatcaccaaggccggaaaaatggcagccatactgacgacggaaaatgcagcagcctttggcggcaggctcgatcagattttgaagatgagggaaaaaggctgcctgatttcttcgctcacctggaatggtaaaaacgcgcttgcgggcgggtcgcaggcacaggaatacgggctttctgattttgggcgtgaagcaataattgaaatggagcgctgcggaatggttgtagatgtatcgcacataagcgacagagcaatgaacgattttctgaaaacagcgcgccggcctttcatagctactcactcaaatgcaagggcagtttgcagtcatatgagaaatttgcccgatgaatacataaaggaaataataagacgcaaggggttaataggaataaactattttaaagaatttctgcgcggctcagaatataaaaggacgaaaagtgcagaagaaatgcagaaaatgtgtgcagcagaagctgggacggcaaaaagctcagaagtattgagaacagaagaagctgggcttgacgatatagctaagcatatcgagcatacactaaagctgggaggtgaaaaggcgcttgctctgggatcggattacgacggagccgagatacccaaagaaatagacggtatcgataagataggcacgctctatacatatcttaaggcgcgttttggaagcgagataacagataatatattttttgaaaatgcgatgaactttttccgcatcaatttttaaataaaatagcaaaacagaaggatcattgtattaggattttgtatttaaagctgcaagcgccgcattacaggattgctgtgaataaaatagcgaaagacgggggaaattagtgacaaagggggagaaaaagtggcgcagaataaaataggaagacagactataaaatttgtaaatagacccatgataacgggaatgtgttcggttgtcggcaaaaaagaaagtcagggtccgctcaaggactggtttgacgtgaagcttgacgatgacacatatggcgaaaaaacatgggaaaaatccgagagtaagatgcttaaagaggctgttatgacagctataaagtattcaggtacacgtgagaatgaaatagatgtgatgcttacgggcgacctcctcaatcagcttatgtcaagtgcatttatggcgcgcgatcttcatataccgtttatcggtctttacggtgcatgcagcactatgtcgcaggcaatgctgcttgcgggtatgattgtggacggcggctttgcgtctaatgctgttgcgggagcatcaagtcatttctgcacggcagagagacagttccgaatgccgcttgaacatggaaatcaaaggccgccttcggcacagtggacggctactgcggctggagccgttgtgatatctgatgagaaaaaggaagaaagcgataaactcgtgccgccgcagaagacgatatgtcttaccgaagggacaatcggcaagataatagatacgggaatgaaagatgctaatcagatgggtgcagcgatggcgcccgcagctgtggatacacttctcaatcactttgaagatacgggaagaagccctgattattacgatataatactgacaggtgacctcggatgtatcggtaaagatatagctatagatcttatgagcgacgcggggcttaacagaaaggtgctgacgaacatatacgacgactgcggcactatgatatacgaaaaagagcaggatgtacacagcggcggaagcggctgcggctgttcggcttcggtgtacacaggctggcttttcaagcgtatgaagagaggagaaataaacagagcacttgtactttcgacaggagcactgctttcaacgatcagcccgtttcagggagagtcgataccgggtatcgcgcatgctgtagcgtttgaaacaatatagagcaggcggaaagccgctgatattcacaggcgcgtgaatttgcttgagacaaacgaagtaagtgatattagataaaggggagaagaaaaatggattatttgtacgcatttgtggtagggggaataatatgcgtgataggtcagatactccttgacaccaccaagctgaccgcaccgagaatactcgtaataatggttgtttctggagttattctcacggcttttcatatatatcagccgctagttgagcttgccggcaacggagcgacgacgccgcttccgggattcggatatgctcttgccaaaggcgcaatggatggagctaaggatggatttatcggcgctgttacgggagcaataaaggagacggcagcgggaattaccgtggcgatagctttcggatacttgatagctctaatattcaatccgaagtcaattagataatcggccggaatttgtacgcagctaaaaatttaaattatatattcataaagaaaagagcggttacagcggtaaaaaaagttcttattaccggccgctcttctactttttgatacacaaaaatttcctcaaaatatgagcaaaaaaagtgatgacaaagacttctgtttgcgttatcatttagatatgatttcggctttgtaggggtgatagggatgaggaaaaattttgttattttagttgctgcattgtttgtaattttgtctttggtatcgtgcctggggacgcgaggggaagatgacgaaggcacttatgcttttgaatctgatttgtccggcattgccgaggaaggcgaagaaaagacggcagaaaataaagctgaaaatgatataggcgctgaaaaaaatagcctcaatcagagcaaaattgagggtgctgatggaaatatcgatagtaaaagcggtttaaaaacagatacgagcgaattgtcagcaaataccgataaaaataatgaagatgcggcagacggcggcgaagcgtacacaagttcatcggcatttgcaaagcagcctgaaaatgagggcaatgtttctgaaaatgatgagtacgcagtatttgacggcgcactttttatcggagattctcgcactgagggtttatcgctttattcaggtataaagaatgctgactttttctgtgcaaaatcgctgtcaatagataaggtgacagacggagagaaagttacggtctttggcactaaaatgtcaatttatgagcttctggagtcgaaaaattataaaaaggtgtatatcagtcttggtcttaatgagcttggctggacacatatagaaagatacatagaagaatatacagaactgataaatgcggtgaaagaaagccagcctgacgcagttatattcgtacaggcgctgcttccggtgtccaaagaaaagtcggacaagggcggtacggtgaataatgcgcagatatattggtacaataccaatcttgctaaaatggcggaagacacgggcactttatacataaacgcggatacgccgctaatagatgaaaacggctgcctgcttccagatgctgctactgacggcgtgcatcttaagagcgaatactgcaagatatgggcgcggcggcttgcggaactttcctcgccagaatagagtcaaaataaagatgaggtttgctgttaggtaaacggaatagaataaaaaagtattatattatgaaggagaaacgcagcagaaaatgagaaagaaagtgtgcgaattactggttataatgatgatttttgcagctgtatcaggattttacggatgcagtgagcgcgatgaaatggaagaccccgaagaaaatccgtatgacacaaatatagatgcaggcgcgcttgccgaatatcttgcagatagaataacctttgctgacgagctcacaaaagttgacaacgatatagcatatgagatatatggaatagaagagagcgcagtcagcgatatagctgtgtatatgagcacaggcgcgacagctgaggaaatagcagttcttactgtaaaagatgatgagggggcgctgcttgcaggcacggcatttaattcgcgcatagagtcgcagaaaggcgggtttgaaaactatgtgccggaggagatacctaagctcgaaaatgccgttattacacagattgacagtgctgtagtgatgatagtctgcgcggataccgatgaagcagagcaggcggttgacagctatatcagtgaatatcttgaataaacaaacaaatttatgaaaggcagagcataaatggtatttagcagcattacttttttaatatattttttgccgattacaatatttttatattatgtggctcccgtaaggcttaaaaatacgctcttgcttgcggcgagcctttttttctatgcatggggcgagccaatttatatttttttgatgatattttcgattgtagtcaattatgcggcgggaatttgttttgaacacattgaaaataagataaaatgtgctggagacgacagttttaggttaaaaagagcgatgtttgccaagaaagctgttatcgcagctgcggtagcggtaaatattttactgctcggcttttttaaatatgcagattttttgatatcgggaataaatatgattttcgggcttgcaattgagcctcttgagctttcgctgcctgtaggtatatcgttttatacatttcaggcggtgtcgtatctggtagatgtacaaagaggcaatgtgaaggtgcagaaaaatatcattgactttgctatgtacatctctatgtttgcacagttgatagcgggcccgataatacgccttgcggatatagaatgcagtctgcacaggcgcacgctttcactttcgatgttcgcagatgggtcgaaacgttttacagttgggcttgctaaaaaggcgctgcttgcaaacggggcaggcgcgttatgggaagcggtatgcgaagtgccttatgcggagatgtcggtgctgacagcctggataggaattatcggctttacatttcaaatatattttgatttttccggatattcagatatggcaatagggctcggcaagatgctgggatttgattttccggagaatttcagatatccgtatacatctcgttcggtaacggaattttggcgcagatggcatatttctcttggcagctggtttagagaatatgtttatattccgcttggaggcagcaggtgcggtgcgctcaggcgttctttcaacattttgactgtgtggctgcttacaggactatggcacggagcgagtatgaattttgtgctttggggactctattttgcgctgcttttggtgttggaaaaagcctttttgctgcgaattctcgaaaagctgccgcgcgcagcaggacatttatacacgatgctggccgtgattataagctgggtaatatttgcgcttgatacggatgcgataataccgtatttaaaaactatgctgggaatcggtgcgcctgccatatatgatttagacgcgctctatatgctcagtgggaatgcactgtttttcgcagtgcttgcagtaggaagcaccggaatggtttcggcgctttacagaaaattcttcagtggaatgggcacagaatacggaggcaaagaacgcgcggcattaaagatgattgtagaaaatgtgtgcttagcggcgcttttgattatttcgctcgcgtatgtcgaagcatcgacctacaatccatttttgtatttcagattctgacgtgaggggcaactatgaaaaatgcgcacatagaaaaaaacaagaaagagaccgggggaaaatactctaagggcttaaaaaatgttgaaaatatgataacggcgatcttatttgcagctgtgttctgcgtttttttgcttgcatcgctgatacttccggacagagaattttcggaaaatgaaaacaggtatctcgccaagctgcctacattaaaggcagcagcagttgctgacggctcatttagtgcggattttgagctttatgcacaggacagcctggcaggacgtgatgcgctgatgatgcttaaaaccgccggtgacagagcgctcggcagaaaggataacggcagcgtgtattttggtaagaacggctatttgtttgcgatagaaaaagtagactcagtgcagcttgaaaaaaacataggttatatggaaaaattctgtgcagcggcggaagaaaacggcataaatgtgaacgttatcgtaactccgaccgcaaccgaaatacttgcggacaggctcccgcaaaacgcaccggtaccggatcagagcgaagccataggaaaaataaaagagagactcggagatcattttatcgacgtgacggataatctgctggctcacagcgatgaatatattttttacaaaacggatcatcactggacgacactcggcgcgtattatgcgtataggcagtacgcggactattgtgatatatcagatcagaagacaggtgtttccgcaaatggcggaagtactttgcgcagcgatgcttttgattatgaattgcctgctgatgccggatatacggaaaccatagtatctgcaagtttccttggaacgaactattccaaagcgccgggcataaacataaagccagatacgataacgagaatggaaaagagcgtggcagacagcagcgcaaatgcggaaaacggagcagggaatggcaatataagaatgagcatcctttcagcaaatctcgaatgtgaaaaaatatttgacagtgtatatgacgagtcatatcttgataaaaaggataagtactcatattttctttctggaaataacccggtaacatttattgaaacagagcgggatgcgtcagaaaacggcggtgttaatatgcaggcggctgaggatagtaatgcgtatggcaagggaggccgcagaaatctgcttgtggttaaagattcgtatgcgcatgcgtttatcccatttctgacaagcgattttgatactattacggctgttgatatgcgttattacagaagcagcctcagcggaatcatcgcagaatatgaaataacggatatactcgtgctttataacgtattgaattttgccagcgacagcaatttgatctatcttgcaagataaaacaaaaaaataaagatatatttgtttacggacaacaaaaagacaaaaaagtattgacatatcggctttaaagtagtaaattgtatgagtaggtttatcgcagaaatcgatacggcttatcgtcaaaaccgttaataaaaacaggagcgcattatggctattaccggagtaaaaaattcgatttattttttcggctttacgaacgcttactattatgtaagcgattttggtgtagataaatcagttatttcggtagggcataattgccgcgcaatgtgatataaaatttattgttaatcacggctgtgtcctcatcggaaacagtcgtttttatttgttaatcattttaaaataataggaggtaatcttatgaaaaagttaattacaggcatcttactcgtcgtaatgatgcttagccttgcggcctgcggcggagacactgcggatgatgacagcagcaatacaggtgctgtatatcatgtaggcgtatgccagctcgttgagcacgatgctctcgatgctgcaactgagggatttgtcgatgcacttgaagaaaagcttggagatgctgtggaaattgaagtccagcttgcacagggcgaacctaataactgcacgactattatcaataatttcgttgcaggtaatgtagatctcattatggcaaacgctacacctgctcttcaggcagctgtatccggtacagatactattcctattctcggaacttctgtaacagaatacggcgtggctcttggaatagataatttcaacggcactgtaggcggtaacgtatcaggtacttcggatcttgctcctcttgacggacaggcagctatgattcaggagcttttccctgaggcaaagaaagtaggtcttctttactgctcggcagaggcaaattcgcagtatcagattgatgttgtaactgaagagctgacaaagctcggatacgagtgtacaccttattctttctcagattcaaacgaccttgcaactgtagcgacttcggctgctgaaaacagcgatgtaatatatgtgcctacagacaacaagtgcgcggacaatacaggtattatagataatgtatgccgtccggcaaaggtgcctgtagttgcaggtgaagaaggtattgcaagcggctgcggagttgcaactctttcgattagctattatgacatcggatatcagacaggcgtaatggcagcggaaattctcgcagaaggtgcagacatctcgacaatgcctatcgcatacgctccgtctgtaacaaagaagtacaatgcagaaatctgccaggagctcggaattactatccctgacgattatgtagcaatagactaatataaacatcataaaacaacaagcggaggatttttattatgaatattgacgcactgataaacggtttgccaggtgcggcggcgcagggccttatatggggcattgtagccataggaatatatattacatataaaatattagatatagcggatcttactgtagatggatcgctcggcacaggcgggg

SEQ ID NO: 285 - DNA, 3707 bp, Unknown
  16S sequences of unknown bacteria
tcgggcaggtcaccgacacccaggacagcaccggcaccgtgctggaagagcatcctgtccccgccgcccccgcagcagctgtggccgcccttctcccccattttacagggacaatcgaccagatcccccccatgtattccgccatcaaaattcacgggcagaaactctaccagttggcgcgcaaagggcgggaagtggagcgccccgcccgccagattacgatccgggaactggagctgctggaaccggcgcccaccggagatctccggctacggatacactgttccaaaggcacctatgtgcgcaccctctgtcatgatatcggacaggctctgggctgcggcgctgttatgaccaacctgcgccgcactatggcctgcggttttacgctggaacaggcagttcctttgaagcaactctcctcctgcgcaactcccagcgcctttcttctccccacagaatccctgtttctcgattatccaaaaaccgtcctgtctccagcagcggagaaaaaagtgcgtaacggcgccgcggctccctgctgtggcctgccgtccggcgactaccgggcttacagtcagagcggcgcttttctggccctgtgccgcagcgacggaacaacccttaccacaatcaaaagttttttccaagtagaaatgcagcaaagcaggtgaattgatttggaacagaccaatgttgcccaccgcgccattgcgctgggcttcttcgacggaatccaccgcggtcatggtcagctgatggaacgcgccatcctgcgggccggagaacttgctctccgccctgcggtctttaccttcgaccggcatcccagcgacttatacgccgacacccccgtacaactgatcaactccgcccaggaccgggccgatctgatccatcggctctatgggatccgggaagtcatcttttcccattttgacgaaaccatgatgtgcatgccctgggaaacgtttctcacagaaatgctctacggacagtacggtgcgcgtcatctggtctgtggggaggatttccattttggctatcgcggcgaaggcaatccgtcaaagttggccgcaacctgcagaacgctgggtatcggctgcgacattattcccctgatggaaattgacggcatcaaagtgggatctacctatatccgcacgctgctggctgaaggcgacatggaacgggccacggaatttttgggccatccccactgcctgtcccataccgtggaacacggcaaacggctgggcagctccatcggcattcccacggtcaacctgaccgtgccgccccatgtgctgacaccggcgcacggcgtttatgccacccgtgtccagattggcgaagcatcctatatgggcgtgaccaatgtgggtgttcggcccacagtggatcgctccacccatgtcacggtggaaacttttattctggatttcagcagcgatctgtacggccagacactgcgtgtagatttttacaaacgcctgcgggccgaacgaaagtttgcttctctggacgagctgaaaactcagattcagcgggatatggattccacccgctcttttttccagaagcatccataacattgtttttccatgcaaaaagcactacccattgtaataaatgggaagtgcttttcaatttgttatcacttttgcttacaaattttcctcatctttcagttcttccaccaaacggtatcccacgcccacttccgtgagaatgtaacgcggctgcgctgggttcttctcaattttacggcggatattggccacgttcacccgcagaatctggttatcccgagaactgtacggtccccacacgttgcggcaaatgtattcataggtcagcacgcggcccgcgtctttgcatagcagcgccagaatcttgaactcgatctgtgtcagatgcgtatctttaccagccacagacaccacacgtttgccaaaatccacccgcagatcgcccacctcaaatatatcggacaccatactgcccttgatcatccgctccgtatagcgcagcgtggcacggatacgggccatcagttcgtccgtaccgaaaggcttgacgatataatctcccgcgccggcatccaatgcttccaccttttccgcctcctgcccacgggcggaaacgacaatcaccggagcggctgaccaggtgcgaatggttttcagcacctccatgccatccatatccggcagccccagatccaataaaatcaaatccggattgtgggaagcaatcaatgtcagtgcgctgtggccgttctcagccgtgaccacagcataatcattggaaatcaacagcgttgaaatcagattgcagatgcttgcttcatcttcaacgatcataaccaaacgcttggtactcatgattctctctcctccgtttgtccagctcccataggcagccaaaatcgaaattccgcgccgccgtcgatatggtttactgcactcagcatccccttgtgcgccagcagaatcgacatacagacggacaagccaatgcccatcccccgcgtggtgtccgtgtcatgcagaacgccgctgaacagattcggcagatctttctctgcaatccccacaccgtgatcgcgcacagaaaaccagcaccgatccccttcccgccaagctgccaattccacaggcgcctgcacaccggaatggcgcactgcattttccagcaggttgatcagcacctgctcaatcaacattgcatccattggtaccaacaggatttcttctggtaccgtaaccgttacctgctgcttgggaaaacgccgccgaaaccgcgtgactccctcttccagcacttcttccgccagttcttcccgcttattcagatgcaccggctcgtctccctggaactttgttatggaaagaaggttttccaccatctgagatagccataacgcctccttgtggatgtcctccgccaggttccgccgttcctccggcgtcaggcgcgcgtcgttcatcagcacagaactggatcccgctactgccgtcagtggggtgcgcaggtcgtgggataccgcccgcagcaaattgccgtgcatcttttccttcgccgcctccatttccgcctctgcgcgcttttcctccagctttcggttgcgctcgtacagctccactgtttcctgctcgtggcggatcgctttctccgtttcaccccgcagctgataggtaagcacgctcaccaacagcgtcaccatcgtgaaacagacaaaatcaatcggatagcccacaatgttcagcgtaaagtaattataaggataggtaaaaaaataattgatggcaaaggtgctggcaatggaagccgcaattccataatacatatgatatgtgatccgggagatcacaaccacagccagcacaaataccaccggtgcatcgttatcaattcgtgtaaaatgcaggatcgtggcacagatcgcgtaagccagaaacagcagcgccgctgtcaggatccagctgcacagtgcgttgtgcgtcttccatacccgtctgcaccgctctttcatacatgctgcccctttcttgtctttttcattatactctaagacggcataaatattttataaaattctgtcgaagtttgtaaaatttttaacaaagttggtgagaaaaacggatgcccgaaaagggcatccgttttgcgcgtgtgtataaagaaatcgatacgtcctcgac

SEQ ID NO: 286 - DNA, 9773 bp, Unknown
  16S sequences of unknown bacteria
ccgcagggcgttccggcgaagccggaacgccctgcgggcgcccggggaccggcctacatttccgccgccagctttttcatcaggccctccgccaggcggtccacttcggcaaaattcgttgcctcgatgtagtactgttccagctcatcgtgccgccggtgcgcctcggcaatggccagctccgcctgccgcagcagtgtcgcggctgtcttttgcaaaaagcggatgcgtacccgccgggattttatggcgctgccatcatcggtaaagcgctgagcgtggatggcccggcccgccagcggtacccggtgcaggctgttgctggtcacaaaggccagccccgtttccgggatcagcagatgatccagcttttcgggggagaggggacaggggcagctgatgacatggtacccccgtgccactgcttcatcccgtagccggggcagcagtgccgcggctgccgccccgcaggggtcctccaggcagatgacccgctcgcacaacgccaaaatggtttcatgaaacaaaatagtgccttggtctgtcaccgcggagagcagccgcagctcctcacggcccggtttgccccggtcaggcagctcccgggcagccaaccgctgcacatagtgctcgattttttcccagtttagggtctccgccgccagccggcgcacctcccccagcagggcccccgccccggaaagataccgtaccgcctgccagtgcagcccgctgatctcccgccccagccggacgatctcctcccgccgggtgaatagaagctcctcatcccagcacccacacagagaaaacggctgctccaccgcgccggggaactgcggctccagcgcgtggggcggggtggcatccagtagcaccgtcttttgccgcggcagaatgaccccatccaggctggcggcatcggaggaacagtggatctcctccaccggctggccgcgctgcagggccagctttattacccgcttcatcagggtggatttgccggtgcccggcccgcctttgatgaggatgcagcgccagccctcctccggccgggtgaactgcccgaacagcgaataaaacccgttttgggaattgcaccccataaaccagcggcaggggatcgttttttccatgaaaaggctcctttcggcggggtatggcgttcgcgcccgctggtgccattctatgccgccccggtggatgttgccccaagttcctgcagggtgccggttcggcccgcagggcaaaccgtccctccgggacggttttagggcggcttcgccgccccacgggcgcctgcggcgcccggccctgcgggccgcctgtccccgccgctcacccgtgcgaaagccacaaaaaaagagggcccgcaggccctcccggtacaaaaatcatatctttatccccagctcctgtattttctcccgcagcgagagaaaatccgcgaagccgtttttggtattgtaggggttgcgcagcagagccgccgggtggaaggtccccatcatccacaccccgtttttttggatccactcgccatgctggcgtgttaccttgtaatccggctggatcagcgtcatggcggcaatgcgccccacgcacacaatgatcttgggccggatgagcgccacctggttgcgcaggtagcccatgcaggcggcgatctcctcctgctctgggtcgcggttctgcggcgggcggcactttactatattggctatgtagatattgcggctgcggtccaggtcgatgtagtgcagcattttatccatcagctggccgctgcgccccacaaagggctctccctgctcgtcctcgtgctggcccggcccctccccgatgaacatgatctctgccttggggttgcccaccccaaagaccacatggtgccggccttggcacagcttgcaggcggtgcagtgcagcgcggtatctctcaggctttcccagtccatcatgggtgtcgcctccttttgtaaatttttcgatgaatctattatatcagataattagactctttgcaaaatagaacatgggtgttataatattatggacaaaaaagtatgcgacaataaggaggcatccccctatggcaaaagtattagtagaaacttccgcccgtcatctgcacctttcccagcaggatctggagaccctgttcggcgagggcttcgagctgaccttcaaaaaagcgctttcccagcccggccagtttgccaccaatgaaaaagtcgaggtcatcggccccaaaaagtccatgggaatgatctcggttctcggccccgtccgcaagcagacccaggtcgagctttccatgaccgacgcccgttccatcggcatcgcccccttcgtgcgggaatccggtgacctggccggtacccccggctgccgtctggttggccccaagggcgagatcgaactgaaggaaggcgttatcgtcgccaagcgccacatccacttcaccccggaggatggcgagaagttcggcgttaaggataagcagatcgtccggctgaaaattgattccgatggccgcagtctggtgttcgatgatgtcatctgccgtgtttcccccacggccggcaccgcctgccacctggataccgatgaagccaatgctgccggctgctccggtgaagtctacggcgaggtcattttgtaaaatcacgcacccccggcggcagacttacccacagtctgccgccttttacaaaaatcaaagcgaccgaaaggagttcttctatggccacccttttgcagctctgccagcccttcgatcacgctgtgatggccgtcatccagcagctaagcggcgccatgatggataagatcatgctggtgttcaccttcctgggcgaggagaccttcgctattctgctgctcattgccgtgtactggtgctgggataagcggatcggcgaatatctcttgttctccctttacaccgccatgagtctcaacggcctgctcaaggatatcatctgccgtccccgcccgtttttgaatgacgagttcagcgacctgcgctatgtcaaggtaaagggcctgctggtggatactgagcacctttcttcctcctggtccttccccagcggccacagccaaaccgccggcagcatctacggcagccttatcaatggccgcaagctcgggatcaaagtctgcggtatcgcggtcatcctgctggtcatgctctcccgggtctatctcggcgtccattaccccaccgataccattgtgggcgcggtgctgggcctgctgtgcgcctgggtgtgcgggctgctgttccgccgcttttatcagcaccgtatcctgctgctgggtgccgccgtgctgctttccggcctcatgctgctggtcaacccctccggcgacagcataaagacgctggcgatgggcgtgggcgccgtgctgggcatgtggctggaggacgggctggtggaattccgttccgcaaacgggttcttcggcggggcgctgcggctggtgatgggctttgccctcatcatggccatccgcatcggccttaaggccctgctgcccgatatgatgtggtgccactcccttcgctacggcctcatgggcctgttcggtaccttcctgtggccgtgggtctttaccaaattgggcttttgataaaaagacaacccaggcggcgaacgcaaaagcgggtgctggctgcgttgccccctcgaaaggcataagcccgtcttgcgccgggcgcgagccttccttcgggtgcagccttgccatcccctcccttttccgcccgccgcccgtatcaccataaaaaattcattttaggaggtcgtattatgggatttctgaaaaatctgctgggcctgggtgttgccgccggcaccgcctatgctgccgttaaggtagcgcagaagtacaacgaaaagaagaacgcgaacgcggatctgaacggcgatggcgccgtggatgccaatgataccgtctacggcgttaaggaagccgcccgcgaggtgtacgcggaaaccgccgccaaggtgcgggagaaggccccagaggtccgggaaaaggccgctgccgccatcggggccgtgcaggaaaaagcccccgagttcatcgagaaggtgaagggagccgccggcgaagcctggagcgccatccatggcgaaaatttccctgccgccgaggtggagctggaggaagaacccacctgctccgaggatgtcaccgccgaagagaccgaagagcctgccgccgagccggagatccccgccgccgggcaggagtaagcaaaccccgcaaaccaaaagaccgccccagccgggcggccttttttgctgcgcttatttgatgaaattggtgcggatgggcgcttcccgctggggcaggccgtatttctcccggcccagcgcgatgctgcgcatcaagaaggtcatattgcgggccagcgtgcgcatggtctgccggccttcctcgtcctgctcagcttcgccgggcgcccgcccgtggatgctgttccagtattggctggaagcgaccggcatccccgctatggtaaaaaatttgttcagctcatcaaaggtcgcgctgcacccgccgcgccgcgcgcacaccacactggcccctaccttcatggatttatcaaagtggctgctgtaaaaaagccgggtcaggcaggccaccagcgtggcattggcgctggcgtagtagacggggctggccaccaccaggccgtccgccgcctccagcttgggtgccagctcgtttacgatgtcatcaaagacgcaccggccggtctcggcgcatctgccgcaggcaatgcaccccctgatatcccgcgcgcccacctgcaccgtttccacctccacgccttcctcccggaagatcctttccatctcctccaccgccacagtggtattgccgcccacacgggggctgccgttcaggatcaaaaccttcattgccgtgcctcctatctgttaaaatgtgttcagcctcattatatctgctttgggtggaatttacaacagccccgccggggcaaaatattgcacaaaaaagaaaggtaaatttgtgcaccccaccaattgtttcctgtaccaattgacacccccgccccgccgtgctatcctgtttataccaatcatatccccatggggatattttgtgtttgcggagcaaacacaaccccgcctgcgggaaaaataaaaaagaagagaggtttgttcaaatgaaaaagcttttaagtgttgtgctggcgctgctcatgctggccgtcatgctgccggtcactgctatggcagaagacaccaactactgtaccattgaggggataactgaagcggacggtacgaccctcaagcattttgatactcttaccgctgcagcaaaagcatggcgggagagcaaaggcgttgtaaccgaaggaaataccttcggtgcaaacaatttgggcacagtaaaatccatagtgtgggacatctatggcacggttcctgttggcgatggcgctggtgttgcaggtaacaatggcgcaggagactgtatctttactggcggttactttacgcctgatgttactgtaagtaaagttaccgttactggccataacaatgctactatcagcaaaacaaatgataaataccgtgtaagcgtaaacgcaaatgaagtggtatttgcaaacatcacctttgaagataccatgagaaacgatagtaaccccggaagccttacttttactaattgcactttcaaggcgggtctgagaatgcctcatgcaagagacaattcgaccttgaaggtagaaaactgtgtgtttaccggaagtgaagagaacggctatgcaatttttgtgcaggggacgatgacaaatgtggtgctttctggcaatcagatttccaacgcaaagtgcggcatgaatatccaaaccgcgcctgctaccgtttccatcactggtaataccatcaccaacttgaccggtaaagatgcgaatggcggcaagtacggctccgctatccagcttaccagcggcacttctttcactgtgaccgataacactatcaacaccaaaaatgttaatgcattccatctctacaatgggcttaatgctgctgtaaccatcaacaacaacataatcacgaccgattacctcatttggaatgcggcaaatctcgaaaatatctcttcctccggtaacaccttcgatatcaagtatcccggaaaagagctggtaaaagtaaaacttgatgacaaatcagaggtagtaaatacaatagattccgctactaccatcaacggtaccgtagtggagcatcccaccaccatcatcatcacccccgccggggacacccccaagaccgaggaccagaagaaccccaccaccggcgccaatgatatggtcgccgcggccgcggccctcatggccgtctccgcccttggcatggccgtcctctcccgcaaaaaataaaatcatccgccccacccaaaaagctcccccgccgggggagcttttgctgtgataaggtaaggttcaccaaaagaaaaagacgcctttgggcgtctttttcttttggtgaaccatcggggattcgaaccccgggccctttgattaaaagtcaaatgctctgccgactgagctaatggttcatattgccgcatggcaacagatatattataatggcctccccccggcttgtcaagcattttatcactatactttccatctctttcccatcttttccccgcaatgggctataacatttccccgccccgcattgcatttctcccgcgctttcgttataatactttcagcgttaattttgggaggatatgtttatgcttttctggatcggtttgggcgttctgctcatcggcggcatcatggtccgcgtcgcttctaagcgcggtgacgagggcgaagccctcaaaaaggtcggcatcgcgctcatcttcatcggcaccgccattctgctctttgtgctcaccatcaatatcctggtgtggaccggccgcttcggcgttgcctcctgatcaccctgccccctacgggggcttccttttttaaccgccgccgggtataataaactcatacccaagtattccccggaaaggaggccgccctgtgccgctggaactgcaaagcgatatccgctacctcaaaggggtaggggagagccgcgcccagctttaccataagctcggcgtggataccgtggaggacctcctctaccacatcccccgccgctatgtcgatctcacccatcccaccccgctggcggaagccattccggggcagaaatgcgccgtccgggcgctgctggccgccaagggccgggagcagcgcatccgccgggggctttccgtttttcgcctcaccgccgtggatggccccgtcaccctccacatcacctttttcaatgccaaatatacggtggattccctgcgcgagggagaggagtacctcttttacggtacccttaccggcggcttttacacccgccagatggactccccgcaggtattccgcccggaggaagccggcaccctgctgccggtctatccgctcacccagggcctcagcaataagatggtcagccgccaggtcgccgaagtcctccaccaggtggagcagctcccggatcccttggcaggcagcggcctgccgcggcagtacggcttgatgagctactcggaagccctccacgccgtccacttcccgcgcgattgggcggcgatcgaaaccggccgcagccgtatggtctttgatgaactgctctgccttaccatctgctttgcccggatgcgccagggccgggcgttgcggcatgtcgcccccatgcagccgcacccccttaccgcctactatcaggctctgccttatcagctgaccggtgcccagcagcgcgccattgccgaagccatcggcgatatgtgcagcggtacccccatgaaccgcctggtgcagggggatgtgggcagcggcaaaacggcggtggcagcggcctgctgctatttcgccttcctcaatggcgcacaaagcgccctgatggcccccaccgagattctggcccagcagcattaccacaatcttgcccctctcctggagcgccttggtatgcgggtggccctcctcaccggctccctttccgtcaaaaagaaggagaccctcaaagccgccctcgccgccggggaactcgatctctgcatcggtacccatgccatcctcaccgccgataccgaattttcccggctggggctggtcgtcaccgatgagcagcaccgatttggggtgcagcagcgggccgccctgcggcaaaagggccaggatacccatgtcctggtcatgtccgccacccccattccccgcaccctggctatgatcgtctacggcgatctggagctctccatcatcgatgagctgcccgccggccgccagccggtgcgcacctacctcatcaatagcgagatccgggagcgggccttcggctatatccgccgccacctcgatgccggttatcaggcttatctcatctgccccgccgtgcaaagcgaggaggaagaggcggccgccgcccatctcaaatccgccgtggaatacgccgaggagctggcccacggcgcctttgggcagtatcgggtcggcctgctccacggcaaaatgcgccccgcccaaaaggaaaaagtcatggcggaatttgctgccggggagatccagctgctggtggccaccaccgtggtggaagtcggcgtggatgttcccaatgccgtgattatgatgattgaaaatgccgagcggttcggactttctcagctccaccagctgcgcggccgggtgggccggggccaggtgcagtcccactgcatcctcctttccgataccgataaccccgaaaccaaggagcgcctgcgggtgctgtgcagcaccaatgacggcttcaaaatagcggaagaggacctcaagcagcgcggccccggcgactttttcggggaacggcagcacggcctgccggagctcaaggtggcggatcttgccgccgatagccgcctgctgcaaaagacccagcaggccgccggcgagctcctcgcccgtgatccccagctggatacccttcccgccctctcccgccgtgtggaccgcctgatggcgaaaatgagcttgtaaagccgtctgcggccccgcaccgacccaaagcctcccttgtgcaaagggaggtggcgaatgaaatgagccggagggattgatggcagagattatgacgatagtattttctcgcctgtcagcacaccccaagactcccctgtgtaaggggaagctggcagcgcacaatccaaaagcctcccttgtgtaaagggaggtggcacggcgcagccgtgacggagggattgtcagtacaaactatgacttggttttatcccgcctacccggcagggccagtttgtggtcgcctatcggcgtcacggagtcaccgaagggtgacggtctgcacggctcgccgccggggcgttccttttgtgcgtacaaaaggaaccaaaatacggtcaagggggaccgggcttcccccttgacaaacccccttgacgcttagctgtgctggctacgaatgttgtttttccctcagtaatcgggaaaaacaaatccgtactgcgcacagatgcgctccaaaggtagcctgcggcagcatttgccctttccccctacccccttccccgcatcggggaagggggactctatctacaatctctacataaaaatgcgcctgcggcaccttataagcgtcgtctaatcccgctccggg

SEQ ID NO: 287 - DNA, 5577 bp, Unknown
  16S sequences of unknown bacteria
aaagcgtattctcttttataaaggcgtaggaggtggggtcccatgcggtgtagcctctggcctcgaaggtggcgcgaaggccgcccgaggggaaggacgacgcgtcgggctcgcctttgataagctccttgcccgagaactccatgatgacccgtccgtcgggagcgggggttatgaagctgtcgtgcttttcggcggttatgccggtcagcggctggaaccaatgggtgaaatgggtggcgccgtttgcaacggcccaatccttcatggcggtggcaacagcattggcaacgttattatcaaggctgaccccttcgtcgatggtttttttcagtgacccgtaaaccttgtccgaaagggtggctttcatgacccgatcgtcaaaaacgagacagccgaaataatctgatactgttttcattttcattcgctcctttacaaaactaaaaaacgaggcaagggaccgtaaagccgccaaaagcaaagctttacatcaagaccccgttgcctcgttttccgatatgcgattttaaaaaagaaaaagacgtcaaagagatttctctctaagacgtccttgccttatgcgttgcattatacactcactcaaagggtttgtcaagtacttttttcaaaatttttttcataaatttttcccgctccttttgccgacttttcggtattataataaggtatatgcggcgccggagatttcaaaaaacgggaaaaagccacaaaaaatcggccgcttttgcgctctgaaacataaaaacagacgattttaaatttgtgtttgacaaaggccgctcggtgtgatataatgcaccgtagtgagcaaagacgttcattcagacagagaatttctgtccggatgggcgtctttttctgtttttcaggaaaggattgaagctttatgttagaaggtcaggttcgtatcccctcgggctgcgccatttcggcggtcatctcaagggacggaaacaaaatgaccggagaaggtatcatgaacagcatggttcccatgcacgaccgttcaaacggtctgggcggaggatttgccggatacggcatttatcccgagtataaagaattttatgccttccacattttctacaacgacaacgccgacagagttaaatgcgagaattttcttaaaaccggctttgaaatagtcaaggccgaaaacatccccataagaaaaattcccgaaataaccgacgttccccttatatggcggtatttcgtggctcccctttcctcggttctttcccgccttcagcttgacgagaaggaatatgtggcgagaatggtcacaaagataaacacgaaaatcgacggcgcctatgttttttccagcggaaagaacatgggagtattcaaggcggtgggcttccccgaggacgtgggacggttctatcggcttgaggaatacgagggctattcctggacggctcacggccgttatcccaccaacacccccggttggtggggcggggctcatccctttgcgctgcttgattattccatagttcacaacggcgaaatttcctcctatgacgccaaccgccgctacatcgaaatgttcggttataaatgtacgctgcagaccgacaccgaggtcataacctacattgccgattatctgctgcgcaggcaggggctgtcccttgaggaaaccgcctcggtcattgcggcgcccttctggagcaccatcgacaaaatggagcccgaccacaaaaaaatgcacgaatatctccgcacccgttttcccggactgcttgtcaccggacccttttcgataattctcggctttgacggcggactcatggcgctcaacgaccgattgaagctccgctccatggttgtggccgaaaagaacgacaaggtatttatttcaagcgaagaggcggccattcgggtcatggagcccgacgccgaaaacatatacgctccggccggcggcgaaccggtcatcataaaggttaaggagggagcatactgatggcggtaaattatcttattccggaattcgaagtggtcagaaatcacgaccgctgtataacctgccgcgtctgcgaacggcagtgtgcaaacgaggttcattcctttgacgaggaagggcacgttatgataagcgacgaggcaaagtgcgtggactgtcagcgctgcgtttcgctctgccccacccacgcccttaaaattgtcaaaaacgactgtgcatttcgcgaaaacgccaactggcagtcggacacaattaaagaaatatacaagcaggcctcaagcggcggcgtgctgctttcctccatgggaaatccgaagccgctgccggtatactgggacaaaattctcataaacgcctcccaggtcaccaacccctccatcgacccgctgcgcgagcccatggaaaccaaggttttcctcggaaaaaagaacatacccgtcgagagaaacgaggacggcagtcttaaagacaatctcccccctcagcttgagctttccatgccggtcatgttttcggccatgagctacggctccataagctataacgcccacgaaagccttgcaagggcggcaagagagctcggaattctctataacacgggcgaaggcggacttcacgaggacttttactgctacggcgacaacacggtggttcaggtggcttccggacgtttcggcgttcacgaggaatacctcaaggccggcgccgccgtggaaatcaaaatgggtcagggcgcaaagcccggcatcggcggacatcttcccggggcaaaaatcgtgggcgacgtttccaaaacccgcatgatccccgagggctccgacgccatttcccccgcccctcaccacgacatttattccattgaggacctccgtcagcttgttttctcgctgaaagaggccaccgaatataaaaagcccataatagtcaaggttgcggcggtgcacaacattgccgccattgcctcgggtatcgcccgcagcggcgccgacatcatcgcaatcgacggcttccgcggaggcacgggagcggctcccacgagaatacgcgacaacgtgggaattcccattgagcttgcccttgccgccgttgaccagcggctgcgcgacgagggaataagagacaatgtttcccttgtggtgggaggaagcatacgctcggcctccgacgtggtcaaggcaattgcgctcggcgccgacgcctgctatatcgccaccgcggctttgcttgctctgggctgccacctctgccgcacctgccagaccggccgatgcaactggggaatcgcgacccagcgccccgagcttgtaaaacggctcaatcccaacatcggatacgaaagactttgcaatctgctcacggcctggaagcacgaaatcaaagagcttatgggcggcatgggcattaactccattgaatcgcttcgcgggaaccgacttatgctgcggggcgtaaatcttaccgaaaaggagcttgagattctcggtatctcacacgcaggcgaatgaaaagagtatatgtaaacgaaaaatggtgcctcggatgtcacctttgcgaatataactgcgcctttgcaaattccggcgcaagcaacatggtcaaagccttaaaggacaaggaaattttcccgagaatacgcgttgagggcgacgacaaaatcacctatgcgatttcctgccgccattgcgaggatccgctgtgcgtcaagagctgtatctcgggagcgctgcattttgaggacggaacggtctgtatcgacaaggacaaatgcgtgggctgctttacctgcgtgcttgtatgtccctacggagcggtgaccgccgacggcaaccacgccgttcagaaatgcgagctttgcaccaaaaacagcgcgggctctcccgcctgcgttgccggctgtcccaacagggcgatagtttttgaggagaggtgacggaaatgaaaaaatatgtaattatcggcaatggcaccgccgccgtcggagcaatcgaaggcatacgcgccgccgacagcgagggacttataaccgtagtttccgcagagaatcatcacgtctactgccgtcccctcatttcctattatctcgagggcaaaaccgaccttgagcgcattaaataccgtcccgacggcttttatgaaaagcagggctgcaccgtgctttacggcgaaagggccgaaaaaatcgacgtgcaaaaaaaacaggtcattctttcttcgggaaaggttcttgattatgacagcctttgcgtctgcaccggctcctccccctttgtgccgccctttgaggggcttgacacggtggaaaacaagtgcggatttatgacccttgacgacgctcttaaaatcgaaaaagaggttacaaaggagtcgaaagtgctcattgtgggcgcgggtcttatcgggcttaaatgcgccgagggactttgcggcagggcaaaatcggttaccgtctgcgaccttgcgcctcgggtgctttccagcattctcgacgacaaatgcgccgcctatatgcagaaaaagcttgaagagcacgggatcaaattctatctcggcgacacggcgacaaaattcgacaaaagcaccgcatttatgaaaagcggagcgaaaatcgatttcgactttctcgtgcttgccgtgggcgttcgccccaacaccgcccttgttaaggaggcgggcggaaatgtcggcagaggaataacggtggattcccgctcgaaaacctcacttaccgacgtttatgccgcgggcgactgcaccgagacgaccgacatttcctcgggtcaggtaaaaatcatggcacttcttcccaatgcctatatgcagggcaaaacggcgggtcttaacatggcgggaaaggacgccgaattcgacaacgccgttcccatgaactcaatcggatttttcgggcttcacgccatgacggcgggcagctattttgacgagtctcagggcggcgaaatgtttgaaacggtaagcgacggcggcataaagcggcttttcacaaaggacggcctgctgaccgggtttatcatcatcggcggcggcgagcgcaccggcatttacaccaatatgataagaaaccgtatcccgatttcacgcgtcgattttgaaagcatgaaaaaaaatccgaatttgttttccttcggaaaagaatattgtggcaaaactctcggaggtgtggtataatatgacgatagatacgaaaggcatggattttgccgagctcaaccgtcttataagagaaagcgacggcggctgccgtcttgaacattgcatcggccagcgattcattgcggcgggtgtttcgggcaaaagcctcaccatagacggaatccccggaaacgccctcggagcctatttaaacggcgccgaaatcaccgtcaacggcaacgcccaggacgccgtcggcgacaccatgaacgagggcaaaatcgttattaagggcaacatcggagacgccgcgggctatgccatgagaggcggaaaaatatttgtaaagggcaacgccggctaccgcgcgggcattcacatgaaggcctattttttgttgcttttgccttttgtgcattgtaatttttctt

SEQ ID NO: 288 - DNA, 4205 bp, Unknown
  16S sequences of unknown bacteria
ggctgtctactgcagctgatcaagccggctttgcagctcgctgatctggctctgcagattcttgatctgtgtattgtaattctggatctctctggacaacgatgtgttcagcgaattgtagttgctctccgcatcattcatggcctgctctgcctgctgcgcttcctgccccagctcgctccactgcgtgttcagatcattgagcttgctttccagttcgcttctggtctcttcatccgttgccgcatcataggcattctgcaccgttgtgatctgatcgctgagcgagcgcagacgggtctcgtagttgccgttttcgtatgcggtgcgcgcctcattgtaagcagactgtgcctgcgagagctgcgtattcgcatcatcgatccggctctgatagctggcgatctggtcctgataagcgctgatctggccgttgatctccgcgatctcccggttattgttcgtgctcggcgtcgtcgtatcgctcttttgatcatcatcgcttccggcctgatcatacgcgtcctgcaatgcgttatacgcctcatcgacagcgtcctgcgtggcgtcttcatcgtcgaacatcgctttcgcctcttccagcgcattctgcagcgccgtccattcatcctccgtataatcgttttgatccagctcttccacctgcgtgatcaggtttttcagcctgctcttgtccgtgccgtcatctccgcctgtagaaacgaccgcgaagatgatgccgatgatgatgccgatgacgaccaccgccgcgatgacgatcgtgatgatcttattgaatcggcttgcctcttcctcgctgacctcggcgccgacagaagatttcttctttttctttttcttctctgcctttttgtcctgcttctggcgctcttcttcctccaccagccgcttcatctcatcttcgctgatgatgaccgtcgcattggcctcatcctcagcgggctcctcctcgggcgccttttcctgcctgggaatgaccgagaccttggtctgttccagctcttctgtctctttcttttcctcttgcatggctttcagctgctcgatggccgtcttcgcttcttccggctcttcctgtatctgcccgcgctctttcagctcttcctgctgcgcgctgctcgcttctttctttttcttgaattcctggatccgctgatgcagctcgtcctgttcgtcgaaatccttgagaatatcgtccagatcctcctgcggaccgtcctgattctttttatccaacatacctgcacctcctgaaggtcatccctattctatcacaagatggagaggcacactacacaaaatcataacaatcgccctctgctgcatctgccgcatagaaaatgcgagactgactctcgcattagatctttctcacattctgcgcctgtgggccgcgttcgctgtgcagcacatcaaagctgacccgctctccctgttccaggatcctgaagccgtccatcaggatctgcgtgtaatgcacaaagatgtctcgatcttcctcatcggtgatgaatccatatcctttatctttattgaaccattttaccgtgccttccatctttccccctccttcctgcaaaatgtcgaagcggctgagccatcgtctcaaacaacagcggatgagcacaacatgtcactgcttccaccttaatcgtatgctccttcagcagctgatatgcatgcttcagcgtcgcgccggtcgtacagacatcatcgatcagcacgacacgccctgagggcagcgggtattcctccttcagccggatgaccgtgctgatctgcgtgcggtggatgcggtccatagatgactgcttatgatcgctcgtcttataaaacggctcatacagcatcatcccgctgtccgccagcatgcgccgcagcggactgaatccgcgtgtcatgcggcgctcgtcactgctgggcatcagcacccactgccatcgccggtatctcctcttcatctgcttcatcacctgcgagaagaacaccggagcaagcgcgacatcccgcccttccttgaactgaaacagcagcgattccatgaactcgtcgtaacgataatacgcggtgagcggcagatcatccagatgaagatgccttggctccgggcgcaggcgcatcaggcattcgttgcacagctcctcttcctgcaacagccattggacgaacgtatactgtccttcaagcggcttcaggcagatccggcatctgggcataacgtcgcgttcatcctttccagctcgcggatgcactgtttgagatcttcgctcttctgcgtacacagaaacaatccccgcccgtcaggaaaatcgatgttcctgccggcacggccgatcatctggatcaagctggccgcggtgaagaccggatgctccccatgcagcaccgccacctgcacatcagggatggtgatgccgcgctcgagcacggtcgtggcaaagagcacttccttctgctggcggcggtatcctgctaagacctcatccctgtcctcgctttgggaagagagcgccgcgcaggaaaacagcgggcgaaacagcatcgccagccgcttagacatggcgatggtggggacaaagacaagcgtctgcttatgctgcaggtgattctgatgcagaaagcggatcaacagcgcatagaggacaaaggaaggcgcgcagaccagcttaggcacgatcagcggatgacggtgcggacgttcaaacagcgtgaccatcttcagccggccggcttctacatcggcgagcatttcctcatccggcgtggccgtcagatagagcagctgcccgctgcaggcctgcatggcgatcgccttcagcatgtcactgccccgataaggaaacgcatccacctcatccatgatgagcagatcgaaacaatccggatagcggtacagctgatgcatcgtgcagacgacgagatcggcatagacctgatctgtatgcccttcgcatacagccctcaccttcaggtcgggaaatgccttgtgcatgcgctctgcgatctcgagcacgacctggcggcgggcgatcgcaaagccgacacgctttccccgggcgaaatattggcggatcgcctccatggtcagctcggtcttgcccgccccggtcgccgcatagatcagcacatcatggccgccgttcagcccctccatcacctcatccaccgtccgtttctgcgccgtggtcagcggatacttgagatgatattcacaatggatcacgcgtttctcccatttaggcgggatcggacgctgcccggcatcgatgcggccaaaggcgatgcagcggcggcagtaccagactccctcatcattccagaaatactctgggtccgcattgccgcagcgcaggcatgttctctcttccatctcatcctctcctctgcccctcctatacgcctgcttcttttgctcccctgatcggcggcaaaaaaaagctcctgtcgatgacaaaagctttgatgtttactgttgttttgccttgcaggcaaagtgccaggcatctgcgcacatttcctcaaggcccttttcggccttccagcccagctcacgctgcgctttctctgtgctggcatagcatgtggcgatatcgcccgggcgccgcgcatcgatctgataaggcacctcgagcgcattgacgcgggcaaaggtgtgaacgacctccagcacgctgtagccattgccggtgcccaggttgtacgcatcgatgccgatatgctcgcgaagcagcttgtccacggcattgacatggcccttggccagatcgaccacatggatatagtcgcgcaccccggtgccgtccggcgtatcataatcattgccgaacacatgcagcagcggcagctctcctgcggccaccttgacgatatagggcatcaggttgttggggatatcgttggggctctcccccagcagaccgctcttatgcgcgccgatcggattgaagtaacgcagcagcgcgatgttccactccgcatccgaaacatgcagatcgcgcaggatctgttcgatcatcagcttggtcgtgccatacggattggtcgtcggcccaagacgacattcctcatcgatcggcacccgctgcggatcgccatataccgtggcgctggaagagaataccagacgccggcagccatgtctgcgcatcaccttgcacaggttcagcgtgctcatcagattgttc

SEQ ID NO: 289 - DNA, 8656 bp, Unknown
  16S sequences of unknown bacteria
aagaaccacacgcccctcaaacgtgcgcgtctgccagttccgccactctcgcgtgtctcggtttttccctggaacgtataatattataccacattcacgcgcgtttgtcaagggggtttttgaaatttcttcgaattttttacggaatttcgtttttgacgcgtttattcaggactttcgcggtcttttcgggggtctggaaaccggcgaggcaggacgcggactcttcttctatgatctcggcgagcgatttatcagcgcctttgcgagctttgacgccgaaaaagatggcttctatggttgatttttcgtctgtcgtcagcattgcggggctgtcgtcgcgaatttttgacacgccgacatattgttcacactcggtcctgcccgtgcgcgggttggtgtacgacgtctgccagatggacatggcgcgcgattccatttcttccgtcatccgggcatatgaatcgcgggttaaaggcaatttattccataattgggacgatacatattgtttattttgccaattttcgttggatatattaatatacttggcgataaattgctgtatttcatcccggtttttagacttttccggaatcgcgaatgactctgtcgcctcggcaagcgccgctccgcagccggggtaattcagcacggtcgtgccgcctgggtcctcttctccgcccctcagcgcgagcatgagctcgatcggcgtttcgaccgtttcgaagttcaggagcgaattccggcgcattgtgttcggaagagatttgtcatatatggaatactccgcctttgaggcaagatcaagaaacagttcaaaatctccagtaaaatcgcaggttttctcgcttttgacgacacagctccggacaatgctttcaagataatttgtcaaaaatgtcatcgcggggtcctgtccttcctcgaagctcgcgagtgcctgaccggtataattcgcgtattctatgagaagatcgacgtttttcaagctcgacgtatcaatcattccggcgcgtctatcgtccgtcgttataaggtgaaaacgcagcttcaccggcagatatggcagtttgtcacccgtcatgaacggttcgacggcggacggaagatagctttcaacaatgtccggaagcgcttcgtcaatatcaacaaatgtgcattttgacaacagctcatcatccggcacaagatcgccgccgaagaccacaagatccggcgctttgccccctcgtatcagtctgatcagcttctcgttcgcggttgatttttcgtctgtgcgcagctccgcgagctttatgcggtaattctcgcttgactcgttgaagccggatatctgatttcgcaggtcataatcatccttcagaatgttctcgctgtctaccgcgacgatcagcgttatccgtgagtcgttgtctttttgctttgtcatttttgcgatatacggggggcgaatcatctttgccggaaacgcataccgtcagctcatcgttatccccgattcttaccgtattacaggagtttattacgcttcccgtgtccgtaaaccccatcactcgcgtgagttcagacgaccagtctttgtcatttctggtcttgtcggcacgatagagaccgagctcgtcaagcacccatacaccgccgtccggcgaaaatatcggcgtattttcgcctgtatcgggcaatatttcaacgtccgacagcatttcatcgtcatcattaagacggcgcattacccactccgtcgcgtcgtcctcaatatatcgcctgtatataagcgccgcgccgccgtccggcagcctgcggagataaccgcgcatcacctgcggagaacgctccaccggaacgacatttccgtccgcgaagtcgtcgagtgccgtgagctcattgtacttttcgacacggaatttgccatcattgtatccgagacgcgcgatgaaatccgacgtcataatgtaaatatcgccgttatccgtaacacaaagttcattataatccgccgacttcatgtacagtccgaagctgtctattgtcgacgatatttcggaaaacgtctggtttgaaactatattgccgctataatcgtaaagcgtcagactgtaccgatacccgggtgcagaatatgccgccgcatgatcaacagcaatgaacccgacgtccggatactccattatatagagcggcgcgtacgctgtcattaccgcgtctccgtcattctcaaacacgacgaaatcaacattatgtgtgctctcatcgtacgtaatcacgccataattccgcatttcaaggtcatctctcggaaccagataatccggagtttcgcactccctgcttatcggaattgtccattttccgcgatttatcgagacgcgctgagtggacattatgaagccgctgaagcgctccgggtccgacgtgactaacttctccaccgcggcgctcgtcaggtcctcggcgctccacatgacgtcttcgctatcgctttcacatgcggatgccatcaggagaaacagtgttaatattaacaaaagtaaacttattctgaacttaatcatagattgttttatccttctttgtgcaaactgacttgcactttcggaatcacttttcccttctttcactgaaatatcccatcctgtcggcaaatttccggaaccgacattttctgttggactttacttatatagtaccacattatatcgcccggtaacagcatatttatttaacttttagtgaacacaaagtaaaaagcgcgtcggatgccaacgcgctctgcacttttttgttcaatttgctcaaatctgatcgccgaagcgcttgacctcgtccgagtcgggcgtcatcgcgccggcaaatccgtccgcctcgagcttcgcgtacagcttgcctatcttcttcggctgcaagaacagcgacgtgtcgtaatcctcgcggagcttgtcggcgaggtgcatcgccttctcgaaattatcctcgttatatatcaccgccatgcgaggacgactctctgggattttatagtttttctccaaaagtatcgccgccagacgctcaaatcctatcgaaaatcccaccgccggtatcgactcgccgagaaactttccgatcaggttgtcatatcgtccgccgccgccgagtgccccgcggaactccggactcgaaatctcgaacaccgttcccgtgtaatacccctgtccgcgcacgagcgtcaggtcatatatcactgaatagccgtcggcgagcgaattcgcgacttccattatcttgcgcagattggtaatacattccatctcgccgcagatcttctccgcgtcgtcaagcgtgaacggctccttggatatcgccgaaatcagctttccgaccggctccggctcgaaacccttctcgatcagctcgttcttcacgccgtcaagcccgatcttgtcgagcttatcgagcgaaatgcagaccgaatcgacgtccgcgtccggcagacccgacgtcaggattatcgcgcgcagcagtctgcggtcgtttatgcggatattgaagttcgaaaaaccgacgttgtgcagcgcttttgccgttgtagagataagctcagcctcggcgcaccacgactcgtcgccgatgatgtcgatatcgcactgaacgaactcgcgcattctgcccttctgcgggcgctcggcgcggtagacgcggtcggtctggatgaccttgaacggattcggcagcttcgcgcggttgttcgcgtaatatctcgtcagcggtagggtcaggtcgtagcgcagccccatgtcggagagcgacctctcgtcgagctcgcgcgcgtccggcgtgtcgctcacaagcgccgccagcgcctcgtcgagcttctcgccgcgcttcaggatcttgaagatcaggttcaggttctcgccgccgtccgacttatcgaggttttccccctcctcgatgatcggcgtcgaaatccgctcgaagccgcaggaacggtacgtcgaaattatcgtattctgaaggtaatcgcgtattctgacctcgcccggcaggtagtccgccgtgccttttacgggtgttattttcatattaatcccctttttccggataattatttactttattatactacttttcttttttgttgtcaatgtagaaaatgacgaaacacgaatcccgcataacccaagcatcatcttcacgtcctcatgactataagtcacaggatcactccggaactcaatctccgcgagtgtcgccgcgagcctgtcgaggacataatcaagacttcggcaatatactttcgccacatcattcccctttcagagataacaaaaaccgctcgtcaatcgacaagcggtctctattggtgcaggtaacaggaattgaacctgcatgaagttgccctcactagaacctgaatctagcgcgtctgccagttccgccatacctgcatatccaggcgataccgtgtatccaggcgataccgtgtatcgcccgattacttttatattataccacattccggcgcgtttgtcaagggggttttcagattttttccggttttttctgaaaaaatcatttttcacccatcgacagacccctgaagtccagcttctctccgtagcccgtcatcgtcaccgtcaacgtgtcgtacagcgcgtagaacctctcgtaaaacttcgagtgcgaataaatatcgtacagctcctcgcggtgctccgccatataatccgcgtccttctcgcaccgcagcacaatatggaacccgtacgtcgactcaaacaccccgctgtgctctccgggcgacagcttctcaacctccgcccacacctcgtccagcgcgtcgtatctcatcgtataataacccgcgtcatacggcacctgctccgcgctgtagctcgaatactcacgcatcaggtcctcgaacgactcgcccgacataaggcgcgaatacgcctcgttcgcgcggttcaacgcaatctcccgcgtctcgtcgctcgggtaatacacgtaaatctccttcacgcacgccatctcgcccgacatcagcgccgcgtcaatcgccgccatatcgtcgtccgcgggcagctcgcccttctccttcatcttctccacaacattatacgccagcagcgtgtcgccgttcagctcgcggtacaggtcctcggtcaggaaatccgccgtcagcgccgccttgtacgcgtcgtcgtccgcgtaattcgacttcaacgcctccaccagctcgtcgagcttcgcgtcgtcgtcctccgacagcttcgcgccgtactccttcgccagcagcgacaaagcgtggcggttcttcacgttctcgccgcacatcttcttaagctccgcgaccgacgcatcgtcaagctccgcgtcgtcgccgtacagctcgcgcttattgttcagaaaataatacctgtactcctgaagctcaacgccctctccgccgacctccgcgaccttccgcgtatccgacgaacaactcatcgtcgatataacgccgacagccagcagcgccgcgcacgctcccctcaaaaacctgttcattataccactaacatccggcaattccggacgccctttcaccgaaataaaactgcatcttatgatattatagcgcacatttatgacaccaatgtgaataacgccggaaacttttagaaattcgcgccggaactttgttgaaaacggtgacactttttgatacagtctggcaagcggtgacacgttcgaatgtgctataatggatgcacaaacaaaccaggggccagcctctggacccgatagtcaaccaggggccagcccctggacccgatagtcaatgcttcggttcgggtcggatgaaggctctgcctcatcaaacatccatcttcgaaaaagttctctttataagaaaggtctcaacaaaaatgaaaaccagtttccgttccggcaaacaattcctcgacgccgtccggtcgtacaccgactcctgcgccgaaaagaacgaagaactcaaaaagcccatcttccccaacgtcgccgggttctgccgctcctccggcatctcggtctccgccttccggagcctcgcgagacgcttccccgacgactacctcaccgccctcgccttcttcgaggacgccgccatcaactccggcgccaccgcctcgctcatcagcctctacttaaaagaatacgactgctggggtcagaccgaagaagacgaagtccactgcgaccacgacatcttctcagcgggcgcttgaaagaatgtgaaaactcatgaaactcaaaggaaaaccaaacagaaaacaagccgaattcttcgcctccaccgcgcggttcaccgcatacggcggcgcgaggggcggcggcaaaagctgggcgctcagacgcaagctcatcgccctctgcctcagatggcccggaatccgctgtctcataatcagacgcaccctctcggagctcagacaaaaccacgtcctcccgctccagagagaaatcgggagagaggtcccctactccgccggcgagcgcgtcttccgcttcagaaacggaagcacgatatggctcggctacctcgcctgcgacgccgacacgctcaggtatcaggggcaggaatacgacatcatcgccgtcgacgaagcgacccagatcaccgaataccaattcgcgaccctcaaaggctgtctcagaggtatcggcgactatccgagaagaatgtacctcacctgcaaccccggcggcgtcgggcactcatgggtcaagcggctcttcatcgaccgcgccttccatgatgacgaggacccgggcgactacaggttcattcaggcgctcgtcaccgacaacgacgtcatcatgaaaaacgaccccggatacgtcgaaatgctgaaaagcttaccggacacgctgaaaagcgcgtggctcgacggaaaatgggacctcttcgaaggtcagttcttctccgagttcagacggggaatccacacctcgccgccgaaagaaatcccggtcggaagacgcttcgccgccttcgactacgggttcgaccggttcgcgctgcttctgctcgccgaggtcgacggacagcttgtcgtctaccgcgaatactgcgaatccgggctcacgctcaccgccgccgcggaaaagctcgtctcggtcatctcggacgacatcaggcgcggctgcgcgttcgactacgcggtctgctctcccgacctctggaaccgcagacaggactccgggctctccggcttcgagataatgtcgaaggtccccggcgttcctccgctcaaacgcgcggacgaccgcagaatccccggctggcgggctgtcagagaattactcgcgaataataatgacggaagacccggcatcgtcatatacgacaactgccgtgaactcataaactgcatgggagccctgctcttcgacccgtcctcgcccgaggacgcgtcaggcactccgcacgaggtcactcacgcgcccgaggctctcaggtacgccgtcatgtcacgcgggagaaatatctcctgcacggtctcacacctcgcggggtcaggcatcatcggattctgacccccctccggggaaaaccatcgggtcacgcccgaaacccaattctggtatgaacggtcgccaaaacggtcgccgttacatataaaggaacactgtcacagtgtatccaaaaaatattttttaaggaggataaccgaaatggctatcacaaacttcatctccaccatctggagcgaaacgctctaccgcaagctgaacgccgagtacgtcgccgtcaagaactgctcccgcgagttcgagggcagcatcctcggtcagggctcgaccgtcaagatcctcggcgtcggcgacatcaccgtctccgactacgcgaagaacaccgacatggcatccccctccgccctcaccgacaacgcccgctcgctgaccattaaccgcgccaaggcgttcaacttcctcatcgacgacgtcgatcacgctcaggcggcccccggtctcatggagctcgcgatggagcaggcggcggcagccctcgccgacgaggcggacaagtatgtcttctccctctactccggcgtcaccgcggcgaacactgtcaccgacgcggccgtcaccgtcgactccatcctcgacgacgtaatcgcggcgcgtgaaaagctcctcgcgaacggcgtcggcggctctgtcccgaccgttctcgaggtctctccggaaatcgccgcgatcctcctcaaggcgaagatcctcaactccaccgacaacgacggcgcggtctcgaacggcgctatcggcagcctcatcggcttcgaggtctacgtctccccgaatgtcgccgtctccgcgtccgacaagtcgaacaagtgcttcgcccgcaccaagcgcgccatcgccttcgccgagcagctgaacagcgtcgaggcttaccgccccgagctcagattcgccgacggcgtcaagggtctccacctctacggcgcgaagatcatctacccggacgagatcgtcctcctgaacctcaccaagaagacaacgaccaccggcagcaactgatacccccggagacgggcgatgtgtccgctcgacgcatcgccctccccgggctttttcgaaaggagcaagtctgaaaataaattttcagaccaaacagttttgaggctttcacgacattggg

SEQ ID NO: 290 - DNA, 18738 bp, Unknown
  16S sequences of unknown bacteria
ttggcctcccgcgggttcccccgctcgagagcgcttgactataataccatccctctcctcctttgtcaactacttttttaatctttttttgccttttttcgaaaagtgcggattttcccaaaaagacgacacttttcgactgtttttactggaaattgcctccaggcgtttccaggcggcatattgcgcgtcaattctgccagactatgggtagatttccaagttggggaggacatgcagtatggatcggattcatatggcccgcatcacagggatgcgcacgaccctgtggcggctggccgctttgcttatcacggcttttttctgcctcggccttttgtcgtccgggcagacagtggacgtattatccaaggaaggctcccgcggcgaagaggtgcgccaaatacaaaccaagctgaacaactggggatataatcccggcaaggtggacggtatttacggcaagcaaaccaaggaagcggttatccgcttccaaaaaaagaacggtctgacaccggacggcattgccgggccggccactctgaaagccatgggtattttcagctcgggcggcagcggcggttcttctggcggcggaggcggcggctatacccaaagcgactacaacctgctggcccgcctaatctccgcagaatcccgcggtgagagctacaccggccaggtggcggtgggcgccgtggtgctcaaccgggtgcagcacccctcgtttcccgacaccatttcgggcgtgatttatcaaaagggcgccttctcctgcctgtatgacggccagttcgatcagccggtggcagaaagcagctaccgcgcggcgcaggacgccctcaacggatgggatccctccggcggcgccatctactactacaaccccaaaacagccaccaacaaatggatccgatcccgtcctgtcatcgccactatcggtaagcacgttttctgcagctgaaatatcataccgctaaacttagaaaaaccacttacgggccacgcctcatgccccgtaagtggtttttagcttataaaggaattggttgacgccgtcaggaaatgccaatctcactcattcccgctcggtatcccgtatgcagatagcgcagtcctccgacggcagatgcagcgtgtcctccgcgatccagccgccgcccaggttcaccgtccggccccgccattcctcgggcagcgccaccgtcctctccgcccccgcgcggttgaccgcgcaaagcagggaactgccgccgtcctgccgcaggaaagcgaccacctcatccccggctggaaggggatggaaccgcccctcccgcagcgccggacagattttgcgcagctgccccagctttcgataccagttaagcaggcccgtatcctcctggccccagggataacagccccggttgaagggatccttgtacccctccacccccgcttcatccccataatacacacagggcacgccgggcagacaatactgcagcgcggcggccagccgcatccggcgcagtcccgttttccgctgctccgccgacaggctgcgggaggcctgccactcccggccccagccgttcaccggctctcccgccagaacggtcagcgcccgttcggtgtcgtgggtgccgatgatgttcatcagcagccgcagcacctgcggcggatagttttccaccacatccaggattttgttgaaaaaatccgtcgcccggcagccggtcaaaaagcccagcaccgcgtcccggaaaggataattcatcacgctgtccagctgccgccccagaagataccgacggcggtggccgtagctctgcttgttgctggcgtcctcccagacttcgcccagcaccagggcgtcgggcttctcggccttggccgcccggcgcagcgcgtcgagaaattcgtccggcagctcatcggccacatccagccgccagccggccgccccctcggccagccaccggcggacaatcccgtccgccccgttgatgtagctgaagaaggctggcgccatctcgtccacctcgggcagcgtagggaatccccaccacccgccgtactcatggggccagttcttgaaccgataccagctcgcatagggggaggacagggaattgaacgccccttcctccgggtaccggcactctttgttgaaataccggctgtccgcgccggtgtggctgaacacaccgtccagcagcacccgaataccgagacgggcggccgttttggtcagcgcctcaaagtcctccgccgtgcccagcaggggatccaccgccgtgtagtcggcggtatcgtaccgatgattggaatgcgcctcaaaaatcgggttgagatacaggcaggtaacgcccagctccgccagccggtcgagccgctgctcgatgcctttcaaatccccgccgaaatagtcattgttgcggatcgtgcctgtggcgtcgggccgccattccggctgtccgccccaatcgccgcgcagcaccctgtcggtcggcacgccggccttcggctcctctgacctggcgaaccgatcggggaaaatctgatacatcaccccacccgccagccaatcgggggtggaaaatcccgcttcatagcaggtcagctgccaacgcgcgccgccgggcgtccgcaccatgtcggcgctgccgtcgggccgccggacgagatatgccgccccgtcggccagcgtcatttcaaagccgtaccagtacaggccgggcacggcgggcgtgtagtggcagtcccaccattcctgatcgtctccgtccatgccggcccagaacatgtccgcccgccggtcgagacccccgtccagggcggtgaccagccggcaccccgagcactgccacgcccgaggcagcctgacccgcagatatatggccgtcccctccggaacggccccaaaaggcgagcggtaccgctcgtcccgtgattgaaaatacatgccaaccatcctttatcgtaacctgtgcttattatgacaggttacgtcccggataacaaggggaaaaatgcctcattcgtccagaggatttttggaaaacctctcgttccggtttgcgcgctccctttatccagaaaaaagcgtccgctgctgccagcggacgctttttatcggaacttatttcaggcgggcggccaggccgtccagctcttcccgcagcttggcggggagcttgtcgccgaactgggcgtagaactccttgatgccgtccagctcgctggtccacaggctgggatccacctgcagaatgcccttgagggtctccaggtcgaaatccaggccttccagattgatgtcctcggccttgggcacgaaaccgatgggggtttcctccgcgtcggccttgccctcgcagcgcttgatgatccactccagcacgcgcaggttatcgccgaagcccggccagatgaagttgccctcgtcgtcggtgcggaaccagttgacattgaagattttcggcgctttgtcgcccagcttctcgcccatctcgaaccagtgctcccagtaatcggccatgttgtagccgcagaagggcagcatcgccatgggatcgcggcggacaacgcccacggcgccggtggcggccgcggtggtctcggaggccatgatggagcctacgaacacgccgttatcccagtcgcgggactggtacaccaggggagcggtcttggcgcggcggccgccgaacacgatggcggaaatcggcacgccggtagtggagttgaattccgaagagatgcaggggcagttctccgccggggcggtgaaccgggagttgggatgcgctcccttggaaccgtcggtgcagtcccacttctcgcccttccagttcagcgcgttcgtaggcgggttcttatccaggccttcccaccacacggtgttgtcgtccaggttgtgcaccacgttggtgaagatggtaccctgccgggtggaagccagcgcgttggggttggatttcgcattggtgccaggcgccacgccgaagaagccgttctccgggttgatggcccacaggcggccatcggggccctgacgcatccaggcgatatcgtcgcccacacaccacaccttgtaacccttctcctgatacgccttgggcggaatcagcatggccaggttggtcttgccgcaggcggacgggaacgccgccgcgatgtacttgacctcgccctgtgggttctccaggcccaggatcagcatgtgctcagccatccagccctcgttgcggccctggttggacgcgatgcgcagcgcaaagcattttttgcccagcagcacattcccgccgtagccggagttgacggagatgatggtgttatcctgcgggaagtggcagatgtaccgcttctcctcgtcgatatcgcatttgcagtgcaggccgcgcacccagtcgttgctgtcgcccagcacgtccaggaccttctggcccacgcgcgccatgatggccatgttcagcaccacgtagatggagtcggtcagctcgatgcccaccttggccagaggggagccgatggggcccatggaatacggaatcacgtacatggtacggcccttgtagctgtcccgggcgatgtcgtacagcatctcatacgccttgtccggggccatccaatggttggtggggccggcgtcctcttccttgtcgcagcagatgaaggtgcggtgctccacgcgggccacgtcgttgacggcggtgcggtgcaggtagcagccgggcagcttctcctcgttaagcttaatcatttcgccagaggcgcaggcctcggcgcgcagggcctccagctgctcctcggagccgtcgatccaaacgactttatccggttttaccagctggaccattttctcgatccaatcgagaacagtcttgttgttggtcatgtgccaatcccctttcaatccatatccatatcggtgaatttctgttaacgcctcctattatagcctatgccgatggagaagcgcaatagatgaattgtgaataaattgataatattttaacgttcggtcagtaagtttgcatatttggtcggcgtatcctgcaaaacctacccctgcatacggacagtatccccttcgatgggcatcgtggcgcaagcattcaaatccattcctgccaaatgcccggactgatattcgtaataaccctgggcccccaccatggcggcgttgtccccgcacagcggcagcggcggcgcgtacagccggtatcccagccgggcgcagtcggcctccatccggcggcgcagtcccgagttggcggatactcctccggccagcacaatggtgtgcgccctggtgtcggcggcggcccgcagcaggttcccggccaacagctccaccaccgttttctggaaagaggccgccaaatccgcccggtttacctcttcccccttctgccgcgcgttgtgcagcaggttgagcaccgccgttttcaaccccgaaaagctgaagtcgtaggcgcttccctctacccgcggatggggcagcgcataggcgtcggggtttcccgagggggccagcttgtccagatggataccgccgggatacggcatccccatggcccgggccgccttgtcgaagcactcccccgccgcgtcgtcccgggtacgccccagcacggaaaagcgggtgtagtcctccacctgcacgatatggctgtgcccccccgacaccaccaggcacaggaagggcggatgcaagtccggatgggccagatagttggccgcgatgtgagaacggagatgatgcaccggcaccaggggcttgtgtgccgacaaggccagccccttggcgaaattcaccccgaccagcagcgcgccgatgagtcccggcgcgtgggtgaccgccacggcgtcgatatccgcgagagccgttcccgcctcgtccagcgcctggcgaaccaccccgctgatggcctccgcgtggcggcggctggcgatttccggcaccaccccgccatacagcttatgttcctccacctgggaggcgacgacgttggacagcaccgtccgtccgtccaccaccaccgccgccgccgtttcgtcgcaggaggattcgattcctaatactcgcatgaggccgtgtctccttctagataagcgatgatgaaagccagtgctggggtggcgcggcccccccgccaactaggctacagatacagggaatagataagcgcatcctctttaggagagtcgtaaaatccgggacgcaccccttccttttcgtaccccatttgctcatacagcgcgatggccttttggttggaggcccgcacctccagcgtgatcctggtcagatcgtgggccttgccatatgtctccagctcggccagcagggccgtggcgatcccctggcggcggtaagccggatgcaccaccacgttggtgatgaagccctcgtccaggatgtggtgcatgcccacatagcccaccgcgctctcggcgtccacatcctccgccacgtaaaacacggccagcgggttctgcagctcctccgccagcgcgtcataggaccaggggatggaaaacgccaggctttccaaatccgccaggctgtccaggtgatccgcgtgcatgggggtgatcatcatccccgccggaggctttgatcggtgctcgtccatagctcttcctttcctcgcgggggcgctcccccgtcctaaaaactcctcaggtcttttttatgtcagaaaaccggctgtattgccgccaccgcccgctccaacgcgtcgcggcattgccggtagtcggcggcgtccccgccgtagggatcgggaatcccgccggattcctcccccaacaccacaatcttttgcggatccacccccatggccgtcagggccagccggtgccgcagggacatcaccgccaccaaatccgccgcctcgcacagcatggcggtcaccggccgggagtggtgtcccctcaaatcgatgtcccattcccgcatgaccgtcacggccagctgggacgccggctcgcagctggccgccagtccggcactctccgccttaccgggaatgccctcccgctccatccgtcgcttcatcagcgcggcggccatggggctgcggcaggtgttgccggtgcatacaaacaggatgttcatctcgttttttcactccgtccgggccgaaaacacccggctatattacctattattaatagaaccacgcggcggcaggtcgaccgccgccgcgcccgtatttttcagtataccgcattctcgccggttattcaagcgcgagccggggcgaaaaccggcggaggacggcctcccgctcccggcaatcgggaagcagcgccgccatccgggcgtgaaaggccggcgaatgatcggggtggagaaaatgcaccagctcatgcagcatcacataatccacgcaggacggcgggacgcagacaagcgccttattgatggaaatccgcccctcccgatgcgcgcagcttccccagcgggccaccgcccatcgggtggtcatctttggaaaaggaacccccagcggctccaccagccggtgcatccggcaaagcgacgcgggaagcacctcccgcccctcctgctccagaaaggccttgaccagcgcgagccgcctctcctcctggtcgtcgcctggccgcagggtcaggattagcatcccgtccccagctgcaaacccgtcccgctcgcccggaaccgccgtcagccgcagcctttcccccaacagccagacgccctggccgtcggcggcggtgcggcgggtttcctgcctgcggcgggcccgctccacccagtccgtcttctgtctcaccagcgcgtccacctgttcgggcaaaacgcggcggggggcggaaaccgccagctccccgcccggcagcagccggaaattcagatttttcaccgccttgcgggtcagttcgtaggacagcggccctcccggtgtctcaattgtccgccgcatccggccccctccttgcagcattctggaaatttcccgccactatccccaccatcgacattgtccaatccgccttcaccgcctgagaaaaaagccgcgccgggcagacggatgccccggacgcggcttcttatttcggatacagacaaccggatactacatattctcctcgatataggtgaccaaatcgcccacggtacggattttctcgatctcgtcgtcggggatttctacgtcgaattcatcctcgagcgacatcagcatatccaccacgtccagggagtcggcgcccagatcgtccgcgatattggtttcgggcgtgatgctgtcctcctccacgtcaaactggttgctgagaatcattttcactttttccagtaccataccgttcatccttccaaaaatcgataatgtcggccgctgtccttcgtcttcccctcgtcgttcgggaaggcattgcgcgcgggaggggctttgtgctatagtagaaggcacagacagcaggccatcgcctcgtctcggcacaaaaccactacacccaaaatattatgcgttatccttggatttgtcaatcacctttttccatttcttttgaattcttttaaatttatcggcggggcgctccgcccgcccgaaaggttggtttcgcaatggctcgtatcccgtcatattttgtcatcggccatcccctgggccacagcatgtccccctttatccacagccgcctgttcgccctctccggccggccggccgcctatgaagcccgggacatccctcccgagcagctgtccgccgccctgcgggagatgcttccccaggtgcagggcctcaacgtgaccatcccgcacaagcaggcggtcatccccctgctggatcggctggagggccgggcgaagctgtaccggtcggtgaacaccatcgccgtgaccgaaagtggcgccgtgggctacaacaccgacgctgacgggttcctctgcgcgctgaaggccgggggggtgtccctcgccggccgggtggcgctgcttggctgcggcggcgtagggcgcaccttcgcctgcgaagccgccctggccggctgccggctgatcaacgccgtgcgcccggaggactttgaggcctcccgcgcgctgaaggattacgtgctgtccctcgtgcccggcgcggcgttcgagacggtggagctgtcccgtctgtccggggattttgacctgctgataaacgccacccccgtggggatgtatccccgctgcgacgcgtcgccggtggatcccggcgtcctggcccgctgcgccgccgtgttcgacgcggtatacaatcccgaggaaacccgcctgctctccgccgcccgcgcggcgggggcccgcaccgtggggggcatgcccatgctggtctggcaggccgccgtcgcccatacctgctggtacggagcggacttccaagcggaggccgtcgcctccatcatcgccgacgccaacgtctatatgaaccaacattttcgtcagtaaaggatggatacccatgcgtaacgtggtgctctgcggcttcatgggctgcggcaaaaccaccgtgggccggcagctggccgccctgtccggccgccgtttcgtggatatggacgagtatatcgagcagcaagccggcatggccgtgtcggagattttccggcaatacggcgaggacgacttccgccgccgggaacgggagacctgccgcgccctggcccggcagaccggcctggtgatcgccgcgggcggcggcgcgctgacctttgccgccaacgtggaggccctgcgcctctcctgcgtcatcgtgctgctggaggtgaagccggagacggtgctgacccgcctgaagggggatacctcccggccgctgctcgcccgggaggataaggaaaccgccgtgcgggagctgttcgccgcccgcctgccgctgtaccgggcggcggcgcagtatactgtagacggggaacagccccctctcgcggtggccaaaacgatccaggccttgctgtaaataaattctggggggcatgatatttcatgcccccgcatttcttttacgcctgtgccgtgctccatcattcataccgtacccgcatcttccggcgctcctcctcgaccacctcgggcggaatattcaccaatatgcagctaaagcaccgacccagctcatccacctcaatttcatccaaccaacaagtccccgcttcccaatacacacaaaagaaattttcacatttcatattttccacctctaaaccatttctatagctatatacatattacaactgctgattttaataatcaatagtaatatgtaaaatactatagtgttaggaggtggtcatatgagcgaatcgctggatttggctgcggaaatcggtttacgtgtgcgcaacaacaggactcttctaaagctatcccgtgaaaaattggccgaagaagcggatatttctttgtcctttctcgctgacatagaacacgggcgtaaaaatatgactactgttacgctatatggattatgcaaagccctgcatgtttccgccgattacctcctgttcggcagggaagccgttaccgccgacaatatttccagggcgattttggaggcgaaacccgaagaccggaaatatctggagagcctgctggttgccacggcggaaatcctcacagagaaaaaaccgtaaaatttttcccactgccttgacaaacccgccgggagcggctatcataaaattaacgtcacatcttggaggaacccatgaaccgaaccgccgcccacaatcgatttaacaccggctatcgcttcagcttttttggctggggctatttttgctgggaaaaatcgaatacgggcactccgtgagccggcggcttttgccgtcaaaattctcccgtgcagttggatattcaggtggagctcatggaaatgggctccaccttttttatatcaaattttatagaaagcaggcaatccgtatgatcatcgtcttaaaacccggcgtcacccgcgaccaggtggaggatttctccaaccacctggccaaaaccaacagcgtcactgtcaacgcctggtacggcgagcattccaccgtcctgggcctgctgggcgacaccgccgcggtggatatggactccatcgccgcccaggatattgttcagagcgtccgccgcgtccaggagccctataaaaaagccaaccgcaagttccacccggacgacaccgtcatcgatctcggaggcggatcggttatcggcggcggcaagctgggcctcattgccggcccctgctccgtggaatgcgaggagcagataagcgaggtggccgcccgcgtcaaggcggcgggtgcggccttcctgcggggcggcgcgttcaagccgcgcacttccccctacgccttccagggcctgcgggccgagggccttgagctgctgcgccatgcccgccgggaaaccggcctgcccatcgtcaccgaaatcatgtccgccgcccatatggtgctgtttgaggatgtggacatcatccaggtcggcgcccgcaatatgcagaacttcgagctgctcaaggagctgggcaaatgcgacaagcccatcctgctcaagcggggcctggccaacaccatcgaagagctgctcatgagcgccgaatacatcatggccgcgggcaacgagaaggtcatcctctgcgagcgcggcatccgcaccttcgaaaccatgacccgcaacaccctggacatttccgccatccccctgctcaaaaagctgtcccacctgccggtggtggtggatccctcccacgccgcaggggtcagctccctggtggaacccttggcactggccgccgtggccgccggcgccgacggcctgatcatcgaggtgcacaacgacccgccccacgccctgtcggacggcgcccagtccctgacccccgatcagttcgacaagctggccgcccgtctgggcgaggtggccgccgtgttcggcaaaaccctgtccacccgcgtttgaaccgtaccgttaaagggagccgcgtatgaataaaaaaaccatcgccatcgtcggcctgggcctcatcggaggcagcatggccctcgccctgcggcgcagcagccgctatatcctctacggcctggacagcgatcccgtcaccctcatgaacgccctcaagcgcagcgccgtggacaaggccggcggcgccgagctgctggcccacgcggatctcgtcatcctggccctcccgcccgaggccgccttggcctttctgcgggacaatgccgccgccatcaagccgggggccgtggtcaccgacgtctgcggcgtcaagcaggccattgtagaacccgccgccgccctatgcgaggcggcgggcctgaccttcatcggcggccaccccatggcgggcaaggaaaaaggcgggttcgacaacgccgacgccgccctgttcgagggggcctgctacatcctcacccccaccccgtccacccccgccgccgtggtggacgggatgaaggagctggccgcccagctgggctgcgcccgcatgaccgtcaccaccccggcccatcacgaccggatgatcgctttcaccagccagctgccccatgtgctggccggcgcgtatgtcaaatccccctgctgcctctaccacgccggcttttcggcgggtagctaccgggatgtttcccgcgtcgcctccgtggatgaaacgctgtgggcccagcttttccttctcaaccagacggctctctgcgccgaaatcgacgggctgatggagcgcctgcaagcctgccgcgacgccgtggccgccggggatcggcaggcgctgaccgctctgctgcgggagggccgtgaacgcaaagaagaggccgacggcgccctgccgccccttccggagcatagaaaggaacgaacgccatgaccaccctgtccgtccatacccgcagccgcgcctatgacattttcgtgggtgacggcctgctccggcaggccggccccctctgccgcgaggtcaatccccggggcgcccgcgccctcatcgtcaccgattccaacgtctatcccctgtacgccgggcaggttgcccgctccctggaaagcgcgggctatgccgtgtcggtgttcgccttccccgccggggaggagcagaaacgcctggataccatcgcccggatttacgccaagctggccgaggagaacctcacccgcagcgacctgctggtggccctgggcgggggcgtgacgggggatatgaccggcttcgccgccgccacctggctgcggggcgtcgatttcgtccagatccccacctccctgctggcccaggtggactcctcggtgggcgggaaaaccggcgtggatatcccccagggaaagaacctggtgggcgcctttcggcagcccgcccgggtgctggccgatctctccgtcctggacagcctgcctccctcctttctcaccgacggcatggccgaaatcatcaaggccggctgcatcctggataaggagctgttcgccgccctggaagccggggacgccctgtcccccgcccggcgagaggccaccgtcgtgcgggccatcgccatcaagcagggggtggtcgaacgggacgagaccgaaaccggggagcgcaagctgctcaatttcggccacaccctgggccacgcgctggaaacctattaccactacaccggcctgacccacggccgggccgtcgccctgggcatggcggccatcaccgccgcctccgaacggacgggcctcaccgcccccggcaccctggatcgcctgctgcctgtgctggaggcctacggcctgccggtaagcgacccggcggccccagccgattatcttcccgctgtggccatggataagaagcgcaccggcgcggccatcgacctggtgctgcttcgctccatcggggacgcgtttattcaccgtctccccctgtcggagctgcccgccttcctgggcggctgacacaacgaaaggagtcccgccatgtccctcgccgtcatctctccctccgtcatccggggaaccctgacgcccccgccctccaaatccgccgcccaccggctgctgatcgccgcggccctggccggtgaaggccgggtgcgaggcctcagcctttccgccgacatggaggccaccctccgggccgtgcggggcctcggcgtgtccgtgcgtctggacggggacgccgcctgtttcgcccccgctcccccgtcctcttcgccctcccccctgccggtggactgcggcgagagcggatccaccctgcgctttctcattcccctgtacgccgcccggggtattcccgccgtcttcaccggccacggccggctgccggagcgccctctgggggtgtacgccgactgtctgcccccccacggggtgaccctctcggccgcctccggcctgcccctaaccgttaccggccggctgaccggcggggacttcgccctgcccggcgacgtgtccagccagttcatcaccggcctgctcttcgccctccccctctgccgggaggacagccgcatccgcctgaccaccccgctggaatcggcgggctatgtggatatgaccctccaggtgctgcggcaggccggtatccgggtggaacccctggaggacggctggttcatccccggctcccagacctatcggcccctggacacggcggtggaaagcgactggtcgcaggccgcctttttgctggccgccggggccctgggcggggaggtcaccctcaccgggctgaaccccgcctccgcccagggggatcgggaagccctttcgctgttccgccgcttcggcgccgccgtcgaggaggcgcccggccgcatcgtctgccggaaggcccctctgcacggcatcgacatcgacgcggcccagattccggatctcgtgcccgtcctggccgtcactgccgccctagccgacggggtcacccacatcaccggcgcggcgcgcctgcgtttgaaagaaagcgaccgcctggccgccgtggccgacggcatccgccgcctgggcggccgggtggaggagggccccgattccctgaccattaccggcgtttcccgactggccggcggccgggcggaaggatacaacgatcaccgcatcgtcatggccctgtccatggcggcactgggctgcgaagcccccgtcaccgtcaccgacgcccaaagcgtggccaaaagctggcccgccttttttgaagactatcgagcgataggaggaaccgcgcatgtcatcgaccatcggtaaccgggtgcgcctctccattttcggggagagccacggtgaagccatcggctgcgttctggacggcctgcccgccggggaggcgctggacatggaggaaatccgcgtccagatggcccgccgcgcccccggccgggacaaaaccgccaccactcgcctggagagcgatatccccgccatcttgtccggcaccctgaacggccgcaccaccggcgcccccctggccatggtcatccgcaacgagaaccagcgttcgggggactatcagaatctcgagatcctcccccgccccggccacgccgatttcaccggccacgtccggtacaacgggtataacgacgtgcggggcggcggccatttcagtggccgactcaccgcccccctggtgttcgccggggccgtctgccgccaaatcctgcgccggcggggggtaagcgtcggcggccatattctgcgcatcgccgacgccgccgacgaggccttcgatcccgtgaacctctcctcccagctgctggaggagctggccgcccgccccttctccctcctgcgcgccaaggcggagcccgccatgcgcaacgccgtggaagccgcccggatggcagcggacagcgtgggcggcgtggtggaaatcgccgccgtcggtttgcccgccggactcggctcccccatgttcgacggggtggagaaccggctggctcccctgttcttcggtattccggcgatcaaaggggtggagttcggggacggcttcgccctcgccggtatgcggggcagccaggccaacgacccttatgcctacgacgcggccggccgggtggtgaccaccagcaaccacaatggcggcattctcggtggcattaccagcggtatgccgcttatcgtccgtctggccgtcaagcccaccgcctccatcggtcagccgcagaggaccgtggatctggtcgcgggccgggaggcggagctggttgtcaagggccgtcacgatccctgcatcgtcccccgcgccctcccggtggcggaagccgccctggccctgggcctgctggatattctggagaccgaggccattccggatcactgcgccgactgattgaaaggggattatccgcccatggaacttgccgacatccgcgccgaaatcgaccgtctggacgacgagctggtcgccctgctctgccgccggatggattgttccctacaggtggccgcctataaggccgcgcatcacctccccgtgctcaacgaagagagggaaaagcaggtgctggacggggtgcgccgcgctgctgcccggtatgaccaacggggcgccggtttccccggggcggcggcggtggtgttctccaccatgatggacacctcccgcgccctccagcatcggaagctgtccgccggcaaagccctgcgcgccgccatcgggcaggccccccgccgtccggtgaccgacatccccgcccgggtggcctgcgccggctgcgccggtgcctatgccgacgaggcggccggcattcttttccccttcaccaaggacgcggacagccgccccctcttcgtcccctccttcgccgacgtggtggaggctgtgcgggagggccgggccgattacggcattctgccggtggagaattcctccaccggatccgtgcatgaaaactatgacctgctcatgcagcatcgcctctccatcgtgggggcggcggagctgcctgttcatcattgcctgctcaccctgcccggcgcggatccccgccgcctgaaggccgtctattcccaccaccagggcttgtcccagtgcgcggatttcatcgccgcccggggcctggagccccggcagtacagcaacaccgccgccgccgcccgtatggtggccgaaagcggcgatcccaccgcctgcgccatctcctcccgacaggcggcagagatttacggattggaaattgccgcagagaatatacagtcggtatccaacaatatcacccgcttcatcgccctgtcctctcagctgctgctgccgcccgcggcggataaaatcagcctgatcttcaccctgcccaacgtcaccggctccctgtataaaaccctggcccgcttcgccatggaagggctgaacctgaccaagctggaaagccgccccctgcgcaacggggattttgactacgtattttacctggatttcgagggcagcctggacaacagcggcacggtggatctgctctgcgccctgtcggaggaactgccggtttttcacttcctgggcaactaccgggaaattcgcgcctgatccctggaaaatcctgcggctccggcgcgggaattatccggccgatttttccacaaatgccaccgtatcggtggaaaaactgtcaacctccgagaattcgacgggtttcggttgcgttctgtttttggggacgatatactaataggagacatcctctttgtatacataaccggctccgtgccccggcgaacatggagccctccttccccgtttcgccggagaaaaggagataccgatgcagaaaaccgttcggaaaaaggtctacgataccgatactgccgccctgctgggcaccgttacctccggcctgttcggcgatcccgccggctatgaggaacggctttaccagacccccgagggattctacttcctctatggcctgggcggggacgcctccccctatcccaaagaaaccatcaagcccgcctccgccgccacggcggaaaaatggcaggccgaacacgctcagtaaacagatgaacccgccggagaaagcaaagtttctccggcgggttctctccgatttgttgattttctgtgtattatacgaaacggagaaaaggaacgccgtgaaaaagacattgatttatccctgttccctggataaggatatcctgtacgatcgattcgccgcccatccgctggatttacggaccgccgacggcagcatcctagatactaccagccgccaatacatccagccccactatgagcggcagggagaccgggaaatcgtccgggttctcgagatattcctatataaatacactgtaaactatctggttaactgccgagatggagcggtgattctaacccggaagaaacaaccgtggttcgctttcgtcgacgccatggggtggatcgccgtcggcatgtttctgctgtttaccttgagttcctttatcgcgccatccatcccctggccggcctctctaggcttagcaggcatcactggactggcgtttgcctgtcagctctatcttctccatacccaccagcgaacggcccgtagagtgctggacgaatatatgaccctcgtccttggaacggaaaataataaggctacatacaaataacgttcaagtggcagcacaccaaggagaagcgcataggcatgcccatgcccgctagatgccaagcgcaaaagaacctcccccaatagaaacgcccgcccccgacggtgttccgtggacagaaccagaaaaactggacaatagacaaaatcccccctgatgtaggataa

SEQ ID NO: 291 - DNA, 24790 bp, Unknown
  16S sequences of unknown bacteria
caagcaagtccaaacccactgcttattgctccgcgcaattgaagcaggggacttgcttgattcggttaaataagcggtaatccaacgtgcggctttatctatagacggcagggtcagggaaagctgtaggcagggcgccatgcaacctttcaggacggaatgattccgaacctggggacaactgaataggagccgggagaggcatacggaagagatgcacaggaccggcaatgcgcaaccggtaaacaggaagaacaaagtgtgaaaaccaatggaaaaaggaagctcctgttgcatctggaatttacgcacgtacaaaacaaaacgaaagccggattccgaaagggaaatctgcgtcggggaattagggtctccccgatgcggagataccggtttgccgtaataaaattacaaacccgggcagaaaaaatcataaataagaaccgattctaaaaggcaggctattttggcaagcctttttttattttacccaaactgatgcctgcgaattgcttcgcattatacttttcggtgttttgcgggtcaataagtcgtaaaaaaataaatgctatctatagagaaaatgcacattcagtgctaatatagagatatagaagcctgagccttatgaacgtaatagacgatgaaaaaaggaaaaacgataacgctcagaagaattgccacatattgataaaacagagaaagaaaagagccaggtacaatttcacatagtagaaaggcggggattttatgaaactgacatttctgggagcgacacatgaagtgaccgggagctgttatctgctggaggcgtgtcagaagcgcgtactgattgactatggaatggagcagggggaggacattttcgaaaatgccgagcttccggtgaagccgtcagacgtcgatatggtgctgctgacgcatgcacatatggatcattcgggcaagctgccgctcttatataaggaaggattccaggggcagatattttcgacggcggcgacagccgatctgtgtgagattatgctgcgtgacagtgcgcacattcagatgtttgaggcagagtggaagaaccgcaagggtatgcgcgcaggccgtgagatggtgcagccactctatgatatggaagacgcggaaggggcgctgcggtgctttgtgcgctgccgatatggtgaggagatacgaattgcggaggggataaggattcgtttcattgacgcgggccatctgcttggatcctcgtccatcgaggtgtgggtaaaagaaggaaagacagagaagaagatcgtcttttccggtgatatcggaaactgcaatcagccgctgatccgcgatccgcagtatccgacacaggcagattatgtgctgatggagtcgacctacggtgatcggagccatgatgcaccggcagattatgcgacggcgctggcagaggtgatccagagaacatttgaccgcagaggaaatgttgtggtaccatcatttgcagtcggacgcacgcaggagatgttgtacttcatccggcgtatcaaagaagaagggcttgtgcatggacatgacggttttgaagtgtgggtggacagtccgcttgcgattgaggcgaccaatattttccgtcaacatatgtggagtgattttgacgatgaggcaaccgagctggttgaaagagggatcaatccgattggctttgaggggctgcgcacgtcggtcacggcagaggattccagggcaatcaatgaaaaaccgcagccgaaggtgatcctatccgcgagcggtatgtgcgatgcgggccggatcaagcatcatctgaagcataacctctggagaaaggaatcgacgatcctctttgtgggctatcaggcacacgggacactggggcgggcacttctggagggtgcagagcatgtgaagctgttcggtgaggaaatcgaggtaaaggctgagatatgcaggctgcccggcatcagcggtcacgcggatcgggaagggctgctgcgctggattcaggcatttgagaaaaagccgcagcaggtatttgtcgtacatggcgaggattctgtgtgcgatctgtttgctgagcgactgcaaacagaattcggattttcggcctatgcgccatattccggggcagtctacgatctggcaaacggtgtatttctcgaaaagccggacggtgtgcggatcaggaaggacaagagagtggcggcagccgggaagagctcgcggatgtttgaaaagctggtggcagccggacagcgtctcatcggggttatccggaaaaacgagggcggtgcgaaccgggacctggagcgctttgcacgggagattcataaattgtgtgaccgctgggagcgataagtccggtcatccggcctggcggaaaggtcacaggagcgcataaaaacaaagggctgtgccatcaccaaagagtgacagaccggagtatagagatcgaaaaaatccggattgtacagagaattcggaaatcagtataggaaagacagagaatgaagaaaataagacagaaaataagaaacagaaaagagggtgacgtaaaacgcaaatccgtatgtcttggtctgacgacggtgcttcttatgctgtcattgaccgggtgcagtgtggcagagcgggtacagtatcagtgggagggcagcggagccggacactgggaggaggctgcggtcgaagccggtgtggagaatcaggtagaggagtattattacaatcatctgccggaagagcttcatgaggcatatcgggaaatctatgtgcatctgatgaaaaatgaggattccggaagctttttatctgagattgacgtggacaatttctggaaggcctactatgcggtgctcgcggatcatccggagatattctggatcgggacgagtgcacagatcgaggaatccgggattggcaagacggtcgtttcctacacctgtgagacgaccgttccggtggaagagcgcagtacgatgaaagcgcagttggaggctgcggcgaatgagtgcatctactcgattccgtcagacgcttctgattatgaaaagatcaaatatgtatatgagtatatcattgatctgaccgattacgatgcgaacgggatcgatacgcagaacattcagagtgtgctgctgtatcagaagtcggtatgtgcaggctattccaaggcatttcagtatatcctgaaccggatggggctgttctgcacgtacatcacagggacgatcagggacggcggtgatcatggctggaacatggtacggatcggggaaaattattattatgtcgatgtgacctggggcgatccggtgtttgccaaccagatggacggcgaaggatctgagagcgtgacaaattataattatttgtgctgcacggagaccgagctgtttaagacgcatgtgccgtcggatgcggtaccgcttccggcgtgtacgtcagacgactataactactacaaacggaatggctgctattatgagacatttgattatgacactatttataatgcacttatgaattccgtgtggaacggaagttcgaatattgtgatgaaatttggcagcgatgaggcatatcagacagcaaaatatgagatgtttgagaacggaatgctgacagatccggggcagtatctgatggaaatcaacggagtctcaacgtggaattacaaatatcatacagatgatgaattttgtctgattacgctatattggtggtagaatgcggaagattttctgaatattttccgggatggcttgctttttttcagacgatcacatatactggaaactgacgctgtgcgttgcaaaacaattgaatatgaggagaaatagaatgaaaaactggaagactgttttagcagggcttttcattttttgcctgctgatctgtgcgccgcttgctgtgtttgcggaagaggatggggcgcagcaggaggaagaaacagaggaaccggttccagaatcatacgattatccgattgagtcgaatgagatcaaggactggcctcagggtcccaagatagaggcggcgtcagccaccgttctggatatggacagcggaacatttttatatagtaaaaatgcgacagagaaaatgtatccggcgagtattacgaagatcatgacgacgctgcttctggtggaaaactgtaatctggacgatgagattacgttttctgagattgtctatgaccttgaggagggaagctcgcatcttggtatccagccgggagagacgataactttgcgggatgcggcatatgggattatgctggcatctgcaaatgacatttccaatggtgtggcagagtatatcggcggaagcatcagtggatttgcagatatgatgaatgcacgggctgcggagatcggatgtgtgaatacgcatttttccaatccgcacgggctttacagcgacgatcattatacatgtgcctatgatatggcgctgatcgcgcgcacggcctggcaaaatccgacgtttcgaaaaatcgtctgcacgagaagctatatgattccaaagacgaatctggcagatgaggaccgctacctcacgaaccatcacaagatgatgcaggaggatgaggaatattactgggaatatgtgatgggcggcaagaccggattcacgtcgcagtgcttaaatacgcttgtgacctatgcgcaaaaagacggacagagccttgtatcggtcattttgcgggtgaacggggcaggaaaagcatataacgaatcgaagcagattttgtcgtatggatttgacaatttttctacggtaaattataaaagaggcaactcttcaagaagtttttatgatataatgggtctgacctatctggggcatgcggcaaagcttcagtcagtagtatggaaacgcagcccggtatcagatttttccgtttcccttacgattccggacacgattgacgcgaaggcatttgcgcatcaggtggatcaggaggggagaaccacgaatgtcacttatgaatatgaagggacgaatgtgggggaagcgagaggatttttttcttctatttatgctccggtacagcttgcatttgaaggagatgcggcgataccagaggatgcagagacagaggcgtcgtcagaagccccggtacagctggaggggctggatggtgtgctggcacagacggcggtgattttccagtccggctacacgctcatcggggagtatgcgcggacgcatacgatgacagtactcatagcaggggcgatcgcacttgtgctggtgcttgcttttattgtgattctgattttccggtgtacatcggatatgcggatccgcaggcgcagaaagcaggaggagaaggtgcggaagcgccgggaggaggaaatcgagcggatgactaccgcggagatcgaggcagagcttcgagcaggtatggagcaggaacgcatccgcagggcacaggagcagaggcggaatcaggacggccagggaagagcatgaataaatacgagtataaataataaaaggattgcaggaagggaagggtacagtatgaattgggtagcaccgattaaagatgatgagacactggagaagtttaaggcaaagctgcgtgagatggacgataagtattatattatgtttgagatcggcgtcgggacggggcttcagctccaggagatcctgaagtttaagaataaagatatccgtgggaaagacagcattgaggcatgcatcggcacgaaaaatattcgccggacattccagatcccgccggagcttaaggagattatcaccagatacacagagggaaaggatccggaggcatatcttattttagggcatgcgtcctcaccggctccgctgtcccgtgagcaggcatatcgtgccttcaagagcgcaggcaagagcatgggactgacttccatcggcgcacagacgatgcggaagacttttgcgtggagatactataaatccaccggagatatttactatctgcagaatcttctgaaccatgcgtctccatccattacctaccgctatatcggtgagaagccaaacgtagaggtatatctgaagaagatgacgccggaagagaatgagcgcagccgttatatgctctacaagaacggcaatggtaagaaacggattgaggcgattcgggaaatgctctctgcgattgatgcagagatggacaatccgctgaacaatgacgcttactacggaagagtggactgtctgctgacggagatggaagatctcgtcgagaacttcaataagacaaaatagaatggcataaaaaagggaaccggtgaaatgatccggttcctttttttacttacttacttacttttctttttgcttttctttcctgtcgtagattcctgttggagctctttctctgcctttgtaagctttgcgcggagcttctgcatcatggactttttcttcggcggagtgtcgagcggtccgcgcacgccgcggacttccataatgtaaatgccgctgatgactgcctttatttccttctttaccgggatggtatcgaagatcgcagaatcggcaacgagcgtcatgatcctcgggccgacctttgcctttacgatcggaagcttggaccgacgcatgagcttcggcgtctggtcaatcacgatctgaggcagtccggactgttttagtggcatgatctttttatcgataaccagcatggagacggactgcttcgcagcctccatctgttcctgctgagcagcctgctttcgctgcattttccgcccgacgaaatacaggacgacaagggcaatgacaagaatgatcaggatgacaagcaataccttaaaaaacgtagacatatgtaccctcccacaaacagaattcatcccatattttagcattgaatgaaagaaagtgcaaccagaaaatcagcgcctgtaattgtggaaaaacggtgtcctttttcttaaaaataaagaatgcctcgccatatctgggaaaagtatggtatactggttaatgtttatgagtaaaatcgtctgaaatgtctgtgctgccgtttgtctggcagcagaagggcttctgctttacggtgaaggaaagaaagtgcagacagggggacagaaggagtgaatataatatgagaagaaagaatttaatgactgcgttgttgtgtgcggcagtcgtggcagcatctaccgtgatggcgccgggagttgtgatggcagaagagaccgaggctgttaccgaggctgttacagaggcatccacagaggcggcgacggaagcagataccgaagcgttgaccgaggcatccaccgaagaggcactggagctcgcagagcgtccggactataaggcactggattatgtggagctgggcgagtacaagggtctgacggtagaggtagagccgacggccgtaagcgacgatgaggtgctcaagcagatccgcgcaaatgcgggcagcgatatcctcgaggaggtgaccgaaggtaccgtcgaggaaggagataccgcaaatattgattatgaaggaaagctggacggcgaggcatttgaaggcggtacggcaaaggatacggatctggagatcggttccggtacatttattccgggcttcgaggatggactggtaggtgtcaagatcggggatacggtcgatcttccgctgaccttcccggaaaattatacagaagagctggcaggaaaggatgtagtctttaccgtcacggtcaattccgtaaagcggatgccggagcttaccgatgatctcgtaaatcagatcactgacggtgagtacacggatgtggcttcctataaagagagcgtccgcaaggatctggaggatgccaaggcagcatcccgcccgagcgagatcaacaacagtctgctcactcagatcgcagcgacgtctacgattaaggaatatccgcaggagcttgtggactatgcggcgaataatatgaagaattactacaagcagcaggccgagagcagcagcatggagttcgcagacttcctgagcacatattttagcatggatgaggataccttcaatgagcaagttgacctggtcgtaaagcagaacctgcgtgcggagctgtatctgaaggcgatcgcagaggcagaagatatcgagctgacggatgaggaatacgaagcaaaatgcgaggagtacgcagagaattacggctacgattctgtagagaaatttaaatccgcatataccgagaatgagattcggttaagtgcactggaggataaggtgctggagttcttaagcgataatgcgactgttgtggagaagagtgaggatgagaccgaggattccagtgaggcagaggcatctaccgaggcgacatccgaggatggtaccgaggctgctgtcgagacagagacagaggcagctacggaagtggctacagaggctgcgacagacgcagagtaataagcagattaagaaataacgaaagacagagggtactgcggatagcggcaccctctcgtatattaagatagattgagagaagggagcggtgattcatgaagaaggcgggaatgatcttggagggcggcggccagagaggcattttcacgagcggtgtactggattatctgatggaaaagaaggtacaggtgccatatgttcttggcgtgtcagcgggcgcgtgcaatgccgtggactatgtgtcgaatcagattctgcgcacaaaggagtgcatgcttgatgcacagctggataatgagctgtatggtatccggacgatggtggagacgaagcattttatgaatatggatctgatcttcgatgaattcccgaatcatctgtatccgttcgattatgaggcttatgtgaaatcaccgacgcgctgtctgctggtgacgacgaactgcctgaacggaaaggcggaatatctggaagagtatcggagccgcgagaaaatgatgcagatatgccgggcttcttcgagcctgccgtttggtgcgccgatggtaaagatcgacggtgtgccgatgctggatggcggaatcgcagactccattccggtacgcaaagcgatcgcggacggatttgaccacaacattgtcatcctgacgcggcataagggttactataaggaagagcgtaccgatgcgacgatccggatagcaaagctatattatcaccgttatccgatgctcgtaaaggcattgtcccagcgggcgcatgtctacaaccggaccttagatctgctggatcgcctggaacggaaaggaatggtctttgtcatccgtccgacggcgccgtgcgtgagccggacggagcgggatctggagaagctggaggatttttactggcatggctatgaggaggccaagcggctttatccgcagctgcacgcatggctggagcagcgggaggaatgtgtcagccgcaagcgtttgctgcggtaaggataaaaagaatgccgaaaatgcaaggattctggttgcggaaaaagggtatctgtgctaccatgaagctggtgacaaaaaagtgtgtgatgagcaaaacaatgcgtcagacatccgtaagggtgctggcgcattgtttgcggctatagaaggaatgggggcggggagtatgaataatacacagtccaagacgcttctgacagaaggaagcatatggagaaaaatggtggcatttgcgttgccgctttttttcggaaatctttttcaacagctctataatacggcagattctctgatcgtcgggaatttcctggggagcaatgccctggcggcggtgagttcatccggcagcctgatttttctgcttgttggattttttaatggaattgcgatgggagcgggcgttgtcatcgcgcgctattatggagcgagggagatcaatgagctgcaaaaagcgatccatacgacagtcgtgttcgggattttgtgcggccttgtgctgatgacagccggactcatactggcaccgcagatcctcatctggatgaggacgccaaaggaagtattgccggagtccactgcatatttccgggtgtattttatcggctcactggcatttgtactctacaataattttgtcggtatcctgcagtcagtcggggacagccgccacccgctatattatctgatcttttcctcggcggtcaatatcgtgctggatcttctgtttgtcggtgtgctgcattttggcgtggcttcggctgcggctgcgactgtgatttctcagtttgtaagcgcagcgctttgcctgtatcgcctcatgtataagagcccggacgattaccggatatcttttggccgcctgcagctaaatccgttcatgctgaagcagatcgtaaagaacggccttccggcgggcattcagaattccgtgatctcgattgcaaatgtgttcgtacagtcgaatatcaacagcttcggaaagatcgcgatggcgggctgtggctcgtattcgaagattgagggctttggatttttgccgatcacctgtttctcaatggcggtgacgacgtttatcagccagaaccttggcgcgcgtcaatatgaccgcgtgaaacggggcgcgcggtttggaattctctgtggggtatctctggcagagcttgtcgggatcaccctgtatctggcggcgccgcagctcatcggtttgttcgaccggaatccggaggttatcgcctatggtgtgcggcaggcaagaacgatcacgctgttttatttcctgctggcttattctcatatgatggcgggaattatgcgcggagccggaaaggcaacggttccgatgctcgtaatgctgatctgctggtgcctgatccgagtgacctatattacgatcgcagtgcggatttatccggtgattgacgtgattttctgggcttatccgctgacgtggtccctgagcagccttctgtttacggtttattaccggaaggccgactggatacatcagcaggcggatcgctcactgcgtgcatgagcagcctgtaaaaacggattgcgaatattcactttactgtgacaggaacggatcagatcattttccggaagagctgcgtcatctcatcaggcgtctcgtggaattcacgtttgtaccattcatcgagcagaccgaacagtccatatgagtaaaatcgcgccgcgtatgcttcgagtgtacttttactttgctgggagatcataatctgataaaaggcactgtagaccgcagactgtgcaccggcctgataaatagttgtgagcagttcgcggatctgataggtaaatttaaaaaaatcgtgcgcattttccagagtataatgctgggagatctgcggctgcacagccgtatagcgcagccagagctgtacaagcttgaaggtcagtgcgtcattttttgtttcaaagtggcggaaccacgtcgagcggttgacgccggctgctgctgcgatctcattgaccgtgatcctggaaaattctttctgaggcatgagctgaataagcgcatctgccatacattcttttaaaaacccggaggctcttgcgttacttcccatggggactcctttcctgattcctgcaggcaacagttgaaaaagtgctcgctgcgacttttaactgaaaaagtcgcaaattgccctgagcggcttgtttttttttgaatgatcttctataatactgctttaaaactgcaacttttgttgcatagagcgtaattagatgaatgaactgacattagttgtatcgtaaaaatcgaaaaaagtcaataagacaggagataaaatgagtatacgaatttttacagattctgcatcagatatcacacgggccgagctggaagagctgcaggtcgagctgatcgcgatgccactgcagtgcggagaggaaacctatgtggatgataagacgacgccggtggagatattctggcagatgctgctggatggcgtaaatatcaagacgtctctgccttcgccggatacgttcgtgcagaaatttaaggcagcaaaggaggcgggcgatgaggtgatctgtatcctgatcgcatcaaagctttccgggacgtatcagggggcaatgctggcaaaacagatcgtggactacgatggcatccatgtgattgatgcgggacatgcagcggcatccgttgcggaaaaaatgcttgtgatcgcagcgtgccgcatgcgggatcaggggtgtacagcggaggagatcgcgcgaaggctggaacagctgcgaggcagcgtgcggctgattgcctgtctggatacactggagtatctggcgcgcggaggacggcttccggcggcagtggcgagtatcgggacgaagctgcagctgaagccgatcatcgtctttggagagaatggagagattcaggttgtaaagaaatgcatgggcagtaagcgggccatgcgggacatgactgagatggtgacggagtgcaggatcaatccggaatatccggtgatcccgatctttgcacagaacgataggaactgtcaggagtatgtggcctctttgaaaaatgccggctgtgtaggcgcgatgcaggtgccgcagggaatcggggcgacgatcggaagctatatcggaccgggtggatacgggatcgtatttgtggaaaagtgagcggtcgattgttaacttaaaataaaaacaggttgacaatcggatgtgatacgtttatactgggcaggagtcgtgtacagcgctcctgtccaattttgtctgacatgcttatgatgtggcccttgaaggaacgctgtgctgcgagctttgtatatgtgtacggaagaatcagtacattcgtgcaaatttctatggaaagaggagaacaaaaatgagtgacattgtagcaaaatcaaaggcgtcgtcctttcgtgtttcacagatcgcgatgatcggcgtggtgacggcagtgacctgtgttcttgggccgctggcattaccgatcggaccggtaccgatctcactgacaaatctggtcatctatttttccctgtatgtgctggggatgaaaaatgcgacgatcagctatctggtttatcttctgctcggattgttccttccggtattttccggtggggcaggaggacctggcaagctgttcggaccgacaggaggctatctctttgggtttatccctatggcgattctgagcggtattgtgatcgaccggtacatggatcagagggtacgttgctttcttgcactggttgtcggcacggcgatctgctatggctttggaaccgcatggctggcctatcaggcacatatgacctttgcagcggcactggcagcaggcgtaattccgtttatcatcggagacctgattaagatcgtgctcgcggttgtgatcggaccgcagatacgcaagcgtctggcaaaggcgggcgtgtacgcgtaggagcagaagaaagatttttgataagaaagactttgaattctccggatagagatatctgaggaatttaaagtctttttttaactgataagctgcgaagcagcatccggttataacatatcataaggaggggcccgcatgcgggaagattccttgtgattctacaagtagcgaagctaggccctgtcagcagagctgcagggatggattgcgaatatccgctttaccgagaatttacttgcaattataccggaattgtatataataagacctgttcggtaattttaaataaaaagtttagtatatagaaacggaggtgcggttttggatatcggaaagaagctgaaggagctccggctgcagaacgatctgacgttgggggatctggcgtcccgcagtgagctcacgaaaggctttttgtcacaggtcgaacgcaatctgacgatgccgagcatcgcgacgctggaggatatactggaggctctggggacgaatttgtccgagttcttccatgaggagccggagaaccagatcgtgttttcaacgcaggatttttttgtggatgagcaggaggactacagcattgagtgggtgatcccgaacgcacaaaagaacaagatggagccgattctgctgacgcttcatccacataagcgcagccaggaaatggagtcgcatcacggagaagagtttggctacgtcctgaaggggactgtgacgctggtgcggggcagtaaaaagtaccggttgaaagcacatgagaccttttatctggacggctcgcgcggtcattatctgtacaacagcggcagcagcgacgccaagatcctctggatcacgacaccgccgatgttttgacaagggagtatgatacacggaaggagaaaaagtaatggaaccaaagaaactgatcgagtttcgcaacatcgtgaaaaactttgacggccagattgtcttaaagggtgtcaatctggatatttatgaaaaggaatttgtgacactgctcggaccgtccggctgcggcaagacgacgcttttgcgtattctcggcggctttctggatgccgacgagggacaggtgatttttgacggagaggagatcagcaagaagccgccatatgagcgggagctgaacaccgtatttcagaaatacgcactctttccgcatctgtcagtctacgagaacattgcgtttggcctgaagatcaaaaagatgagtaaggatatcatcgaccagaaggtcatgaagatgctcaggctgatcggcctggagggatttgaaaataaaaatacgacgctgctttccggtggacagcagcagcgtgtcgcgatcgcacgggcgctggtcaatgagccgaaggtgctgctgctcgacgagccgctggcagcacttgacctgaagctgcgcaaggagatgcagtacgagctgaagcggattcagcaggaggtcggcattacctttatctttgtcacacacgaccaggaagaggcgctgacgatgtcggataagattgttgtcatgaagggcggagagatccagcagatcggtacgccggaagagatatacaacgagccggcaaaccggtatgttgcaaatttcatcggagagagcaatatcattccgggtatcatgctcgaggattacaaggtgcggtttgatgatatcacatttgactgtgtggatcttggatttaaggaaaaggagccggtggatgtcgtcatccggccggaggatatcgatatcgttgatgtaaaggacgggaagatgaccggagaggtgctcagcgtgctctttaagggcgtgcactatgagatcatggtcgagacggttccgggtacgagcgtcacggtaaatatgagcgttattaaaaatcaggacgtcaccggagatggtggtaaggaaaagatcagtgcaagtgatttctacgtggatatcgaggatatcgggcagcttgatgataaggaggtcatcgcccgtgcaaatgcgcaggcgtggaatccggagagtgatgagtatatttcgattgcgaagctcgagtacgacgtgaagccggagcttggagaatatccggtgcgttttgcgacagcgaacggtacggagattgagcggaagatttttgttgtgaatcagccgtttgtaaaaaatgagaaggccaatgagggagtcatggcattcagcttcatcaagacagtcgatgagatcaaagagtcacaggcacttgatacggacctgaagacgtgggcgaacgcgcagggctggaagctgagtgacgaagagcagagcgtggagatttatgtcgattatgattttgatccggaaaatatgaaagaaggcgtttatcggattacgttctcgacggagggccgtgagttcaagattcacacaaccgattatacggaggtaggtcaggaggtcggcctgacattcttccccgaggatattcatgtcatgtcaaggatggtgtattaaatgaaacggttttcacagctggttatcccgtacatcgcgtgggcggtgatgatgctcattcttccgatgggcctgattgccctgtattcctttaccaaacagggaaatacgatcgtatccttcaccttcacgcttgagcattacgccaaattttttaccgacccggactttctgatcgtcctgtggcgttccctgctcatcgcatttaagacgaccgtgatctgcctgctgctcggttatccggtagcattctttatctccagaagcagcgaaaagctgcagaacatcctcgtgctcgcgatcacgatcccgatgtggatcaatatgctcgtgcgcacatatgcatggatcggactgctcagcgagggcggactgattcagcggctgcttggatttttcggaattacacgaggagagcttttatatacggaaggggcagtgctgctcggcatggtctacaattttctgccatttatggtactgcagatcaatacgtccctgtgcaagatggatcattcgctgctcgaggcgagtgctgatcttggggcaaatgcgcgtcagacgtttatccgcgtgacgcttccgatgtccctgccgggtgtgattaatggaattacactcgtatttcttccggcggtcagctcgttctttatcccgaagctgctcggcggcggtcagtatttcctcatcggaaatctgatcgagaatcagtttattaccgtaggtgagtggaactttggaagcgcgatttccatgatcatggcggcggttatgatgctgctcatgatgcttgtgcgcaaggccgagattcacaaccgcggcggaaaggaggagtaggagatgaaaaaggaaaaacgttcctttgggaaaattctgatggtactgacactgatcttcttctaccttccgatcgtgtatatggtcatcttttcattcaacagcggaaagtcgctgaccagtttttcgggattttctctgcgctggtaccggcatatgatggaatcgcacacgatgatggagtctctgtatacgacattcagtatcgccctgatcgcgacggcgatctctacggttgtgggtacgatctcggcgatcggcctgtcaaagtcaaagaaaatcgtgcagaatctgatggaacaggtcaataatcttccgatgatgaatccggagatcgtaacggcaatcggctttatgctgctgttcattacgttccgggtggagaagggttatgtgacgatgctgctcgcacatatcgcattctgtattccgtatgtcatgctctcggtcatgccgaagattcgttcgcttgatccgaatcttgcagatgcggcgatggatctcggtgcgacaccgtggcgggcgctgacgaaggtcatcgttccgcagatcatgccgggtatcgtctccggtgcactgattgcatttacgatgtcgattgatgattttatcatttcgtattttgtcaccggcggcggtgtgaaaaatctgagcatcacggtttacacgatgagcaaacgggtcaacccgagcatcaatgcgatttccacactggttgtactgctcatcacagccgtgctcgtgctcatcaatgttgctccgaagcggatggcgcagcgggcacagaaggcagaacttcggggacaccggattgttatgccgacagccgttgccgtgtgtgcggcagtcgcagtgtttgtgtttgtaaaggtaaatggcggcaattcggcacttccatatgaaggacagacactccacgtatacaactggggcgagtataccggtgaaaacctgctgaatgattttgaagcaaagaccggcgcaaaggttgttatggaaaactttgattcgaatgagcagatgtacatcaaggtggcaaacggcgagacctatgatgtgcttgtgccgagcgattatatgattcagcgcctgatcggggaggactatctgcagaagctggataagacgaagctggactgcatggataagctctgcgaggatgttatcgggctgccatatgatccgaacaatgactattcgattccgtatttctggggaacggtcgggattgtgtatgataaaaatcaggtcgacatcgaggatctggaacgggaaggctttgaaatcttccgtgatccgaaataccgtggcaacatttatctgtatgattcggagcgagactcctttatgatggcgttgaaggcactgggctattcaatgaacacatcgagtgagaaggagctgcaggaggcatacgagtggcttgtgagctgcgtacagacgatgaagccggaaatcgtcaccgatgagattattgacaacatggcgcagggcagaaaggcgcttggactgatatattccggcgatgcggcctatgtcatggcggaaaatgaggacatgggttattatctgccggagagcggcacgaatctctggtctgacgcaatggttattccggcgaatgcgaagaatccggagctggcgcatgaatttattaattttgtcagcgactatgagggcgcctatgacaattccagctttgtcggttatacgtctgcaaatcaggaggtcatggataccttatacggagagggcggcgagtacgagggcattgatgcttacatgccgcgttccggatatccgaaggatgaggtgttcgagtataatgaggatacgagaaagacgattgcaaacctgtggagcaaggtgaagattgcggcgagtaacgcagagtaaatggctcttttggacccaaacagatgcctgcgaattgctccgctgcgaagcagctcccgcaattctacaaacatgagaaagcagatatgtatatttgaaatatgcatacctgctttttttgtcgaatcaagtaaatcattgttcatttctgcgggtccctgcctgtgagcaaacagggaaatggtcaagtttaaaaatccttccggataaacaccgccaccgaccgcgggcgcaggataaattcatgatcgattcgggtctcctgaccttccgggtagcagtagcgtccgttgccgtccccgaaggtattaacacacagataccatgcaccgccgtgctgtagcctcgggagtgtgattgcaacatcctcccagtagctgttgaccgacacatagacaatatcatcgcttccgtttgcgctgttatatccggcgaagctgacgctgaaggtatgcgcatcgcgcggaatatcgacgtcgtctgcattggtgttgtgcgtatggatcggatccatgccacagacggcatccggcagctttttgcggatgatcgggtggcgtttgcggaaccggatcatgtactggaaaaaggagaagagctcctgattttttgcaagcaggctccagtcgagccaggaaatctcattgtcctggcagtagctgttgttgttgccatactgcgtgttgccgaattcatctccggcgaggaacatcggcgtgccgcggctgcacatgagcacggcacaggcgttccggatcatccggtagcggagctttaaaacctccggatcgttggtatcgccttccgcaccgcagttccagctgcgattgtcattgcagccatcagtattgttccagccgttgcattcattgtgcttttcattataagaatacaaatcatataaggtaaatccatcgtggcaggtcagaaagttgacgcaggaattgtatccggcgtaattacctgcagaatgagagtagtagccgccgtacagatccccggagccggaaatactccatgcagcatcccatgattgccagaagtccccttttaagaagctgcggagtgcgtcgcgataccggccgttccactctgcccagcggtgattggccgggaagctgccgacctgatacatcccgccggcatcccatgcttccgcgatcagctttacgttgcttaagaccggatcacaggcaagtgtctttaaaagcggtggattgttcatcggagaaccgtcttcgtttcttccgagaatcgtcgccagatcaaaccggaatccgtcaatgcggtagctgatcgtccagtaccgcaggcattccaaaatcatctgctgtacgatcggatgattgcagtttaaggtattgccgcagccgctgaaattgtaataatttccatccggcgtgagcatatagtagatgttgttgtcaaagcccttgaaggaaaagctgggtcccatcgcatttccttcggccgtatggttgaacacgacatctaggatgatttcgatcccattctcatgcagtgcccggatcagttccttaagctcagtgccttcatggttgcgctccatttcagaggcatagctcgtattcggtgcaaagaagctgacagtattatagccccagtattcgagcagccgctggccgttcacttcacgtacattcatacactcatcaaactcaaagatcggcatcagctctacggcattgatccccagctcttttaaataggggattttttccttcaatcctgcaaaggtgcctttgtgagtaacaccggaggagtcatgttttgtgaagccgcgcacgtgaagctcataaataatcagctcgctcatttcacgggaagactgtgatgcatcgccccagtcaaaaatatcctttaccacccgggcgtgataagcgtgcggttttttgattccccagacattctgaccggtgactgcacgtgcataaggatccagcagaatctggtttttgtcaaacagcagcccggcgctcggattgcgcgggccgtcgatccggtaggcgtactcaaactcctcgatgttcagatcgaaaacgatcatggagtatacatcgccgatcttataagactccggaaacggaagcgtggcgtacggtgcttcttcgccgcggtggaacaagagcagctcacaggctgttccgccatgagtgtggattgtaaagttgacaccacacggaatcgccagcgcgccatttaaatcaaacatgccggggcgcaccgggtatccggcgatttcatccatcggacgaaacgatatcggtgtactcattgtatattcatggtttaatttcaaagaaaatcctccagtctgtccgcattcggtagtttgtccgattgagcagcagacacagaatatttgtctcagccggacggatgctgcatggcggacataagtgacagatcggaaggaatgtcggcagcatcagtgatttattatagcgctttacacgggtggtttgcaaggtggtggcagcactaagcgggaatgtccgtgttacaaattaaaaaaggattgacaaatacatgccctggtgctatggttaattacataagtaatgaaccatgcaaccaaacggaaaggaggagcagggtttgaatgaaattctgacacaggagaaatccatttatattcagataaaggaaatgatcgaagatgacatcttacgggatgtgctgcttgaggaagaacgggtgccgagtacgaatgaactggcacggctctatgcgatcaatccggcgacggcggcaaagggagtcaatcttctggtagatgaggggatcttatataagaaacgggggatcggaatgtttgtggcgacaggagccaaggcgcagatccaagggaagcgccgggaacaattttatgacaattatgtaaagagcctgatggcggaggcgatgagccttggtatcacgaaaaaagaactggtggcgatgattctggatgcaaaggatggaggtatggcagatgagtaagctggtcggcagaggaattgtaaaaacatatgggaagaaaacggtacttcaggatgtcaatctgatgctggaggagcacaagatttacggtatgatcggaagaaacggagccggcaagacgaccttgctctctattctgaccgcgcagaatccggcaacaaagggagaaatactgtggaatgggattccggtatgggaaaataaagaagctctgtctcatatctgtttttccagagaactgaaccaggtgtcaggcaataatatgaacgcactgcgcatcaaagattatctgcaggccgcggaggcgtttctcccacactgggataaacagatggcggactcactcgtgaagcagtttcagctggatccgaagaagcggatcaacaagctttctaaaggaatgctctcaatggtgacgatcattgtggcgctggcgagcaaggcagattttacaatccttgatgagccggtcgccgggctggacgtgatcgcgcgggagaaattttatcacctgcttctggaagaatatgaaaatacggaccggacgtttgttgtctccacacacattatcgaagaggcagcggatattttcgaagaagtcattatcgtaaaggaaggaaaaattctgctcaaggaaaacacacaggatttgctcgatcgcagctatcatgtgagcgggcatgtcgatcaggtcgatgcagcctgtgctggacttgccgttcaccatgcagagcagatcggtcgcagtaaaggtgtaactgtattgctggaggaaggacaggcaatccgtgcggactgcgacgtgagcattcagaagccgggactgcagaaattatttgtagcgctgtgcggggaggagacggtatgaggcagatcagatactgggggagttatatcgggatgacgtgtgggctgacgcttcttagttcgcttctcatgacggcgctgtctcttttacgcggcggtatggcggagctggcacttgcgggggtcgggatgtactatataccgtatctgttttttgccggactgttctgtatgtcattttcgctcctttcctgttttcaggtgtatgcatcggcgatacttgccatggggtgtacgagaagacggttcctgctcgaggtactggcagtggcgctgacagaggcagtggcgctggtcggcgtgagtgcactgttggggcgacttggtaaaggggcggtagccgcggcggttcaggcgtcggctctggctggaatgctcggagtgatccttatcgtcatggctgcatttttgctgcttggtgcgatgatcgttgtgtttggaagaaaagggatctttgtgatgatgcttttgtatatggtcatcggtgccattttcggtgcagcggcaggcatgggtacgaatctggatgccataaccatacaggatatgctaaataatgcggctcatatctggaaacggttactgcctgcgggatgtgtgctgttttgcctttgcggcgcgagcgtgtggctggtacttcgaaggtatgaggtgcgcagctgagcggaaaggaggagaatcatgttacagacaattaaaaaacagatttgtctgcagaaaagtgactggctgcttggcacaggatgtgagctggggatgtggctcatggggattgcattcatgctcgtgatgcagcgatcagacccggaggatacgtatgtgctgcttggaacgatatttgcgatcatcggaagcgcaggagtcgccacatttattatgctgtatgggctcgggattaattttaacacgcagatctctctcggaaacagacgaactccgtttcttatttcctattatatcgcgtgggtggcaggctttttcgtatatttcggaatcctgcttctggtatcgcaaggagagcatgcagtgtatgcatccatctgggccggaacggcaataaaagaagaatttgatctgacgagggtgctgttgcaactcggaatccctgcctgccttgtgcttccggcactgggaaccttttgtggagtcttgctgctgcggtataagcaaaaggcattctgggttctctgggttttgtggatgcttggcgtgctcggtattccgaacctgatggatgcggcggataatgcggtgcagtcggcggcgggaaagcttggacttgtgcttcggagcgtagcgcagtttatatttggcagagaatttcctgtactggcggtggtggctgcatttttgctgctgactgtgtcctggctgcttttgcgccatcagcaggtagaaaattaagaaagtctaaagtgtctgaagggactgtgaaaaatcgcttaaggtttcccaaaagtggttgacgccgggaaaataacaggtataatcagtgaaaacacagacatctttgtattgccggatcaaaacgaaggcgatacgaccaacccgaaggagggattttcatgcagaagctcgaaagagacgtatacctgtattatcatatttatcagtacattccaaagacattgcgcgagacgctgaatcgctggttcccgggactgatccgtgaaccgattccggtccgggtacggagtgagcaccgggcggatacgcatcggagatgaaactttaccggaattttacattgtttttaggcgggtatgatggaaggaacgtacaggatatgagacaatggaggcacaaagggaacgagatacaaatcacagataccggatgggagcctgatcaaaacgtttgattttcagaaaagaccagaagcacttccggatgatgcgcagggcagatctcagggcttttagccggactgacaggcggggatcgggtttccggaggaaaagacgaactggcaaaacatttattatagatgacagagctataaagagatataataaaagatatatgaagcggcaggagatgcatgatatttccggccgcttctttttgggtgatctttacaaagaccgccgctttacctgcggcaatgggggatacgaaaagcaatattgaaaaaaatggaaaaaaatgaaaaaagttgaaaaaagttgttgacaaacaaaaagaacgatggtattataaacctcgctgttgaggaaacaccttaaaacaaaggctttcacgaagaagtttgaaaagactttcggtcagacagcaaaaagaaaaataaaaaagttgaaaaaagttcttgacaaactgtgaacaacatgatatgatatcaaagttgctccggtgaggagata

SEQ ID NO: 292 - DNA, 22767 bp, Unknown
  16S sequences of unknown bacteria
cttccgctgcgctgtcgctccgctcaaatgcggtaggaacctacggttcccccacaaacgccccctccctttatatacgcacgatgatctacaaagagctgctccccgcatgagcaggcgtttcggtaaaaattacctgactaaatcagataaattcacagttcgttcattgatctactctttttccttcacaacttggtggtaagattcaaatagttgattaagtcagataaatcgcaaccctgaaaggagaggtcactcatgaataaactgttccagccggttcaggtcggctcccttaccttgaaaaactccatcgtctttgctcccacttcggtgggccgggaaggcctggacttctatgagaagattgccaaaggcggtgcttcactgattatcctgccggatatttcggtaatcccgtccatgctgggtgctccctctctgggttctctgcagtatgccgattacttccgcaaggtcgtggagatctgccaccggtatgactgcaaggtatcggttcagctgttccacccggaatatgatgtggactacatcggcagcctctaccgtcagcgcggcaagatctccagtgatgaggtacatcgtctgctggcagaaaatatgatgggttacgccgataccctcaccacggagcaggcagacgccattgtggaaaagttcgctgctgctgcccggaatgcccgggaagtgggcgtggatatgatccagatccacggtgaccgtctcatcggcagcttctcctcggcgctcttcaaccaccgcaccgaccgttacgctccccataccgcctttgctgaggcagtagtcaaggcagtgcgggcagccgttccggagatgcccctcgactataagctgaccatccgcactgaggagcccaagctgggccgcggcggcgcactcatctccgaggtgccggaatttgtggaggtactggaggctgccggtgtggatgcgttccatgtggcaatcgccaaccattccaatatccgggataccattcccgctgccaaccatccgctgcttcagggcgaaggctgctttacccatctgggccgtgcggtgctcactatggcccgcaagccggtgtgcattgtcggaaagctccagcatgccgatgccatggaagctctgctggaagagggcttcgcgatggtaggcatgtcccgtcagctggtggcagatcccgagtggcccaacaaggtacagtccggtcagaccgattcgatccggtactgtgtatactgcaattccaagtgtgttgcctcgatcatgagcggacagccggtaagctgtatcctctgggacaacgccaatgaaaccaaggaggtaaacgcatgaaccgtacccgttttggactgatcgctggtctgatggcaatgctgcttctgttctccggatgcagccagaacgattctgtggacagtgtatccggcgccacacagaagggtgaatcccagtcttcggcggacagcactgatactgcctcttctgcttcgctctatttctatgagcagggttcgctcaccggtgaagagctgatgactgcgatccggaatgcagagggcagctgttcggtggcaactgtcaatgcggatggttcccccaatctggcaaactttgtcccctatcctgccggtgaggaatatctggcctttaccttctcctccaatgtgaccaaggagaacctgctgcgtaccggagaagccatggtgtcctactacatctatgacgccgattccgaggataagtacgagcgcaaccagggtgcccggttcaaggtggaacctgtcaccgatgaagctgtgattgcccagctccatgaggaaactcccgagattccccagggcgcaacctttgtccacattgtagaggtactgcctctgggttaatcccagccataccaaaaaagagcgcaagccccgattccgggtgcctgcgctctttttattttgcaaacgatgccatcatacgccgaaccgggtcaccagcgccaccaggatcatcagcccgccgccgatccggcagcccagacggagcttgtcatggtcggcataatcccagctcctgggccagaccggatgtaccacaaacagcagcccatagagcagccagccaaggttgtggaaccagctgatccgggtcacaaagctcaaaacattgcataccaccaataccaccagcagaacggcaaactgctgcccgaatgtccagttcttcaatcgaagtcctcctctatatcggtatgatccttactcccttttcctgcaggaaggtccggaagctgtccgggtccccctgaaactcctgcttttgcaggatcatgcccttctgttccgctaccatcagccagagatccgccgtttccaccatggcttccagcttgctgtaatcaagcagccccggctccgacagctccactccctccggtaccgtgtagccgatcccatccggcaggaagagcagtgcttccgcctgggtatcccgctggaaatcccgggcatggctgagcagatcccgggcagcccgttcataggggttttccttgcgtctgaacttagagaacagcactgccagccccagcagcaacagcaggacacccagccccagcagattccccagctggtccgggttgcccaggctgcccataatcagcggcagggagatcagcaaactcagcactcccagagtcctggggagcagcacccagagcatgccggcgcctacaccgaacgccgccgcgcccactgccagcagagtgcccagttccctggggctctggacggcggggatcagtgcgaaaatgcccagcagccaatccaccagtgccatcacccgccggaagttccgtcgcccggatgagacgggcgctttgccctcctgcgcacggttcaggcggtcggtgaccttccagagcccgggcaatttctcccgggagtacatctcggtgagcttttccagtccctgactcacctgccggaacagttcctcctgttccggtacagcctgaaagacaaatttgtattccatttccccgcctcctctgctgattttacagccgtcattctgttttcagtatagcagatgccgctaccccagatatgaataaaaattgaaatcttcccgtcggtctccttttttaattccgactaagaatccaacgctatactggaagcaagctgaagggaggtatcccggtcagcaattcatctgaaaggagcagcaatgtatgtatcgcaattatgaatataactctgaaccccttgcgcaaggctccggacagccttcagtgccccagtggtgaaggccccaaaagaccatctttcttccagctggctgtcatccttgtgctttgcgctgccctgtttggcggagttgccggcggcagtttttatggcgtgaaccgtctgcttggcagtctggaaccggattcttctgattccggcagttcgctgaacagttctgtttctctgaccagtctgtcctattcctccggggattcttccctggatataacagatattgcggcacaggggcttacatcggtggtttctgtaaccaatatttccgtacaggaagtgcagagctacttcggtcagttcggacggaatggccgtggtgaaacccgtttgcaggagaccaccagctgtggctccggtgttattatcggctcagatgattcccagctctacattgtcaccaactaccatgtggcagaaggtgccacccagctttcagtcaccttcgccgatgaccagacctatgcggcccagctcctcggctacgacagctctgtggatattgccctgctgggagttcccctcaatagcattacctcggatactctttcccagatttccattgccacaatcggcgattcggatgacctgatgatcggagaacaggtggtagccatcggcaatgctctgggttatggtcagtcagtgaccaccggaatcatcagcgccctggatcgaaccatcagttcggacagcggcactacggcctatatccagactgacgcagccatcaatcccggcaacagcggcggcgccctgctcaatatggaaggggaactgatcggcatcaatactgccaaagtttcgtccacggatgtggagggcatgggatatgccattcccatttcccaggtactggaggtcatctccaacctgatgaactgaccggacggaatctctgatggaatttcctccgccggatcgccatgacagaatcagcagaacatgcggcttttttgcccgtttccactgcacagacctgctgccctcctgcccgcagcagagcttcagccccgcaccgcataaaaatctcccccgcacaaaaatacattccccggcagccccgggatcatataaaaaaggcaccctcccgggtgtctttttgtttgggaaagatattccgttcagaccggctgggaggcgggcgcaagtccggggtaaaggaaacagcctggtgggaagggcggtcagtttggattggaaaggctgtgcctgataacccgcaaaaggttggcagcgccgcgagggtacttgcagccagtcagccgaagcaagcgggactttttgcggaaaaggaggcaagccggagcggtatgagaaaagcccggtccaggaccgggcttttcgaatggaacgcagtccattccgatgtgggataggcggtcagtttagatcggctgggacgcgggcgcgaattttgggcaaaagaaaagggccggagcgcgacttggctccaggcccttgcctggtgccgctgacgggggtcgaacccgtacggtatcactacctcgggattttaagtcccgtgtgtctgccaatttcaccacagcggctgatacaagtatccaataagatattgtacatcaccactgcggtaaagtcaagaaatgccagggcccagcccttttcacagcacaaaaaaggagatgggataaacccatctcctcttttttatttcagcattgtccgttcagacagataccaaaattattcgtacagcttggccagcttggtcagatgctcgtacttgtcctctgcgatcttagcagcacggtcgaacagcttgtcagccttgtcggggaaggaacgcttcagcgagctgtaacgaacttcaccctcgatgaaggctctgtaatcagctgtgggagccttggaatccagctggaagggattctcgccagccagagtctttctgggatcgaagcggaacatatgccaataaccagcagctacggcattcttgatggtctcctgagccttgaccataccgcccttgataccctggttgatgcaaggagcgtaagcgatgatcagggacggaccatggtagctctcagcctcagcaaaggccttgatgcactggttgtagtcagcacccatagcaacctgagctacatatacatagccgtaggtcatagcgatgccagccagatccttgttcttgatctccttaccagctgctgcgaactgagccacagcacccagaggagtagccttggaagcctgaccgccggtgttggagtaaacctcggtatcgaataccaggatgtttacatcctcgccggaagcgataacgtgatccagaccgccgaagccgatatcgtaagcccagccgtcgccgccgaagatccagacgctcttcttagccaggaattccttatccttcaggatagcctggcagtacgggcagtcaggatgcttctcgagctcagcaaccagagccttggtagcagccttgttggcagtaccatcatcaacagtggacagatagccgtcgattacagccttgaagccttcgtcagataccttctccttgagctccatgatcttagcgatcaggtggtttctcagagtggactgagccaggtacataccatagccgtactcagcgttatcctcgaacagggagttagcccaagacggaccatgaccttccttgttcacggtgtaaggagtagacggtgcggagccgccccagatagaggagcaaccagtagcgttggcgatgtacattctgtcgccgaacagctgagtaaccagcttagcgtaaggagtttcgccacaaccagcgcaggcgccggagaattcgagcagaggctgcttgaactgcgagcccttaacggtggtctccttgaacttctcagcaacctcaggctttacatccagagactgaccataagcgaagttctcctgctcatgacgctgagaatccaggctctgcatggtgagagccttctcgcccttcttgccaggacatacagatgcacaagaaccacaaccggtgcagtccagaacggatacggtcatagcgaacttgtagccaggcataccggtcatgtcggtcatcttcatgccctcgggagccttggcagcctcgtcagcagtcagaacaacaggacggattacagcatgcgggcagacatacgagcagaagttacactggatacagttgtcggagttccaggtgggaacgtcaacagcaataccgcgcttctcgtatgcggcagaaccctgcgggaaggtaccgtcagcatccttcaggaaggtggatacaggcagcttgtcaccgcgctgagcgttaacaggagtctggatgttgttaacgaagtcaaccagatccttgcgatcgccagtggcaaccgggtaaacgaagtcgccctcagcgtcagcccaggaagcgggaaccttaacctctaccagagcctcagcaccggcatcgatagcagcatggttcatagcaactaccttctcacccttacggccgtaagacttggtagcagcgtccttcatgtactggatagcgtcagcagcaggaatgatgttggccagcttgaagaatgcagactgcagaacagtgttgattctcgagcccagaccgatttccttaccgatcttaacaccatcgatggtgtagaacttgatgttgttgcgggcaatgtatctcttaacagaaccaggcagtctcttgtccagctcgtccagatcccaaccgcagttcagcaggaaggtaccgccgggcttcagagcagcagtcatgtcatacttgtccacataagaggggttgtggcaggctacgaagtcagccttctcaaccaggtaggtgctcttgatcggcttcttaccgaatctcaggtgagaggtggtaacgccgccggacttcttcgagtcatagctgaagtaagcctgagcatacatatcggtgtggtcaccgatgatcttgatggagttcttgttggcaccaacagtaccatcggagcccaggccccagaagatacagctggttgtgccctcaggagcagtatcaggattctcagtgatttccagggacagatgagttacatcatcatcgataccaactgtgaatctctccttgggctgagcggactgagcgttgttgtaaacagcgataacctgagcaggagtagtatccttggaacccagaccgtaacgaccgccgaatacaggaatgttggcaaacttgctgccgcgcagagccataacaacatccaggtacagaggctcaccaatggagccgggctccttggttctgtcgagaacagagatggtcttgacagtgtccgggatagcgtcgatcaggtgcttggcagagaagggacggtacaggcgaacctttaccagaccaaccttgcggccctgagcgagcatccagtcaatggtctcctcgatggtgtcgtttacagaacccatagcgatgatgatgtcagtagcatccggagcgccatagtagttgaacagcttgtagtcggtgccgatcttggcattgaccttgttcatgtactcttcaacgatagccggaacagcatcatgataggtgttgctggcttcgcgggcctggaagaagatgtcagggttctgagcggtaccgcgcagtacaggatgctcggggttcagagcatgcttgcggaacgcgtcaacagcatccatgtccaccatttccttgaggtcctcataatcccaaacctcgatcttctggatctcgtgggaagtacggaaaccatcgaagaagtgcaggaacggaactctggacttcagagtagacaggtgagcaacagcacccaggtccataacttcctgaacggagctggagcagagcattgcataaccggtctgacggcaggcatacacgtcagagtgatcgccgaagatgctcagagcgtgggaagcaacggcacgagcagatacgtgaataacgctcggcagcagctcaccagcgatcttgtacatattggggatcatcagcagcaggccctgggaagcggtgtaggtggtggtcagggcgccagcggccagagagccgtgaacggcaccggcggcaccagcttcagactgcatctcaaccagctttacggtctggccgaagatgttcttcttaccctgggcagcccactcgtcgctcacttctgccattacggaagaaggagtgatcgggtagatggcagcaacatctgtgaacgcataggaaacatgagccgcagcgttgttaccatccatggttttcatttttcttgccatgttatgatatcctccctttggataatatgttggcatagcggatgaatccgcatatttttacccattcaaattctaccatctttaccgggggatgtaaagtcaagaaagtgtaaaattccagtttcatctggcttttgcctgatttttaacaacaaaacccggctttgcggccgctcttttgacaaaaatgagaacgcctctctctttggctgtgtgcattttacagacggctgtcggcacagcagagccttcctccccccattgacagaatctcccggaacgattatagtattcttaaaccgggttctgatccgggacgctctgccgccggctgtattataataatgtatagcaaagcggacaggcttcccgatcccggacccgaataccagaaacactgagaaatggagtaaactgaatatggaccctgacagtagtacgatctatcccgcactgaccgcatttttgcttttgctggtgctttcggggctgttttccgcagccgaagctgcctttaccggcatcaatgacagccagacccagcgccgtgccgctgaaggcgataaaaaagcccggcacatcatggatctgatccgcaagcccacggtattcatctccacggtgcgtaccggttccaccctctgcgccatgctgggacttgccgtcctcagcccgtccctgaccggcctgttccttgagcagttctatcaggagatggaggttcccctcaccgcttatccggtctttctgatcctcattaccattctggtgggaatcgtcaccattgccctgggcaatatcctgcccggacgcctggggaatttcttcccggatcagactgcctcgctgctcaccccgttcatgatggtcatgtccatcctgctgcggcccattgtctggcttaccctgggcattgccaatctggggctgcgtctgctgggccagaaccccaaccaggaaccggataccgtcaccgaggaagaaatccgcatgatggtgacagtgggcgaggaaaaaggcgccattgaacagagcgaaaaggatatgatcaacaatatctttgagttcgacgaccgggtggtcaccgaagtgatgacccaccgcatggagatgatcgccctcaaggataccgtccagctggatgaagcagtaaaagtggcccgggaaaccggttattcccggattcctgtctaccatgaggacatcgatgacatcgtgggtgtcctctatgccaaggatctgctgctctttgtcaacgacggctgcaacagtaaggatttcgatatcaagaagctgctgcatgagcccttctatatcccggaaaccgccaagtgtaccgagctgttcaaggacttccagcgcaagcagctgcacatggcgattgtcatcgatgaatacggcggcacctatggcatggtgaccatggaggacctgctggaaaccatcgtgggcaatatccaggacgaatacgacaaggaagaaaatgagtaccagaagctctcggataccgagtacaccattgatggctggatctcggtggacgaggtggaggatcttctgggcatcaagatcccggacgacaccgagtatgataccctcggcggcgttgtggtggatatgctcggcgacctgcccgaagaagggcagcacccctcggtccagatcgaccgggtacggttcaccgtcctggaagtggacgaccgccgcatctcccgtctgaaggcagagatcctgccggacgaaagctgccccgaaccgggcgagcgccgggactgatcccgttctatcccattgattccgaatccctgtcccctgaggcaagtcctcaggggatatttttgcgccggcggcagggcggggcaggcaaattcgctcttttctttcggagccaggtgtgctatgatacagtcagtacacttcatacagtctgactgtatcacagcggtacccggcggatattggggggggaaatttctgcctgaaccgaggttatgtatccatgcgttatctctatgtgatggtctcccggaccgacaccggatttgccagactgatccggcggttcaccggctgctattacaaccacgccgccatttcctttgactgtgacctgcggcagctctattcctttgcccggcgtgcctatgacctgccgctgagcgcctgcctgacccgggagagccctttgatgtacacccggggccagggcgatgcccagatcgtcctctaccggctgccggtatcggatgaacggttcatcgctgcccggcgcaccgtacagatgatgctccgggacggcgggtacatttataatgtatggtcggtgttcacctatccgctgacccggggtctgcccgcctataaagcccagacctgttccgagttcaccgccggaatcctgcgcattgccgggctccggctggagcgtcccgactgccgctaccaccccgaggacttcacccacctgctggaggggctggaggtctaccggggctcgctggcagcctactgcggtgagaaccgccgtctggacggggacccggaatacctgcgccggcacagtctgctccagatcgctggctgcagcctgcgcaccctggcctgtgccgctgaccgaagcctgtttgaacgcccgtccggcctgccggatgtcaccgggcagtattttgcccatacccatcgctgaaagggggattatcccatgtccgataaaatggagaatatggtcccggagggccagcagcccatccacaccgcccggttccggctgactccggcagcctatacccagctcaatctcattgtccagcgccggggactgaaaaaacgccgactgctcacactggcactggctgtgggtgtcacactgatctactgtatcctcaccaatgtgcctgtgagcaccacaatcctgctcatggtcactgaagccctggtggtcctgccggtgagcttcctcatggacaagtggttcctgaaactctacgccaagcgcagccagaagctctcccctgccgccctggacgaacagctcttcgagttctacgaggacggcttccgggtggtttccggcaacagcaccgacggctttgtgcgctacaaccgcattgtgtccctggcccgcaccgatgactacctggcactgttcatcaccgatgtgtatgcctatctggtgatgggcgacgctgccgactgcggcatgcaggaactcactgaattcctccagcggaagatgaacggcaagcccctggaaaactaccgcacccactgacctgccccataaaagcaaaccccgctctccgatccggaaagcggggctatttttattccaaaacgccagaaaaccacagaccaaggggagaaggtctgtggttttctggctttggaattcaggaaatatatctcaaaccagtgagaaccggtctgatgcgaaagaaaacggttggattatcccagataggccgagcggacgctggcatcggtgagcaggctgcgcccctcacccgagctgacgatcttgccggtggacagcacatagctgtaatcggcaatctccagggccttggtggcattctgctctaccagcaggaccgtcacgccagttttgttcacctggcggatgatcgagaagatctcgtccaccagaatgggagccagacccatggagggttcgtccagcaggagcatcttcgggcgggacatgagtgcccgtcccatggcaagcatctgctgttcgccgccggacagggtgcctgccggctggcgcagccgctccttgaggcgcgggaagctgtggaacaccatctccagatcctcccggatgccggcagtatcccggcgggtaaaagcgcccatctccaggttttccaatacggtcatctgaccaaagccccggcggccctccggcacctgggccaggccccgcaccaggatcttgttgggggaatgcccggtgatgtccaccccgtcaaagctgatctttccgcttttggggcgcagcaggcccgagatggtctggagaatggtggtcttgccggcgccgttggctccgatcagggtacagatctcgccgtcccgcacctcaaagctcacacccttgaccgcatggatcttatcataatatacattcagttcctcgactttgagcatctcgcttttaacctcccagataggcttcgataacacggggatcagcacgcacctcgtccggagtgccgtcggcaatcaccttgccgtaatccagcaccacgatccgctcgcagacacccatgaccagcggcatatcatgctcgatgagcaggatggagatgccgaacttctgccggataaaggcaatagtctccatgagttcccgggtttcggtattgttcatgcccgctgccggttcgtccaggcagaggagcttggggttggtcgccagtgcccgggcaatttccagcttgcgctgctgtccgtagggcaggttgcccgcccgcatgtccgccttcttatccagatcaaagacagcgagcagttccagcgcccggctgtcggcgttttcctcctccagccagaaccgccgggtcttgagcaccgactccagaaggttgtagtgcatgccgtcatgcatggcagccttgacattgtccagcactgtcatatccttgaacagacggatattctggaaggtacggctgatgccgtggcgcaccgtatagcgcattcctttgccgctgatgacttcgccgtccagcgtgacagcgccgtcggtgggggtatagacgccggtgagcaggttgaagagagtggtcttgccggcgccattgggaccgatcagtcccatgactgccccctggggaatggaaaagttcacatcgtccagtgcccgcaggccccggaaactgatgcccagatgttctgctctcagcagtggttctgccatttattcctccccctttccgccggcgggaaccggctttttcagcatggcggtcaggcgctcccaaagccgggagagcgagaattcccgcttgcccagcagtccctggggacgcaggatcatcatcaggaccagcaccaccgaatagatgagcattcggtagtctgccaggtcccggagcagttcgggcagcagggtgagcaccaccgctgccagcaccgaaccggtaaaactgcccatgccgcccagtaccaccatgaccaggatctcgatggacatattgaagtcaaaggtggcagggtccagcaccgtaatataatgtgcatagagtccgcccgctaccccggcaaagaaggaggagatggtgaaggccagtaccttgtaccgggtaccgggcacacccactgcctcagcggcgatctcattctcccgcagggagaggatcgcgcggccctgccgggtgccgatcatggcatacatcaccgccacactcagggcagcgatccagaatacccacgggaaggtggtgtattcatcgatgccgtagagaccccgtccgccgccggtgaaggagagattctggatcaccacgcggatgatctcaccgaatcccagggtgacgatggcgaggtagtcgccccgcagccgcagggccggaatgccgatgagtacgccgaacaccgcagccagggccccgccgaggagcagagccagcgggaattccaccagacccggcagatccatgtgcagggtgaagagcgccgcggtataggcgccgatggacataaagcccgcatgacccagcaccagttcgcccagtacgccggtggtgaggttgagggaggcagccagcagcacatagatgccgatggtaatgatgatgccctggtactgcatcgagatgaagcctgaggacatcaggccatagaggagaccaaagcccagtaccagtgccaggaagtttctccggcggcacagggaagtccattttgccttatccatgccttgcacctcctcagaccttttcccgctcattacgtcccagcagacccgaaggcttgaccagcagcacgatgatgagcagggcgaatacgatggcgtctgccatggcagacgagatatagcgcttgataagcgcttcggcaatgccgatgatgaagccgccgatcatggcgccgggaatgaccccgatgccgccgatgaccgccgcgataaaggcccgcaggccgagcatcgaacccatataggggttgatgagcggataggtggagctgtacagcaccgccgccaccgccgccagggcggaaccgatggcaaaggtgatggagatggaggtatcaatgttgatgcccatgagctgggcagcaccctgatcctcggatacagcacgcatggccttacccacccgggtacggtttacaaagagggtgagcagcaccatgagcaccacagtcaccaccagggtgatggcagtgagccggctcacggtgacgccgcccagggtgaagccctcaccggtgaagtggttggggaagggcttggggctggagccgaagatgagcaggaagccattctggagcatgaggctgacgccgatggtggtgatgagcgccgacattctcgaaccgccccggagcggcttataggccagacgctcgatggtcactcccagcaccgcgctgactgcggcggtggcggcaatgactccccagaccggcagaccgctggactggaagaagagcagcgccacataggaacccaccataatgatatccccatgggcaaagttgatcattttggcaatgccgtacaccatcgtatatccgatggctaccagcgcatacacgctgccgatctgtacgccgttgaccagttgctgtgcaaagtccattcttgttcccctttatcgaaaacacccggggacggaagctgttctcccgtccccgcagtgtccttctgtttcctgaatcagttcccggaaagtcaggcagcagcttcctccgaagcctcttcgctgaccggctcctcagcgggagcttcctcggcaccattctctaccagagcataggcgccatccttgactgtaacaaacttgacatccttcacagggtcaccgctgccctcatagtggatggcaccggttacgccttcatactgcagattggcaagagcctcgtttacagcggcagaatcggtggtaccggcagcctcgatggcctggaacagcatcataccggcatcatagcccagcgccgcaaaggacgaaggatcgctgccataagcctctctgtaccgggttacgaaatcctgtaccttggcatcgggatcggtcgcggtgaagtgattggtgaagactacgccttccactgcgctcttgttgttctcatccagagcactgagcacgccgtcccagccatccgcacccaggagctgggcatccagtcccacttccttggcctggattgcgatcagggcgttggtgttgtagtaagagggcacatacagggcatccggatcagccgcggcgatcttggaaagctggctcttgaagtcggtatcggtgctctggaagctctcgaaggctacgacctccaggccgttggcttccgcctctgccttgaaggattccgctacgcccagggagtagtcatcggtgatgtcgtagagcacggctaccttctgggcagacagctcatttgcggcataatctgccatggccttggcctgggtggcatccaggaagcaggtacggaatacattgctgcccgcctcggtgatggcagtggctgtgccggtgggggtcatcatgggcagattgtccttggcggccttggaggatacgctgatcgccggcttactggtgacagcgccccacagagctaccatgccatcgccctttagtttgttgtaggcgtttacagccttggtggtgtcgttttcatcgtcctgatagtccactaccacctgacggcccagaacgccgccattggcattgacctcttccacagccagcttcaggccattggtagcggtgatgccgtagtccgatgcgccgccggtgagcggggcaatggcgccgatgcggatggtatcgccggtatcggctgcggacgaactgttattgccggagcatccggtaaaggttcccattgccatggtcagtgccagggccagtgctgcaaatcgtttggttttcatgttgattccctcctgagttttttgtgtgaaagagacggtatgtaatccgcaaaaaaggaaataaaaaagcacgcgtcatctcatttggattactccaaagagacgaagcgtgctgctccgtggtaccactcttattgccgaaaggaagattcctttcagccgctctgccgcatccaacaatgcgccctccatgataacggggaggctccggtccggcttacttgcacggggtgttcagccgactgctccagggtgattgtaaggctccgcttctgccgccctctcaccaaacgggcgcgctctctgggaaaaagccgatggaaccttcctgtccctatctctgcatgttacatattctcttttcggggtcgagccttgcggctggttgttgtgtttcagtttaccacgcgaaaatgaattgtcaaccctttggcgaaaaattcttttttctttgtaagatttcaccatgcaaatctgaataatcggcgctttaatcttgcaaaatgacggacttgtccggcaatcacctccatctgtccgctgacataggatagcccagaaaggagaatgccgtcatggaatttttctgttttgcgctgccgccctcctggaaagatacccatcctgccggtactgacccccgggaaccggtggagttttccttcccgctgccccgggagagctggctctggctggaactgcacgactgggccgacccggaggatctgtcctggctctgggacgaggacgatccggacgaataagtgcgtcatacccggatgcaaccggcagttgacagtctgcaacgccatggctggtggacagatccggcagatctgggctatactgatggcagcaaatacacaagggggacaccaccatgaccatcggacagaccattgccgccgaacgccggaagctgggattatcccagctctgtacagttccaccacctgcccgccgctgtcgctggattccggcctgatcttccaggactgcgttgccggcacgccctgcaccttgcgcaactggagcaacatcacctgcaccgtgccgaaccagccggagctggcggatgtgatgacccaggaagtccatgccgccaccgtgcgggcggaactctggcaggacggcaaaaaactggcggactgtccgtcagtgccggccgcggaggatctgcccctgccggaaggaggagcgaccgcttacagcttccagctgccggagatcgaggtgaccatggaggcggacagctggatcggggtggtattcatcgccaccgacaatctcgggcgcaccagcaccaatggggagttcttcaccatccaggacgatatgctcatcttcaccgatgataccgatcccatctgggaggccatccgggccgctcaggacagcgaataaccagccctttaaccatacaaaaaacagcaggaacaccctctggtctgagcggtacgcctgctgttttattctgtgtctatgcttctgtgggcggttccgcggcggcggcttcgctctcccggacttccacctgtccgggggccgcccctcccgagatggaggcgatctccagtccccgctcggcaaattcccggagaatctcccggcggatggcccattcgcatccccactgggtgagggctttcaccttggctgccgctgtgacctcaaagccgtactggtcaaaggcggtgacaccccggagcttgggcggctcgatcacatcggggttgccctcgcaggcacgctctgccgccagacgcactgcctccagcacggtatccgcatccatggtaaagggcaccttcaccgacaccactgccgtatagccgccccgagtgtagttgatcacctgggagatattgccgtttggaatgatgatctgttcccccttgaaggtgcgcaggtaggtcacccgcatggcagtggcctccacatagccctcctgcccgtccaccttgatgtaatcccccaccgagaactgattctcgaacatgaggaaaaagccggtgaccatatcttttaccaaactctgagcgccgaaaccgatggcaacgcttccaattccggcggtgacaatgaggttattgaccagatccccgacccccagctccaccagtgccatcaccagcgccacggaatagatcaggtaccgggaaaaggaacgggtgagggtcatgacggtatcggtgcgttttccgcccgactcggtgcggtggtaccgggcggaattcatcacatggcgggtcatccgggacaccaccgccagtgtgaaccgtgccgccagaaaaatcgccgccaccttgatcagcgcccacagagcatccgccaggaacacgcccgagttttccagagcggcctggaaatgcccggtgaactgttcccagaaggtgcccggggattccggcatggcagtcagcaggatatgcatggaaaaaacctcctttttcccgttctgaacagggtttctgaggctattctatcagatttgcccgccccggaaaaggctttcggcaaaaaaacagccgcttccccaggggaaaacggctgcgtgtccgggtcagtccacaaaggagtggctcatgatatagaattcctcctggctgggctgccaatgcttctccatcggcggcagggtgctgtcataggccagggcgtcctcctcggaaacctccatcaccggactgtcccggtaggtccagtcccggccctccagtaccccgggcaccagctccttcaccagcatggcagaggggtatttgccgccctccacgctcacccggtgctttttgcagcagacaaatccccgggccacatagtttgccggactgccgaagatcaccacagtgtcatagcccagcgtccgggctgcctcaaaggagtgctccatcagcgccttgccatagccctggcgctgatgctccggcgccacgcacaccggcccgaaggtgagcaccggtttctcattcccggcggcatcggtgagccaggcacaggtatacataatattgccgatgatctccccatccagctcggctacaaagtccagctcagggataaagtcctcatgtccccgcatgatatgcaccagatagtgctccatgcagccggggatatactggttataaaatgcccgccgggtcagggtttccactgcctcccagtccccggagcgttcattgcgaatggtgaacaccttcattcctccgtttcatagatgagatcgccggtgtagtagactgccatgcagaattcagtcagtttttcccggtccggcagggagaggtatccctcgtaccgcacctggttgaatccatagagctcgtctgtgacctcaaaggagaactccgggtgctttcgggaaaacttctcccaggtctgttttttcccggaaaagctcccgtattccccattgggactgagccgccacacttcgcaggattccaccccggtgagcacgacccgtccgtccacctgcacacagggctcggcaatgcggatcagtcccgtttcaaactgaagggtcagctgtccgtctgaaagtgtaatgtcgctcacccgcatatcatgcaggctgtaaggcaccggatggcccggtttgcagactgtacgcatatcaatatcctcccaaatcacaaaggggccttccccataggaaagcccctctgcagcatcagccctgacggggcatgcagataatgcggtccaccttgctgtccaggaactcggcggtgggcgccggacggatcaccacagcggtatcggcgccatgaccggtaccggcaacggcaacgatgggctcatgcagctccaccagaccggcatcagcagccatcatggagatttccacgcacacctttacgccgcgtccgatgatgcgcagcgcatgggcagccacctccaccgggccaaacccgcccagcttggaggaaagtccccgttccgcgccgctcagggcatgggatgccacatagacggtcacacccatggcctccaggtcctgacgcatctcgtcggacatctgcggctcatgcttgccgaatacgccccgggcatagcccacatcaatgatctggatgccctcatgctccagttccgccagctttttggcggtggcgccagtggacgatgccacaacgatcttgtgaatgccctcttcccgggcggcttcgattgccagcttcagtgtggcctctgtgttatgagggccctgtttctcaaatgtcattgctgcttcctcctgtcttgggttagttttgtttaacactgtttttattgtatcatgctcccgccggttctgcaacggccctaagccaaaaaatcagttcttccggggcatgcagatgatccggtccaccttgctgtccagaaattccgccgagggcgccggacggatcaccactgcggtatccgagccatagccggtgcctccgatggcgacgatgggctcatacagctccaccagaccggcatcggcagccatcatcgagatctccacgcataccttcatgccctgcccgaggatgcgcagcgcatgggcagccacctccaccgggccatacccgcccagtctggacgaaagtccccgctcggcgccgctcagggcatgggcggctgtacagatcgtcacgccccgggcttccagctcctgccgcatggccccggaaagattgccgtccgggcgtccggtcttgccccgggcccgtgccacacagatcagccggatgccctcatgccccagctctgccagcttcagggcggtctccccggagtaggacgccactacgaccttgtggattccctcctcccgggcggcttccatcgccagcttcagggtggcttcggtgttctggggtccctgtctgtcaaatgtcatggtgcttcctcctgtttccaaagtcggcataaccggcccatgggagcgaaatcccgcccccaaaggcacaaccgctgtccacggctattgtatcatgccgccgggagattctgcaatgctcctgcccgaaaccctctttccccggctggcaatgtgtgataagatgagagaaaacagacacccaattcaagtgagaggaagtaaagcgattatgatgtgcggtaagaatcccgaagaacactggctctcctgccagctgaccttctgccccctgggcagcgaaactttcctggacgagatcgaggaggccctggagatcatccggcagtcggggctggaatatgagatcggcagtatgtccaccatcgtcaaggggccgggcagtgaggtgctcgccctgctggaacgcattgcagtcaccatggacgagcggggctgccggttctcgatgccggctaccctgtcgaacctctgcggcctgcagtaaccccccaataaaaaagctccggagcggtctgctccggagctttttttcatctcagcgccgtcttatttgaggaaatcggcggtataggtggcaaagaactccactaccttcttaaaggcagtttcgtccaggtcaaagttggggttgtggtggttgcccgaggcgcccggacgggtgcagaaagcaccggtatcacagtagaagcccgggaaggcagccaggaactcggcgaagttgtccgaaccggcagtggggtcccggggctctgccagggtcaggcccacctgctgggcgatctcccggccccgtgcggcacaggccggatcgttgatgaccggcagcggggacatcacctgggaggtgaccactgcttcggtgccataggcacgggcggtattctccgccacttccttgatcttcgcaaagatcttatcgccgtcgccatacttgaagaagcggatattgccggcgatgaaggcggtttcgggaatgatgttgttcttgtttccggctgtgatctggcaggggctgaccacacaggtatcgaaggggttgtggtactgggccgggatcatggcgatcttcagcacaatgtcacaggcgggcttgaccgggtccacagcacggtcgggacgggagccgtgaccgcccacgcccttgacggtgatttcaaagcccagggcgcctgccatcatggggccgtcgggcaggt

SEQ ID NO: 293 - DNA, 25690 bp, Unknown
  16S sequences of unknown bacteria
ataagagacaggggagacacctgttctttctttttaggtagcgttccgccactgaaaagcgggcgggtagggttatttttttcattataacagaaggcggcggcggtttccagtgttgcatcgtataaatttccatcgaatggggcatcctttccatgcaattatggaagcggaaggaggagtttttgtatgattgcaagtgtggatcaaagcggctgcatcggctgcggcaagtgcgaaaaaacagtgccggagggctttcaactgcagagcggcacggcgcaggctatttccggagaagtgccgccgcactgcgaagaggcggccaaggaagctgcggcaaactgccccgtatcggtcatccatatcgactgagcggcgggttgcgcagacagatttccgctgcaatgcattatttttgcgaaacaggatgtgctttttggggtttacaaaccggaaaacctgtgatatagtactattgttcgcgcgcagcgcggaatcacgatcccgccgcttagctttgcggagcgttcaccggcccgaggctcagaggcagggaactttattggaaaggtggaaacaaaaccatgatgctgaaagatgagaaaactgcggttatcgaggcaaaccgcacccacgagaaggacaccggctcgcccgaagttcagatcgccatcctcactgcccgcatccagcagctcaccgagcacatgaagaagaacccgcaggacaagcactccaaccgcggccttctgaaaatggtcggtaagcgccgcaagatgctggattatctgatggaaaaggatatcgagcgttatcgcgccctgatcgccaagctgggtatccgtaagtaagtcaaaccgtgcgcggggaagggtggccttccccgcgctttttccgcagcgcctgcggaacactgtatttgggagttttgccgcctttttagcctttgatcctgtccccccggcggggagatgtgatcaagcgctaaaccggcagcccggctcccatccaattcaaacagaaagaaggagccaaacatgtcaactattattaagcacagagagttcagcaattacaagacctacagcatggatctggcaggccgccccctgacgctggaggtgggcaagctggccgagctggccaacgcctccgtcctggtgcgttacggtgataccgtggtgctggtgtgtgccaccgcttcggccaagccccgcgacggcattgatttcttccccctgagcgtggattttgaggaaaagatgtattccgtgggtcgtattcccggcagctttttgcgccgcgagggccgccctggcgaaaagggtgtgctgacctcccgtgtcatcgaccgtcccatccgtcccctgttccccggcgacttccgcaatgacgtgtccattatggccacggtgatgagtgtcgaccacgactgctcgcccgagattgcggccctgatcggcacttccgccgcgctggccatttccgacattccctggaatggcccggtgggtgcgttgaaggttggcctggtgaacggtgaattggtgctcaatcccaccagcgagcagcgacaggtttccgatctggacgtgaccgtggtgtctacgggcaagaaagtggtcatgatcgaagccggcgccaacgaggtggacaacgacaccatgttccgcgccattgagctggcccatcaggaaaaccagaagcaggtggagttgatcaaccggatggtttccgagattggcaagcccaagttcgactatccccacgctgattttaatcaggagctgttcgacaagattgtggaagccaccatggatgaggcgaaggccgctatggataccgacgacaagaacgtacgcgaagcccgctggaacgtgctgatggatcattggcacgagttgttcgccgaggaataccctgacatggacaagtatctcgacgaaattacctacaaattccagaagaagattgttaaggcctggctgctgcagggccaccgtgtggacggccgcgccaaaaacgagatccgtcctctggcggccgaagtgggtgtgctgccccgggttcatggatcgggtctgtttacgcgcggccagacccaggtgctcagcgtgtgtacgctggacacgctgtctgctgcgcagaagctggataccatctgggaagaggaatccaagcgctatatgcatcactacaatttccccggctacagtgtgggcgaggccaagccggcccgcagccccggccgccgcgagatcggtcacggcgctctcgccgagcgcgccctggtgccggtgctgcccagtgtggaagaattcccctatgccatccgtgtggtgagcgaagtgctttcttccaacggatccacgtcccagggttccatctgcggctccacgctggcgctgatggatgccggcgtgcccatcaaggcccctgtggctggcatttcctgcggcctgatccaggacgatgacggttcctttacgacctttattgatatccagggtgtggaggacttccacggcgagatggacttcaaggtgggcggcaccaagaggggtatcactgccattcagatggatctgaagaatgacggcctgaccatggagatcattaaaaatgcgctggaaatcacctatgatgcccgctgccagattctcgaccagattatgctgcccgtgatcgccgagccgcggcctgaggtcagcaaatatgcgcctaagatgctcaccatgcacattgatccggacaagatccgtgaggtcatcggttccggcggtaaggttattcagaaaattgtggccgataccggcgccaaaatcgacatcgaggacgacggttccatctttatttctgcgcccaatccggagagttgcgacgcggccaagaaggccattgataccatcgtatttgtgccggaagtgggcagcctgtattatggccgcgtggtgcgcctgatgcagtttggtgcgttcgtggagctggctcccggcaaggatggcctggtgcacatctccaaactggcaaaccaccgcgtggaaaaggtggaggatgtgtgcaagatcggcgacatgatgtgggtcaaggttacggaaatcgatgaaaaaggccgcgtgaacctgagccataaggacgctgtgaaggaaattgaggccaggaaggctgctggcgaagagatcaagtaaagcttccgctggttggaaccggcagggaaacaggaccgggggcggggacgacggaagcgtcccgcccctgtttttgaagcgatcacgcaatgtatggagggaaaaccatgattttttcgcagcgcttatcctggcggcagtgctgacttttatcatcgttcgtatatttaccaatgcacgcagcggaaaagctctggcgcagtttgaacttccggcggattcggataaagaaagctttctggatcaaaagaccggtaagcgttacgaccgggaagcctaccagagttatctgaccaaaacggtgcagcgtatgacggacccgcagctgcagaatctgagccgttcgcgtggggacggcagcgtgtggcacgaactgctgatggaggcggtcgatgccgaacggaatcgtcgccgtgccgctgcggaggctgcctgcgcagaagatgaagaagcgatggaggaactgtgcggggagattgcgccttttttctgggtggaacaagcgcagggcgcatcggtgggcctgcgaaccgacaccgaattgcagtctgtttgcaccaggcaggggctgcagggcacgggatttgattgggatcagctggcaaagcgctatgtggaggagcaggcgcccgcgctgaaggggaagctggagtttgattcgcaggaggatctgttcagcgtgtatgccagggatgaagcggcgctgcggacgtttatccgcggcttccgggaagcctgtgaggatgccggacagcgcactgaccgggttgtcgcggagcgatgaagaaacaaagcaaaacagcaggcggcacagcgggtttctctctgtcctgcctgctgttttgcgtagggagcgtattgacaaggtttggggtgcttgttatcatacaagtcgatgaggcagaaaatatgcggtacttcgcgccgggaacagggacagcgggccggtcctgtcgttttttcctaaccgatttggaggagagatgagtatggaacaatggaagaggctgatgcgctacttctcgcgttcggaaaagctgctgtggggcggttcagtggggctgatcttggcggcatttttgctgtttgaccggggaaattacctgacgctgacagcgtctttgattggcgtaacggcgttgatttttgtggccaaggccaatcctttcggccagtttctggttattgtgttcagtgtgctttatggcatcatttcgtattcctttgcctattatggggagatgattacatatttgggcatgacattgcccatggcggtcttttcgctgattacctggatacgcaacccttatcagggcaatcacgccgaggtggaagtcaatcatctgcgccggggggaaggcgtttttttagtggtgctggccgcggcggtgacggtactgttctattttatcctcgcttacttcaatacggccaatcttttgcccagcacggtttccgtgaccaccagctttggagcggcctacctcacgttccgccgcaatccctggtatgcggcctggtatgcagccaacgatctggtgctgattgtattgtgggtgctggcctcgaccgtgaatattatgtatctttcggtaacggtatgttttgcggccttcttcgtcaacgatctgtacgggtttatcaactggagaaggattaaagcgcggcagatggagaagccgtaaacggcaggaaaggaagcgagcaaatggatacaatcgcagcgatggccacggcccggggaacagcgggcgtgggggtgctccgcatcagcggggaagaggcggtggccacggcggagcaggtggtgcgccgtccgaacggcgcggccctggcggatgcgccggcgcgcacgctggtgcgctgcgccctgctggatgggagcggtgcggtgatcgacgatatcctggctgtggtgttccccgcgccccacagttataccggagaaaacgtggtagaactgcagtgccacggcgcgccggtggtgctggaagaaggaatgcgggcgctgtttgctgccggggcgcggcaggcgcggcccggcgaatttacaaaacgggctttcttaaatggccgtatggatctgactgcagccgaggcggtgattgacctgattgacgcggaaacggttcaggaagcccataacgcagcgctgcagttgaatggcgctgtggcccggcccgcaggacaagtgtatgatgcgctgatggagatcgcttcccggttttatgcggtggtggattatccggatgaagatattgagccgctgcagcaggaagagatagcctgcacgctgcaggaaggggaggcggcgctgcgggcgttgctgtctacggcagagcgggggcgcattttgaaaaaaggcgtccgtacggcgatcgtgggccggcccaatgtgggaaaatcttctctgctcaacgcgcttctgggatatgagcgggccattgtcaccgacgtggcgggtaccacgcgggacactgtggaggaaaaagtgctctgtggcggcgtgctgctgcgcctgacggatactgcaggtatccgggagacagaggacaccgtggagaaaatcggtgtagagcgttcccggaaggctatggagcaggcggagctggtgctggcggtactggacagctcccgcagcgtaacggaggaagacacggcgatcctggagcaggctgcgcggcatgaaaagtggattctgatctggtccaaggcggatcttccggcagaggggccggtgccctgtgtctgctttgaagcgccctatcatgcgcctgctgccgttgtcagcgtttcggcggtgaccggtcaggggctggatgtgctggaacagacggtggcgcaagagtttcccctgccagaggcgcaggaagggacgcttttgactaacaaccggcagagcgaagccgtgggccgggcattgaaggctgtatgcagtgcccggcaggcactggaggcggggctgacgccggatgcggtgctgacggatgtggaagaggctttggcagcgcttggagaattgataggaaagactgttcgtgaagatttggtggacacgattttttcccgcttctgcgtgggaaaatgagctgcgccagctgcctgggggaggaagtgtaaccgggacaatggccgtttttatgtggaaaggagcaggacatgcagtatacagcgcactatgaatcgccgctgggaggactccttttggcggcagacgatgtaggactgaccgggctttggttcgatggggaaaagtattacgcgcttcatctggcgcgggaacatgagatgcggcagactgctgtgcatgaacagacggcggcctggctggatgtgtatttttccgggcgggaaccggattttatgccgccgctgcatttaatcggcacgccgttccagcaggaggtttgggcgctgctgcggcagatcccctatggaaaaaccacaacatacggagctttggcaaagaccctcgcggcgcagcggggactggaacgaatgtccgcgcaggccgtgggcggcgcggtggggcacaatgaaatttcgattttggtgccttgccaccgggttgtcggaaccggaggaagcctgacgggatatgccggcggcgtggataaaaagaaggcgctgctggagttggagggcgtgtccatggaagggttgtttgtgccaaagcggggtacggcattgtaagggaggagcagaagccgtgcaggaagatgtgatttatgcgattctttcggttgtggaggaaattccggagggaaaggtggcgacctacggccagattgcgcggctgatcggccgggagcgcaacgcccgcctggtgggaaaggtactcggccgggcggagtactatgggacctatccctgccatcgggtggtgaatcacgcggggcgtctggcgcccggctggccggaacagagggcattgctggaagccgaaggcgttgcgctgcgggatgatatccatgtagatctgagccgctttgggtggcgctgctgaagcgagctggtgcaggcccggctcactgaatctgctttgcgggggaaacatgacatgaattggattgaagaagcggattggaaatgcaggcataagcgccagattttatttgcaaaggattctgaatttctgcaggacgtggcgctgctgctgcatcatcaggaacacagggcggcagtgctgtgggcgttcgattttgcggcggaatccgtttgctggctggaaaagcggtatccgggggaagaacggccgggccgggcattacaggcggcccgggactgggccgctggaacagtgaaaatgcccctggcgcagcgggcgatcctggactgccatgcattggcgaaggaaatcagcgaccgggcggatcaggccgtatgtcatgctgtggggcaggcctgcgcagtggtgcataccgctgggcatgcgatgggatatccgctttatgacctgacctctattctgttccgcttgggaatggaggacggcgttaaagctgtggaagcgagaaaacaggaatacattgaccgattgctttactggggtgcgcatgtgggggaatatcaaggcacatgggcggactttctgctccgatagcagctgcgctgtctatctgcgggtaaactgctgcggaagccggcgacggagcatctcgtgtgtgagatggcccgttttgccatggaggatgctgcatccggtttgaatggccagcaggcagcgagaaaatggcggatcagatactgcgcaaccaacttttgcggggcaggttgcttgtaaaagtcgtccccaaacgatatactggcagggaaaccatgtactggaggtgaatcgttatggcggatgaaaaagcggagcaggcagcgctggggaacttgatccggcaaaagcggcaggctaggggactctctcaggagcagctggcgcagcagttggaagtgagccgtcaggcggtggcaaagtgggaaagcggcaaggggtttccttcggcggagcggctgctgtatctgggacaggtgctggatatccctgccgaggcgcttctgggccgggcagagggaaaaaagggccggccaaggcacgccggccgcattgcccgctggctgctggcggcgggaatggctgcactttggatcggattcggaatcctgtgctgtgttggcggaggacgtgcaatggactggactctgctgtggacatttgtcaatctgtccgttctctatctggtgctttggggcattgcgctgatattgcactggatttggaaaggaggagcaaaagaatagaagagcccggcggaagccgggtttttgcatccatacatcattttgcacaccgcattatgtcatatttcggattgcacttggtgcagatctgtgctataatacaaatactatatatgcgatgatgcgaaaggaagggacaggcgatgaaggaagtttccaatttgaaggagcggctgcgtgagcagcggccggcatcctgggaaacgctgccggacattccgttgtatatggatcaggtgctttccctgatgagccgccagactatccgttttggagaagaggatgcgctgactgcggctatggtgaacaattatatcaaagacggcgtggtgcccagagcggagggaaaacgctaccacgccgagcatttggcgtatctcaccatggtgtgcgtgctcaagcaggtgctggcggtgaaagacgcggcgctgctgaccggcagcgccatggaaacccggtccgtgcaggaaaattacgaccgcttttgcgcggagctgagcagtgcgctcaatagcgcggcggatcagctgccggaggagatggaggaaggcgaactgggcgagaacgccatgaagtttgccctgttgagctatgcgttcgggctgacctgccgccgcctgacggagatcatgcgcgagcgggaaatggaggagcatggagagaaaaagcaggagcggcgcaagcggaagcggacggacaagactggggagggcgagcaggcatgaaatggctggagctttgcattgacacggcccgggacggactggacaagctggaggctatgctttcggctctggggattgacggcattgaaattgaagatgaggcggatttccagtccttccttgccggaaaccgaaaatactgggattatgtggacgaggatcttctggcgcagaaaaagggaaaatgccgcatcaaatgctatctggaggacaacgaggaagccgccgcccagctggcccgcgtgcgcctgggcatggaggatgtgaaagcggcccattccggcgaggctctcgggcctatgaccctgacggtaaaagaagtgcaggatgcggactgggagaacaactggaagcagtattatcagcccattgcaatcggggaacggcttctggtggtgcccgaatggctggaaacggaggctgccgaccgggtgccgctggtgctggatcccggccttgctttcggcaccgggagtcatgctaccacccgtatgtgtctcaaacagctggacaagcgtgtgcacggcggcgaacgggtgctggatttgggctgcggcagcggtattttgtccattgctgccctgtgcttgggcgcacaggaggcgtttgcctgcgacattgacgaaaaggccgccgacgtggcctatgaaaacgcagcgcgcaacggcatcggaacggagcgttacacggtgttggcaggcgacattttgaccgatgcaaaactgcaggcggccatcggtgggggatacgatctggtgatggccaacatcgtggcggacgtgattcttgccctggccccggcggtgaaggggctgttggcgcccggcggagtgtttttgtgttcgggtatcattgatgcccgggccaaagaagtggcggacaagttgcgcacagcggggctggaactgctggaaaccgactgcgaagagggctggtttgcgtatgccgcccggataaaacaataaaaaaagcaaacacccgctgccccttctccggggcagcgggtgtttgcatggatgaggcgaaatgttaccatccataaagggaagtgtcgtcgatctggtagtcgggagaatcgacggggcagaggaaatagttgtcggtaccggtggtgtcgtcccaggtgcagtcgacaatgtaattttcgccgtccagacgtacgatgttccactgatggcctatgccttcgctggtgccgcccacagaccagcaggggagatccagccggtcgcacaggagcttgaaggcggaggcatagccgtagcacacggtggatccttccaccaatgcgccgtaagccgtatattccgggcccatccgctcggcgctgttcacggtgtctatgtaatcggacagggcataatcgtactctgctgtttcgatcacggcatcgtgaacggcgcggtaaagaacctgaggattgccgtcgggcgtttgggcgcggattgctgcggaaagtgtggaaagcgcctcgtccaactcggatttgcaggacgtatattcggcctcttccaacattggctcatacagcagggcaacgaactgccggtcgctgtgttccgccggacaaagaagataggaggtggaaacggtacagggaagagcggcattgtcaatggcggagagcgccaattgctccacatccgcttcgctccatctgccgccttcgggccgcagcgcaatacagaaagtgccgtcgctcaacgcttgcgctacagtatgtactgcgtcctgtgggctggcggctgccagcggttccgttgtacggtcggcggtgctgtcgtaggtgaattttaccgtcagccggatgcaggaggggccagccgggcggtttgcccagcggtattcggagacatagtagtacaaaatgccgctctggtcgatggcttcgtgcagcagtgcatccagcgcgtcggaactgggcgccgtgccattgccggtaaaataaccggtgacggacggctcgccggagaggacggcatcctccagaaaggcataaatggcctcctcgctgtatggaacagcgtcttctggcgtgctctgacagcctgtgcacaacagcgcacacaacagtacggggagcagggagagggctggtgatctgcgcatcagcagcacatcctttctcttttttgtatgcggctccgttcctggtcatgtcagtttgctgcgaggccgcgccaggaagcgcaatagcgctgcagagtccgttctaagggggatagatgggcaaacaccgaccgggaaccgcgcagaggcggcattccggccggtgtccatttcattgttattttctgcttgcttctttggcggaacgaatgaaatcgcggaacaggggatgggcatggttgggtctggatttcaactccggatggaattgcacacctacgtaccaggggtggtcgggaacttccacaatttccaccagacggccgttgggagacaatccgctcaggcgcaggccggcgccggtgagcgtatcgcggtattcgttgttgaattcataacggtggcggtgacgttcgctgatctcatccgtgccgtaaatggtacggatgcgggagtcctcggaaagcacgcagggataggcgcccaagcgcatggtgccgcctttgctggtgacggctacctgctctggcatgatatcgatgacgggatatttggtgctgggatccagttcgctggagtgagcgccctccagggcgcagacgtgacgggcgtattcaatgacggccatctgcatgcccaggcagatgccgaaataaggtacgtcgttttcgcgggcatagcgggcggaagcgatcataccttcgatgccgcggtcgccgaacccgccgggaacaatgatgccgtctgcatggcccagaatctgggcggcgttggcgtcggtgaccccttcggaatctacccactggatttccacgctgacatcattttcaatgccgccgtgggtcagggcttccaccacgctgaggtaggcatcatgcaaagcggtgtacttgcctaccagagcgatgtgcacggtaccctccactcgtttggcgcgctgcaccatgttttcccattcggtgaggtcgggatcggtgtccgtcaggcccagccgcttgcagacgactttggcaagccctgccttttccagcatcaaaggcacttcgtagagaatgggagccgtttgattgggaatggcattttccttggggatgttgcagaacagggcgattttgtcaatgatatcctggggaatttcctcatcgcagcggcacatgattacgtcaggctggatgccgatggagagcaactccttgcagctgtgctgagtgggcttgcttttgagttcgccgctgccggggatggagacgatcagggacacatggatgaacatcacatcctgccgccctacttcgacagctacctggcggatggcttccaagaaaggctgggactcgatgtcgcccacggtgccgccgatctcggtgatgaccacgtcagtgttttcgctgaccgaatagactcgatttttgatctcattggtaatgtggggaatgacctgcacggtgcggcccagatagtcgccggtgcgttcgcggttgagcacgttccaatagatctggccggaggaaaccgaggagttgcgggtgaggctttcatcgataaagcgctcgtaatggcccagatccagatcggtttcggcaccgtcatcggtgacgaagacttcgccgtgctggtaaggactcatggtacccggatccacattgagatagggatcgaatttctggattgttacccgcaggccgcgctgcttcagcaagcggcccaaagacgctgcggtaattcccttgcccaggccggaaactacgccgccggtgacaaaaatatacttgacagacataatcagtactccctccacatataccacaatagcattgtccgaaaacgccttgcagcggacttccggccacgcagaaaatatcatttttattctatcttctgcatgcgggcaagtcaacaggcaaagcgccaaatttcggcaaaagaacgacaacttccttggcgtgcgcttctgaaaatcggagacgccgggttttgacattgtattgtaatggctttgtaacgcattgcggcggaaaatatggtaaaataattttgactttcagagaaaagatcgcatcggttcgtttcggaaatggacgccgaaagcgaaccatagaggagcatcgatatgcaaaaggaaaccgaacatcaagcggctggtgtcgccgggcgcggccgaaaaccgattgcagctgtcgctgtggcggcggtggccgccatcgttttgctgacaccctgcgttctggcagcagcaagtcaaaccatttatccccgcaccagcgtggcgggtattgcagtgggcggcatgagccgcagcgaagcgttggataccctgacgcgggagcttccccaggcttatgccgaaaaaagccttcctgtgactgtggagggcggcgaagccggagatgaggccggaggagtctacgagatttcactgggtgagattggagtcagagccgatgcgcagcaggcggcggaagcggcctggagcgcgggacgcagcgggaattttttcaccagcggtgtggcatatgcccagggtctgctcctggggcgcaccgtagtgccggagctgacctttgataaggcggcggtggagcgcgaggtggagcgtattgctgcggcggcagatatcccggtgaccgaatgttcctggcgcatcgacggcgagaaattgtatgttacaaagcccaaaagcgggtatctgatggatcagggatctctgattgagatggtggaggcggccgttggtgaatatgacctcagcggcgtcagctgtacgctggaggaaaaagcgccggtgtccgtttccatgaaggaagtgtatgacgacgcacaccgggaggccagcaacgcttattacgacaaggcggccggcgcggtgaaagacggcgagagcggtgtggattttgacgccggacaagcgcagacgcagatggacgaggcagcgcccggcgaagagtttgcggtgccggtcacgctcattgaaccggacatcagcaaagaggaaatgaaccggtatctctttcgggatcggctgggcagttgtaccaccaacgtctccggcagttcaaaccgtaagcacaatgtgtccctggcagccaaatcctgcaacggcgtagtgctcaatcccggggaaacattttcctacaacgaaacgctgggccagcgcacggcggctaacggctaccgcacggccggggcgtatgtgggcggaaagaccgtggaagaatatggcggcggtatctgccaaatttcgtccactctttatctggccgtgctgcgctccaaccttgagattgtgtcccgcaccaaccacatgttttatcccgggtatatcccttacggcatggacgctactgtgagctggggcgggccggacttcaaattccgcaacaatacggattatccgattaaattgtctgtgacttacagcggaggcaaagccacctgcacgatttacgggaccaatctgagcggccagagtgtgaagatggagtataatattctctcttcaacgccctatgaaacggtggagaaagaggataaaagtttggcgccgggcactcgtaagcaggagcagaacggctacaccggctataaagtagctacttaccgctgtgtgtacgataaaaacgggaagttggtcagccgcacgctggaggcgaacagcacttacaaatcccgcaaccagatcattctggtggggccggctcaggaaaataccagcggcacaggggaagaccaggaaaccgaaacaactccgtctgtgccggaaaccggcggcggggggactgctgcgccggagactccggccccggatgatacggcggggcagacaacggcagacggcagtcagacggccgatcctgcgctgtgacgctgcaacaaaagaaaactgcaaaagtatgtcaaaagccgcggagtttcctccgcggcttttgtgcactttgcgcaaaagcatccaaaagcgccgggaagcgacgattttttccaattttgctgttgaaaaaatttttacagatagatataatgaatctatctattggcagagggtttgacgcctctgtacgctgcggccggtaaagcgagagaggaaaaaggggagagaactatgcagttgatggaagagcgaattcggagaaacggcattgtccgggccgggaatgtgctcaaagtggacagctttttgaaccatcagatggacattgatctcttcaatgaaatgggacaagagttctatcgcctgttcggtgaagagcatgtgacgaagatcgtcaccatcgaggcttccggcatcggcattgcctgtgtggctgcgcagtacttccatgtgcctgtggtatttgcaaaaaaatcggagagcaaaaatctggacggcgatgtgtataccagcgccgtcgcttcctttactcataataaggtatatgatatccgaatctccaaaaaatatttgaatgaaaacgaccgcatcctgttgatcgacgactttctggctaagggcaacgccctgttgggactgctggacgtatgccagcaatccggcgccacggtagtgggcgccggcatcgccattgaaaaagggtttcaggagggcggtcaattattgcgcaagcgtgggctgcgtgtggagtctttggccattgtggatgcgatggacgaaaatggagagattatattccgccggcagtgaggaagagagtaattccagataacgttgcggttataacgcctgtgggcgtcataataaaaaaatgaatttggaggaagttcagaaatgaaaagaattcttgctttgggttgctccattgcactggcagctatgcttctggccggctgcggcaacggcggcaacaatgagcagccttccggcggcgagggcaccggtatcgcagtggaagacgtcaaggtgggtgtgatccacatcggcgatcccgctactggttccggctacagctatacccatgaccaggggatcgtggccatgcaggaaactctgggcctgagcgacgagcagatcgtgcgcaagaacaacatcgacgatacggataccaccgctattgagaatgccatgaacgagtgcatcgaagagggctgcaatatcatctttgctacctcctggggttacatggacacctgcgaagcgctggcggcggaataccccaacgtgtttttctcccatgccaccggctataagtccaacggcaccaacttcaaccactatttcggccgcatctatcaggcacggtatctgtccggtatcgtggccggtatgaagaccgaaaccaataagattggctatgtcagcgctatgggcagcgaaaacggcgagtgcacttccggcattgatgcttttgccatgggcgtggcttctgtgaatcccgaggctactgtggaagtgaaggtcaccaactcctggtatgatcccgaaggcgaaggccaggcggcgcaggctctgatcgacgacggctgcgacgtgatcgcccagcactgcgacaccaacaatccccagatcgctgcgcgtgacgccggcgtttggggtgtgggttacaactccgacatgaccgcagaagtgggtgagagcgtgctgaccagcgtggtctggaactggggtgcttattacacggctgctgtgcagaatgtgattgacggcacctggacgcccggcgtgcatgtggaagactatttcggctccatggctgacggcctgctgagcatcaccgcgctttcctctgaagtggccgagggcactcaggaggccgtggacgtggccaaggctgccatcgaggacggatcctttgatgtgttcaccggcacatataccgacgctgctggcaacacggtcggctgcgatggcgtgatggagtgcaacgacggcactaccctggaagtggacggcaccaattatgccgccatcactgcatattacaagaacgtcgtcgtcaagtaagacgatcccggcggcaaagagggcggctcccaatgcaggccgccctctttttcgccacagcgcgccgggcggtagtccggccgctgcgcaaagcggaaagctggctttccgctttgcgcagcgagacgatcgaccattgcagcgtaaagaaatccatttccgtactttgcggacgggacgccggcgggcgcccgcagaagaagcgaacgcggtgtgcacgcaaagacgcgcactgtttttttgattttgataccgaagaggtggggggaactctatggctgaaactgagtatgcgattcgatgtgagaagatccgaaaaacattcggcagcgtggtcgccaacgatgcgatcgatctcaacgtccgttatggcgaaatcctggccctgctgggggaaaacggcagcggcaagaccacgctgatgaatatgatctccggcatctatcacccggatggcggtacgatttatgtggacgggaaagcagcgtcgatccaaagtccgctggacgcccagaacctgggcatcggtatgattcaccagcattttaagctggtcaatattttttccgccatggaaaacattgaactgggtacaccagggcggaaactgccgacgaaggtgctgcgggaaaaggtgatggagctgtgccggacctatgggctggagacagatccggaaaagccagttcacgccatgagcgtttcagaaaaacagacggtggagattctgaaagtgttgtaccggggcgcgcgcatcctgattctggacgagccgacggcagtgctgacgccgcaggaaacggaaaaactgtttgcgatcctgcgccagatgcgcaaagccggctgtgcggtgatcatcattacccacaaactcaatgaggtgctttctatctccgaccgggtgacgatcctgcgcaaagggaagagctatggcacagtaaagacggctgaagtggacgtgtccaaactgactgaattaatggtgggccatgcggtaacgctggagattgaccgcccggcgccgaaggacccggaggatattttgaagctggtggatctgaccgtgcgccgcagagacggcagtatcgctttggacgacgtgtccttttccatccgcaccggggagatcctgggtgtggccggcatagcgggcagcggacagaaagagctgtgcgaaaccattgcgggcctgctgccgccgacgcagggtgcgatcctgtataaaaaagaaaatctggcggggaaaaccccgcgggaattgatcgatatgggcatttccatgagttttgtgcccgaggaccgtctgggcatgggtctggtggctggcatgggaatgacggacaacatgctcctcaagacctatacccacgggaaaggccccatggtggatcgtgctcccgcgcggaaaatggcggaggagctggtggaaaagctggatattgtcacggccggcatcgaagccccggtgcgtatgatgtccggcggcaatgtgcagaaggtgctgctgggccgggagattgagtcaaatcccgatctgctgatcacggcttatccggtgcgcggcctggatatcaattccagctatctggtgtacgatctgctcaatgagcaaaaggaaaagggcgtggcggtggtgtacatcggcgaagatctggatgtgctgctgcagctgtgcgaccgcattgttgtcttgtgccatggacgggtgaccggcgacgtggccgctcaaagcgtgagcaaagagcagatcggcctgatgatgaccggagaatcggcccaggaggtgctggaatatggaagctaaaaaaagagagccgctgctgcgtgtggtcaaacacgcggagctgtccaaggggcagagtgtggggctgcggatcctggctgtggtgctggcactgattgtgggcggcatttttatcgcagccatcggatacaatccctttgaaatttacgcgacgatgatcacaggctgtttccgctctcccatggcgatgcaggccacagtgaagttctgcatccccatgtgcatttctgccctgggcgttacgctggctttcaaaatgaaattctggaatatcggcggcgagggacagctgatcatgggcgcggtgtttgcttcgttctttgcgctgttttgcagcggaatgccgcatctgctgctgctggtggttatgttcatcgctggctttatcggcggcggactgtggggactgattcccgcggtgtgccgtgagaaatgggggaccaacgagacgctgttcacgctgatgctgaactatattgcgctgtatatcgtcatgttcctgcgcgacggtccgtggcgcgatccggaagcggcgggctttaacaaaattgcccgctttgacgccaacgccatgttggataaggtgctgggtgtgcatgctggctggattattatgctggtactggtggtggtgctctccatctatatgaaccgtaccaagcagggttatgaaattggcgtggtgggtgagagccgcgacacggcccgctatgcgggcatcaatgtgcggcgcgttgtgctgcgtaccatgtttctctccggcggtattgccggtattgcaggcatggtgcaggctaccggttccgatattacactgagtatgggcgttgccggaggcgtaggcttcacaggtatcattatcgcatggcttgcccaactgaatccgtatgtgtcgctgttgatttcatttgccttcagcatcctggtcaagggatccagtgtggtacagtctgcttacggcctgtccacggactgtgccgatgtactgcagggcattatcctgttctttattatggcgatggaatttttcgtgcgctataagattgtattccgcggacgccgcgagcgggcagtgccgccggctgcggggaaaaacgcctcggagacggatgagaaggaggcggagcagacatgatttctgtggcatttattctgaaatttattgtagccgctgtgggggcgggaacgccgttactattcggtacggtgggtgagatcatgtccgaaaaagtagggcacctgaacttgggtgtggagggcatgatggccattggggctgtggcgggatttgctgcaggctatgccacaggcaatctggcggcagccatggcggcggctttcctggcgggtatgctcgcggcgctgatctatgcggtgctcacggtgggcttcatggccaaccagaacgtgatcggcctgacactgacgatcttcggcgtgggattgtccaactttattggcgtgtatatgatcggcaaaacggacagcaatacctggcagctgcctgcagagctgatcgctcagatgaaaaatgtgaccattcccgttttgagcgatattcccgtactgggtaagctcctgttcaactatgatccgtttacctatgtgggcatcgtcattgctctgctgtgcggatggtatctgttccgcaccaagacgggactgaacgtgcaggcaatcggtgaaaacccctccgctgcggatgcggcttcgatccaggtgaccaagtggaagtatatcaacatcctgctgggcggcggtatctgcggcatcggcggagcttactgctctatggtcatcaacggcggcgtctggatttccgactgcgtgggcggtttgggctggatttctgtggcgctggtgatctttgccgcctggcggcctcaggtggcgattctgggcagttttgtatttggtgcgctgcgtattttgaaatattatatgccggctgtgatccccattgcgttttttaatatgctgccttttattattacagctattgtgctgctggccgcctcgatccgcggagccaaaggcagccatattccggaaaatctgggcaataactatttccgagaggagcgctgaccgcgttggattcgatccccttcacctaatcggtgaaggggatttgttttgattattttgataaaaatttaacgaaaatctaaaaattcatacgattctatccatatattacaattttaaaataaaatttttgtagaatagaataaaattgcgcaaaatagttcattctttttcgggtacagaagattacaatagacaccgtgcgcaggggggactgcgcagaaagttactctttgacgctgggaaggatatgtgcccaacaaagagcgaagggtattttatagagggtgagttgattgaaaaaaatattatctgttctgaccttgaccgctgctgcaacggcgctgtgctgcccgagtgtttttgccgctgaaattatgcacagcgccgaactcggcgcggggatttcgttggtatttgccataccgtttgtgggcatgctgctgtgtattgccatatgcccgctggtgatcccggagaagtgggaaaaatggcgctggctgtttgttctgttctggtcgctgctgttcctgattccgtttgcgcttacatataatgtgcctaccatggtggatcagctgctggaatctctggtgggcgattacctgacatttatcgtgctgctgttcggcctgttttgtgtggcgggcaatatctgcctggaaggcgatttggccggcacgcccaagaccaatgtgctgctgctgctgattggtacggctttggcctcctggatcggtactaccggggcgtccatggtgatgatccgccccattctgcgggccaaccgctggcgcagcaagtgtgtgcagacagtggtgtttttcatattcctggtgtccaatatcggcggctgcctgacgcccatcggagatcccccgctgctgatgggctttatgcgcggcgtgcctttcacatgggagctgcagcatctgctgccgatcatggcgttaaacgtggtggtgctgctggccatttatttcgtgatggatcagcgggcgtaccgaaaagacctggcggcagggcgcaagcccctgagcggtggtgcaaaactgcgcttgagcggcgcacacaacattgttttcatgctggtgatcgtgctggcggtggtgctctccggtgtactgcccggtatgcccctgtttcagaatgctgcgggcgacgtgctgggaatccacattttcggcagtgtcagtttgagctatcccacgctgattgagattgcgatgattctggcggcggcgtttttgtcttttaagaccaccaagaaggacgtacgtactaagaacaactttacctggggcgccattgaagaagtggcagtgctgttcatcggtatttttatcaccatgattccggcgctgctgttcctcaaggcgcacggtgcggatctgggcctgacagagccttggcagatgttctgggccaccggcgcattgtcctccttcttggacaatacgcccacttatttggtgttcatgactacggcaggcgctttgggcgcggcggagggtgtggtgacgacagtcggcaccattgctgttccaatgctgattgccatttcctgcggcgcggtgtttatgggggccaatacttatatcggcaatgcaccgaactttatggtcaaatccattgccgatgaaaacggcgtgaaaatgccttcctttttcggttatatggcctggtccgtcgggattttgatccctgttttcctgattgatacgctgctgttcttcctatgatggaaatgcggtgaattgtatagtaagcaaaaagcgtttcgccttgaaagcggaacgctttttgcttatctgggatgtacgcggacacaggcgtgcagcaggcagaggcatgtttacaatggcaaaaaagcgctccgcctatggcagagcgcttttcctgtgcggtttcgatgaaatctcttatgccttgtgatccacagagtacatatactggatcaggtccacaactttattggagtaaccggcttcgttgtcgtaccaagcgaccagcttgacaaacttatctgtcagggcaataccggccttggcatcgaacacggaagtgcaggtttcgccagtgaaatcagtggacaccacatcctcgtcggtgtagcccagaatgcctttcaactcgccctcagaagcctttttcatggcagagcagatctcatcatagctggcggggttcttcagctggacggtcagatccaccacggagacatccagcgttggcacacgcatggacataccggtcagcttgccgttgagttcgggaatgactttgcccacagccttggctgcgccagtggaggaaggaatgatattgccgttggctgcacggccgccgcgccaatcctttttggaaggaccgtctaccgttttctgtgtggcggtggtggcgtgcacggtagtcatcaggcccatttccacaccaaaagcgtcattgacaactttggtcagcggagccaggcagttggtggtgcaggaggcgttggagacaaagttcatggagggatcgtaggtcttgtggttcacgcccatgacaaacatcggggtatcatccttggagggggcggacataacgacctttttggcgccggcatccagatgggcctgagatttttccttggtcaggttgatgccggtggcctctacgatatactctgcgccgacggcagcccagggaatattttttgcgtccatttcattaaacaccttgatctcgtggccattgacgacgatcgcgtcctccttgacctcaatggcgccctggaaacggccgtgcacggaatcgtatttcagcatgtaggccatgtagtcgggagaaataaaggggtcgttgataccgacgaactccacaccttcgcgattaatgccggcgcgcagcaccaggcggccgatacggccgaacccattgataccaattttgatagacattgttcgtatcctcctcattattatcaaatctgtgatgaacaaaccattttagctggatttattataccgaaatcacgggaaagaatatacgttattttcaccaaataattccagcgctattcagcaaaacaacggaatagccgagaaaaaacgacaaaaaccgacaggaaacttgtatttttgacaaaacctgatagaataaataaaacgttgagaaattcctttttctggcctgccggggtccttttgggctgattgcttgaaaaagataaatttggcactggtaaaatcgtgatttctgccgatgctaaagcagaaaaatcctattgagtcagagagggaacgattgtgacacaacggagtgatgaagaaaagaaactattaaacgaggttctgcccaatgtggcggcacagatgcgcggacctctcagcgtgctccacgccagtctccagaagatgatccagacagatatgccaggcactgcgctacttaaccaaagttactatcagttgctgcgcctggcaggaaatctgtctatggcggaattgctggacggagagcactatttgcgtaagcgggaaaatggagatattgtggtattctgccgggagctggccgagcaggtggggcttctggccgaggagcaggatgtgacggtgcaattttcctgtgcggcgcagtcctgtgtgattgcttatgatgcgcgcctgatggaacggctgttgctgaacttgttttccaatgcgttgaagtttacaggcccgggcgggaaagtgacgctgacggtgcaggtgcacaagagcgatgtgctgctgagcgtggaggatacgggctgcggcatggcaccagaaatgatgagtgtgctgtttgaccggtatcttcacagcgagcgcatggacccacggccccatgggcttggacttggccttccgctttgccgggcgatcgctgaagcccatggtgggcgtatttttggggaatccaaattgggcaaaggcacgaagatcacggtgtctttgccgaatgaacgcggtttggtacagcatgtgagggaatcgtttgactacgcgggagggtttgaccacgtactgttggagctgtcggacgctctcaataccagggcttatgagaggcattcgtaaccccgtcatgcggtataaagtagaaagagccaccggagcatatgctccggtggctctttttattcgctgaaagggcggggaaacggtcaggagaagttggtagcctcaaagtatttggcgaattgatcaatggcgatataaaagcgatccgtaaccgaggtgggatcaccgctggcataaaattccatggtcagcttttcgctgtgcggatttttggaggcctcgtaaatcgtttgcagagtttccatggggaaagcgaacgtgaaatgctccacatcctgttcgatggcaacgactttaaggatatacagactttccgaagcattcatgatagagagaaaacggctttcctggcttttgaagtccatggtcagatagcaggaagcaccgtctgtcgtcatggtcagaccagtgatgccgactttgccggcattatcggcggggattgtaaagccgacgtacagcgg

SEQ ID NO: 294 - DNA, 7026 bp, Unknown
  16S sequences of unknown bacteria
gcccgtgctgtcggcggcgggcgttgaagtttcggtgcttcccaccgcgcttttgtccacgcacacgggcggctttgacggctatacataccttgacctgaccgacgaaattccgaagatagtcaaccattggaaaagtctcggtctgaaagttgacgcattctatacgggcttcctcggctcggaagcgcaagcggacatggtatgcggcattatcgacgcgcttgcggaccgcgacacgcttatcttcaccgacccggttatgggtgacaacgggcggctttactcgtcgtttctccccacattccccgaaaaaatgaaaacgctttgccgccgctcgcagatactcactcccaatctgaccgaagcgtgcctgcttacggacaccgaataccgccccgacggctacgaccgcgaatatatcgaagaaattctgcgcaaacttgcgtctttcggttcggaaaccgttatcgtaacgggtgtttcgcttgaaaaagggacgcttggcgcggcatattcggacacaaaaacaggggagagcgggttctctttttccgaaaacgtacacggtatgtttcacggggcgggggacgtgttttcgtcggcacttctcggggcgttgctgaacaaaaaagacatcaaaaccgccgttgatattgcccttgacctgaccgtaggcagcataaagcgcacctatgcggcgcagacagacacccgcttcggacttgattttgagcatggtttgggagactatgcgcaccgcgtatcatcacggtaaaatatcactttgcaggttctcggtaaaatcaaagcggtattttctgttaacacccacacgaaagattgaatacgccgcgcgaaattgttgctgcgcaacacgcgcatggctgttcgcaaaacatcgtttccgccgttttgcgagatatgtttcacggggcgggggacgtgttttcgtcggcacttctcggggcgttgctgaacaaaaaagacatcaaaaccgccgcccacatcgcccttgacctgaccgtaggcagcataatgcgcacctatgcggcgcagaccgacacccgcttcgggcttgattttgagcacggtttgggagactatgcgcacaaagttgcggaaaaataaaagggcaaatcaaccgaataaaaccacagaaaaagtaattggtattgttttttgttatatcggcaaagtacagaacttgtcagacgtagcacataggatacttcccgaacagccaacgaaacacgattttgcatcggttaaaatttcgatttggaagttaaggagaaatctctgatggcttggaatcccgaacaatacttaaaattcgcaaaagaaagaaatcaaccgcgcaccgaccttatatcccgtctgaacggcgacttcggcacgattctggacttggggtgcggtcccggcaacagcacgcaaaacctttccgcaaagttcaaaggcgcttcgatagtcggctttgacgccgacgacgaaatgctccgccgagcgcgcgccgaacaccccgattttgagtttgtgaaaggctttgcgcccgacgggctttcggaactgaacaaaaaattcgatttggtattctcgaatgcctgcatacattggatagaaaatcaggaaaaactcgcggacaccgtgtatgaaattctgaacgacggcggcgtttttgccgcctccgcccgcggaaaggcataggcgcggcgctgatgaaaaacattctgcgcgaagcggaactttcgggcgcaagaatgaccgttttggaaacgcagacctgcaacgaaaacgcgatagcgttttaccgcagatccggctttgaaataatcggttttgacctttattcgtattcgaacgaagacccagagcggcatgaagtgcgaatagagttaggaaagaaaacgggactgtaaaaaaggttcggaacgggttgttcccgaaaaaacagaggtgtgccatggttctttatttttccgcaacgggcaactgcaaatacgttgcgacccgccttgcaaaggcttttgacgaagagagcgtgtcaattcccgaatgtaccggcaggaaccgttatgtttttgaagataaaacaataggcgtggtttcgcccacatatttttggggactgccgagcatagtaaaggagttcctcgaaatagcgtcgttcaaaacggaatatctctatttcgtggcaacctacggcaccacgcccggcgcggtcggcaatatggcaaaaaaggcgatacaaaatcgaggtatcgacgcctgttattccgttcgtacggctgatacatggactccgatgtttgacctctccacgcccgcaaaggtcgcgaaattcaccaaaacaacggagcgggatatagacaaaaccattgcttccgtcggcaaacgccgccgcagcggaaaaatgtcctcgcccgtgtccgtactgctctccaaactgatttcacagccgatatataacaacagggcaagaaaaacgtcgcatttccgcgtggaagataactgtatcggctgcggactgtgcgcggtaaaatgccccgtgcaagccatcgaaatgcaaaacggacgtcccgtgtgggtcaaatataagtgcgcgatgtgtctcgggtgtctgcatcactgtcccaagttcgcgatacagtacggcaggcgcacgaaaaaccacgggcaatacacaaatccgaacgtgaagatttgaacgcgttctgtgtgtcgctcatttcaaaaaggagacagtaaatgaaaaaatacttgccgaagataacatttccgctcggcgttttggccttgatatgccttacatgtttcgttgtcggaattgcagtgaatgcggttggttacagcacgcagttgatgtctgttctggctcttgtcggcggaattacaggcagtttcctgcttatgatctttctcctcgtcctgaacagccccgtcctgatatatcgggacagagttgttttttcgaccgccgtgcgaaagaacggaaaatccgtttcgggtcggacagttataaaatttgacgacattgagttcatcgaccacaagtttatcgagggtgatcattatatcaccgatgactgttactgtcatcttctgaaactgaaagacggcacggaaattacggtttttcttaattcatacggcagaagaaaggaagatgaaataatgagtaccgtagaatttctcctgcaccaaagccgaaccgcgtccgcgaaacgaaccgataaaaaataaaaacgcccgccccttaaatctttgccctgcggcggtcgcaccgctcggacaaacttcaaaaattaaaaaatccgattttggggagaaaagtatgaataattatacatatataactctgcgtgagcgacccgaactgaaagcccgcgccgcagagtggttcaattccaaatggggcgttcccacgcaggcttacatttcctgcatggacgattatcttgccagaaaaacggagtacggttggtatctctgcatggacggcgataacatcgtcggaggtctcggcgttatcgcaaacgattttcatgaccgaaaagacctcaccccgaatatctgtgccgtttacacggaaaaagaacatcggggcaggggcatagcgggtaggctgctcaacaacgccgttgaagatttgaaaagtaaaggcatatcgcccgtctggctcgtcaccgaccacacctcgttttacgaactctacggctgggaatatctttgcgaggtgcgttgcgacggcgaatcaaacacgtcccgtatgtacatccacagataggttttgacatcgcgaacacccgccgcgcaacaaaaaccgtttcaggagaaaaaatatgttcagaaaaatgagaagattcaaacaggaacttacccgcgaagaatgcgttgaaatactgaaaaacgaaccccgcggcgtgctttcgctcatcggcgacgacggctatccttacggactgccgatgacgcattattacaacgccgataacggcaaaatatactttcattgcgcccgcgtcgggcataaaatcgacgcccttaccgcctgcgacaaagcgtcgttctgcgttatggacaaagggtaccgaaaagacggtgaatgggcgctgaacatcaaaagcgttatcgttttcgggcgcataaagcccgtgcgtgaccgtgattttacattgaatatgtgcgccgcacttgccgcaaagtttaccgacgacgagggctacgcgctctccgaaacaggtcgctttgcggacacggttctttgccttgaactgacgcccgaacacatcagcggcaaacttgtcaacgaatcataatgtattcgggcaacggcgttgaagaaattaagcgcatacaacaataaacacggctgatgatttttgcgtcatcagccgtgttgtcgttcggcattatttgcggaaacataaaaacgtcggaacgggcgcagaagcagacgatacatcaacctcgacctttcgccccccacaacatcagacgtcaaatctcggcgaacccgcgcagacgatacggcaacgttcggcctctctgccgaaacctcatttcgtctctccgaagtctttgaaaaccgtgcaaatgcctgttatttgctttgcattgttgccttatgacaaaaaaaacctcccgaaaaagcacaggtggggcaagtttttactacttccaagccgctgaaactttatattcgggagggaaaagcgtaaaaagaagaattaaaagagaagaaaaggagttgtcttctttttactttttcttggacaaaaacgcattaagaggatgtaaggataaattaaaagaaaaagaaggcgtatcttctttttgcgtttttgttttgaaaacatataaacaaagaaacggaagaaaaagaagaagtatagatgtaatttcttctttatatgttttcggttcgaacacgggacgccttgcccatgttcttcttgccgtttggattgatctgccatgtgcccgcacaggtttgcttgcgcaaaccatgcacatctcgacctcggcaaatttcgattttacctccttttaccaattaatacggtcgaaaaatggatttcgtgacagaaaaagacaaaagtttacaaattgtttgcaaattccgacaaaaacgagctgataaacgcctttgcgatacaagtaaacagacattttcgtatttaaaagcaaaaatttcgcgcggcgtattcaatcactcccgcgggtgttcgttttgcaacattaagtcggcggcattgccgccgactgtatttttatctgtttttctgtctcaacaattgttgacaccgttcgccgttcagagccgaacaacccacaaataatgcttatagactttgcaattatcttatttgcaaccgcttagttgtactttttgtcggcgtttatgaactatttgtaaatttttgtctttttctgtcacgaaaatctgattttgaccgtatatacttgtaaaagggtaaacagaaacttttatcagccgaaaaaagtttgagtgcgcatacattttgattctcgaagataccctttatccttaatttgcttttattgcagacatttcatcgacactcggaaaaatcaaaaagaaaggatttgaataatatggttgttatagcacttatgggaaaagcaaatagcggaaaaacatcttctttgaaatttcttatgcagaatctattgaaagtaaaaggaatcgaggcaaagtatctttcccgaggttattcgccggatactcaggcatgcattgacagcatttcggaaaaatggaatactgcaacgcaaagagtcagtgatgttacgttggttgcggaacttgacggcaagattatctgcgtaacttcatacggagattcttttacaactgaggttttacccgcattggaaagaacagtcaagaagtttggcagatgtgatatttttgtttgcggcagacataaaaacaatgacctcacaacagaattttcagaatataatccggagataaagattgttgaaaaagggcgagatgccaatttcgataaagggaataaagcgacgggtgcgcaattgtttgctgttgtgaaatcctatttatgaattatatatctgaaagtctttcggcaaagaaaaaattaactgctaatgcacgatatgaaaagatataagtatatcaacgctctaccgtatacgaacagatattcttgttcaaaagccaacattattacacttaccgatgaatgaaaatgtcttgcaatattaagtcggcggcaatgccgccgacagttttttttacatcagcaaaggctgaatctgttcgcctttcaatgccgcctcgacagcggcgggaatcatttcaacctttgcaacgagcgaggttggtttctttaatgcgtcatcttgcccgaaaggtacgaaatagatgtgccgtgtgttcattaaaactccgagatttttcgcattgcccgagagtgcgtcattgctcgatattgctatcagcacgggacgttcgttgcgcaaatgcgccttgaccgcaagcgacacggcgctgtccgaaaccccgtttgctatttttgcgagggtgtttcccgtgcagggagcaaccacaagcaaatcaagcaactttttcgggccgaacggctcaacctccgcaagcgtgtgcaggacgggtctgccgcagatgttttcgaccctttcgcggaaactttctgccgttccgaaacgagtgtccgtcgaataagtatttgccgacattatcggcacgatgtcatagcccgccaaagcgagcgtttccatttggtctatcatttttttgagtgtgcactcgcaaaatggcagatatgacattttgcgaacagcaatgcgcgtgttgcgaagcaacagtttcgcgcggcgtattcaatcatacccgtgggtgtgcgttttgcaacattcagtcggcggcattgccgccgactgatatatataaaccttttacatcaaaagcggctgaatctgttcgcctttcaatgccgcctcgacagcggcggg

SEQ ID NO: 295 - DNA, 2245 bp, Unknown
  16S sequences of unknown bacteria
tcagatgaagaaaccgatgtattgagcgtaaagcgatcatgcgtcggtttttctttttgcaaaatagtccggtggactgttttgcaaaaccgaaggaactgacagagcttgagacggggcgaagtcagtttgttcgggcgggagtacagagggtgcaaccctttgtgcatgggtacagggaatgcaatacccctgtgcaggtcaagggcggcagccttgcccagttaagtggcgtttcgccacttagtactgggtattacttgacgcagaaagccgcaaggaatcagcttcgctgcccttctcccctgtcggggaaatcaaaaagaaaaggaggaactcatgtgaaattaacaaggcacaatggacgagctggaaagaatggcgtttataatccgaagcacaatgaccgcagttttgacattgccaacagcgaacacattgacgaagaacgagccaaacaaaatctctattgggactgttacaatggcttccgcaatttcaaaaatcccgataaggaaaatgagctgtctgccacttttgaagatgtggaacagcttttttatcgtcagcggtatcgtgattttgtaaccggacagaacgaaagaaatgtgaagaaccgacaccctgaaaggaataaggaaaccggtgatttgctcaaaagcaaaaagacctgtccagaggaaacggtctatcagattggaacacttgataatcatgttccaccggaactgctcattgagattgtcacagaatttatggaaatcgtaaatgagcgtttcggctctcatgtccatatcctgaattgggcgctgcacttggatgaaagcacccctcatattcacgagcgtcatgtgttcgactgtgaaaatcaatatggggagattgccccacaacaggaaaaggctttggaagcactgggatttgaactgccggaaccggagaagcctgtcggaagaaaaaataaccgcaagatgactttcgattcagcctgccgagtgttgctgttcgatgtggcgaaaaagcatggcttacaactggaagaagaacccgaatatggtggtcgtgcttatctggaaaaacaggactatattcttttcaagcaaaaggagcaactggcagcacaggagcaaaagttggaagaactcacgatgaagattgaagatgtggaagctctggtggacgaggttgccgatattgcctatgacaaggcggttgaggtcgttgctgatactgtaaaactggaaacgcacaaggaggatattaagctggtggagcagtctaaagcgtgggttctctcccctgagcgtaaggcttcaaagaaagaagttgagtatgcagtgaaacgattggatggcgtgattgccagaatcacaaacgctatgaaatcaaccattcagaaaatccaaaccacgctgatgaaaccggaggtcaaaaaagccggaacggagcaaatcaagaagaaagctaaaagttccattatagagcagttgagccgcaaaaagaaagaaatagcagagcgtgaagtcagccggacggatcaggcaaaaagcaaaaaacaggatatggaactctaaagcacttgctgttttcactttgaaaatgacaggtgcttttgctttagggagtaagaaaatatcttccattctttaggttgatgaagtataatgatagtaagaaattttttgtaatgaccttaatccaataagtgattttgcaattattcagtaaaggatgtaattatatgaaaaaagtattgttgctttccagtgtgattattatactcggtttaacaggctgctctaacaaatatttcaatgactggtttagctctgaacaaaatgaaacggataagatgtgtcaacaaattatcgaggcatgtaagcaacaggattcagagaaactaaaatctctattttccgaagaaagcaaaaagaacattgagaatttagacactgaaatctctgcttttttcgattatattgagggcagtatccaaaggtttgagggcgattgtgcatcatcaagtgaaagcaactatggtaaaaggaaaacggaattggatggtatgtatctcatattgacagagaaggaaaggtattgtatgaatttttatatgtatagtcaggatgatgaaaatgcccaaaatgtggggatatataaaattgaaattgcattggagagcgaagtggctgaggataattttatatgggataatcccccaaacggtattctgtctcttatacac

SEQ ID NO: 296 - DNA, 23089 bp, Unknown
  16S sequences of unknown bacteria
ccacgttcaccgtatacgttgcgctggaagagccaccgccggaggaaggcgcggtatagtcaaagatataggtatagctagtggcattgccgctgattttgaccgtggtattactaccggccacaatattcgtatctttgtcaaaggttttgccatccgtatccacggtgaaggtgatgtccttgctgaccgttgccacttcggctgcgtcgatattcttcagcagcttgatggtgccgttgttctccaccgcctctaccgcttcctgcagggtggtataaccgacaccgtttacctcagctgccgcctcgttgacagtggaaatggtaaaaggagagaaaccatggctggtagtaaaggtgatcgtccggtcgccagcaacctttgcggtatagtaataagttttgctgttggatgcctcgtgcttgatatagacatcagcgcctgcagccgcaaagccttccggcagggtcagcgtcacctcggcaggagtggtgaccgtcaacggctgtgcttttttcagcaccacactgttagtctcatccagggcatcaggcgtcgttacagtgacgccagtgtgtgtagcgatcagattgtatttgggcacaatgttgaaggtgaccgtcttcttgtccccatccacagaagatccggcaggcgtcacttccggatagggctgcacgagaaccacggtttcctcgccaacaggtttcttactgcccagcttgctttctgcatcggcaacaacagcgctgtctacaccggatgccacgctgccggcggcgccggccagactggccgttacgctttccgctgcagcggttgcagcctcttcggtcacggcatcggcaggatattcgccctccgcaggctgggtatctgcctttccgtcggcgatttctacactggcgatggcatcctttacctcgaaagaataatcaccctgcgtgatgggaaatgccatctttccctctgccagataggcagtgggatcgctggagaacaggccgccggagattttaacgacggtattcgcttcatcccatgcgccctcggttttatcggtgttgttgaaagtatacgccttaactgcatctgcttgggcgctcttgaaagcaccagcacgaatttctactttcccaagatctttatagccgtcgcgcttaacaatagagatcgccgcgccatccacgatggggccgtcgccttccgtcttttgctgttttgtaccggtggtggtgatggcggtctgatcgccggtaacggtcaggctgcccgcgcacatctgcacaccaacatgcttagcattgattttggaattctcaatggttacattgccgtcagacgggaagtaaataccaagtccatcaggcacattcagggtggagtttttaagggtgacagaattgccagtattggtaccattcgtgacgataccataactatcaccgggaacattcataatcacattttccagcaccagcgtggtattgttgtacagtgcggtaaggccgcctttcgacagcgcctccgcagtgccggtcaatgtaccgtttcgaatcgtaataccggcattgtcataattgatctgaaccatctgatccgaactcagagaagtaaacgtgtttccattcaaatccaaagtaccggaagaagtaccggaagcaatagagtcgtttccggtataatcatgcagcatggtgactacgccatccgcagcctttccagccgcattggcataatcgccgtagatccgctcggtaccgtcatcggcagtgatcttaaagccaccatttttgatataatcttttgtaatctcactatacaccagataagcggaagatttcaacttaacagcgtcagtaccgtctccggtaacggttagcgttacgccctcaccgattacgccagggatcgtataacgactgtcaccagaaccgaactgaaccggcagtgtccccttgatttcaccaccctgcccggaaacagagttgatgattttcatagttgggtcaataccctctacaggcttccagccatatttcgcttgcataaaaatgacaccattcgcgttcttaacggctgtgccatcaatactgtagccgttaaggtcaagggtaatgccggaaacgcttccagtttcgacgcctttctccaatgtcacatctctccgcagctgcacgatgccgccagtctgaacagccgccatagctgctttcagcgtggggtattgtgtcgtaacaccattctcaatgacaactgcttccccatctgtcacctgcacggtaaaattgccgtcttcaccctgcacggcaccgtaggaaggaaccaaagcatttggtaaattgcagattttctcggcgtcatctaccttatacgtaccagcactgatttgagcagatgctccttccacgccagaaacaccgtagctgccagctccagcgtcaaaagttccgcctgtaatgtcggctttcgcgccagaggtcaaaagcgccactgcatgactgccggtgctggtaaaggtaccaccgctgatggtcagcgtaccatcgttcgcttctccgtcatagtggcgggaatacactgccggacccgtagtagaatcaaatgttccgcccgaaatggtcgcaatatgattgttggccactgcgctgcgtccatcgccggactgcttaaaagttccatccttaatcgtcagaacaccgaagtcatcattcttaacggtgatctgaccgccggtaaaggtaccgttgttaatcgtaagcgtagctttgtttttgccttcgctgggcttgggttcgccgttggttcccgcttctgcgtctgcggcgttctgccagccattgccaatcaggctggaatacagtccctgattggtatcggagaacttgacggtaacgccgctgctaatcgtcatagaaccgaaattcttgatgacatagtaagagttgccgccagaggcgctgtctcctgtactggcttcggcagagcgcatataagtaccgccggacaaagtgattttggcgtttatgtcgttatagatggcagcctttccatgagtcacattatcgacaatgccgccaccctggctgtcggtaatcgtaataccgtatgttgatttatttgtaattgtatgatgatcactattcgtcagtttgcagccattcaggtcaattgtcaatttaagcctctgcgccgggatctccacactctcagttaaattctgattcaacgtaatttcatatggctccttattcgttgagtagtcatatgcctgcactgcatcaatcgcagcttgcagcgtatcaaactgctgcaccgtatccccttgcgtcagcgtcacagccttgtccgcagccgggttcgccggctctgtcactgtttctgtcccgttttcggcccaagccattggcatcagggacagaaccattgccagcgccagaacgacagacaatagtttctttctcataaaacctctcctttttcaaaattttagttgtacaatatacgtttccatctcctgcaggagatggaagcggcacgttaacgtgccgtttgtgatttatgctttcatcatatcgcatttttgatctttttgcaacatacaaaacacccgccgtttatgaaaaacggcgggtgcagcaatgttgtgtttttttactcttcttctgaagaagtggtattctgcgcactcttaccccggatcgcttcctgcatccggctgcgggagagatccgtatactgccggtgggacgcgcgcacttcttccagcgcggcctgcagcgcatcttccgtgcgcttgagggcgtcctccgtatattcattggcaacgcggtacatttcgcgggtacgctcctccgccttgcggacaatatcattggcctgctggcgggcggtctgcagcgtttcgctttcggaaacgatgtgcttggcgtcgttctgcgcccgctggcgcaggttttccgcttcttttttggcattggccacatattctgcccgggcagccatcagtttttttgcctcttccagctccgcgggcagctgggcgcggatttcgtcgagataatccagggcgcgattgcgctcaatgatacacttatcattgcccaggggcacgcccttggcattgtcaatcatatcgtataacaggtcgatcaggtgctgcacatcattttccatggtttattacctcccgatatgtttctgctcggcgatcttcgccacatccgccgcaatctccggcggaagataccgctccagcggctgccggtagcggatcatttcccgggccatggaagaactgaaatggatgtacggcgcgctggccggcaggatcagcgtttccagatccggcttgatgctgcggttgatcagggacatctgatattcattgtcaaaatcgcacacattgcgcgcgcctttgaccagcacagtggcgcccttctgcgcggcataatctgttaaaaggccctgccagctctccgcctgcacattctcaaaacgggcaaccgcttttttcacaaattccatccgctcttccggagtgaacatgggattttttttatctgcattgatcatcacgcagacatacagccggtcgaaacatcttgccgcgcgctcgatgatatcgatatgccccagggtaatggggtcgaagcttccggggtaaatggctgtcatcactggcggatccctctcttgtgcgcaatatcaatcacggtggtaaacggtgactttgatctttccataccgatattcgcggtattttccatatggtgcggaaagctccggcaagatcttctcctgcggactttcgcagataattataccatgttcgcgcagaatgtcaaactgagaaatcaattccagggatctctccagcaatttggtttcatagggtggatccaaaaagaccaaatcgtatttttccgcagcactggagagcactgtggcgtagtccgccgtgagcaccgcagcccggtcggccagatccgtcagcgccagattttcccgaatcagtttaactgcatcggtccgggcatccacaaacgtggcgtgcgccgcgccgcggctcaggcattcgatgcccaactggcccgtgccgccgaataagtccagcacccgccggccctcaatgtcaaactggataatattgaacatgccttccttcacccgatcggccgtagggcgggtctctttacctttgagttcgttgagccgccggccgcgggcggtgcctgtaatcactcgcatgtgctttcgtcctccgtagtttcctgtatttgttcgtgaaaatgctgccagaccgcccgggcagccgcggatggcaccacccgggccaaggcttcctcatccgcttcccggatagcccggacggttccaaaagctttgagcagctgttttttgcgtgccggcccgatgccgggcacgtcgtccagcgcactatgataggcgtttttcgtatgccgctggtggtggtaggtaacggcaaaacgatgggtttcctcctgaatctgaccaatgagggcaaacaccggctcgctggcctgaataccgatctcatgcccccgggccgtaatcagcgcgcgggtgcggtgccggtcgtccttaaccatgccgaacaccggaaggtgcaggccgaagcgcgcaagcaccgtttcagccactgcggcatgagccgcgccaccgtcaatcaggaacaggtccggcagcggggcaaatttttcgtccccatccacaaagcgctgcagccggcgggttaaaacctcttccatagagcgataatcgtccggcgcggaaagcgacttgatgtgaaatttccgataagcgcttttcttcggacgtgccccttcgtaaaccaccatggaagcaacaatatcgctgctgccagtgttggaaatatcgtaggattccatacgccggggcgggtgggcaaggccggtcatcctagccagcagctccagcgttttgctgacacgctcggcctccgaagtaacacgttccgcctcctcctgcgcattgcggttggccaaacggatgagatctgccttttctccccgttttgggatgcgcaccagcacacggctggccgcatgctggctcagcgcctgttccatggtatccgggtcttcgatgggcagcggcagccagatctcccggggcagcgcgctgcggctgagatagtactgcgccagcagcagcggcagcatctcctcggctttttcgtccatgcgggcagaaaatacttccgtttcccgcccggtgagctgtccatcccggtagtgaagcacagcataacaggattttacatcgccccgatacaatccccagatatccgtctgcggcatggctccggcaatgactttctgttttttgctcagcacatcgatggcggcaatctgatcccgcagagccgccgcccgctcaaagtgcagcgcttcggcctcagccgtcatctcttctgtcagcgctgccgtcacctgcttcaccttacccgtcagcaacagaaccgcctgatcaatgcggcggcggtgctcctcttttccgggggtgccgcagcagaagccatcgcagcggcccatgtggaaattcaggcacgggcgctccttaccaatatcccgtgggaacttgcggcggcaagtgggcaggcgcagcgcgccgcacaccgcattcagcgcagcacgggtttcgctgcgcccaccgtaagggccaaaatatttcgccccatcctcgcgcacggtgttggagagggaaaagacaggatattcctcctgcaccgtcagccggacaaacggatagcctttatcatccttgagcagaatattgtagcgaggcatgtactgtttaatgagcgcattttccaggatcagcgcctcaaattcactggaggcaatgatggtatcaaagtgatccacccgagacaccatgcgccgcgttttttcattatggcccgcattgtcctgaaaatactgactcacccggtttttcaatttttttgctttgcccacataaatcaccgtgccctggacgtccatcataatatagacgccgggactcagcggcaagccgttggctttttccttcaattcctgctttgtcaagctatgccccctccgcacacaacagcgttttgttcagtgtagcaaaaaagggccgccgcgtccatagacacggcggctttttttctttctctcccgaattactcggcaaaattggtggaaaccaactccgacaaagccgcgacggcttccttctcgtcgctgccatctgcaatcaggttgatcgcagtaccctgaacaatgcccagagacaaaacgcccaacaggctctttgcgttgacacggcgctcatccttttcaacccagataccgctcttgaattcattggccttctggataaaaaaggtggcaggtctggcgtgcaggccaacctcgttattcaccgtgacctcctgcatgtacatgtatcagcaccccttcaaatgttatcttttcagttagctatactttagcaaatttccttgtgccgcgtcaatgacgatttgcacaaacttcgccaatcaaaaaaagtttaccagtcattttatccaaaattcatcttttttacacaaaaagcataccgttcttttccagaacagacgccgcagcgcatttcagtctatcatacgcttttccgtgaaaaaggtgctgcctgcaacggcagtcatttcaatgccgccaccgtcacgccgccctcaccctcgccgaacacgcccagacggaacgccttgacatagggatggcgtttcaggagctggtgcaccgccttgcgcaacgccccggtgcctttcccgtgaataatcgtcacctgggtcagacgacccatcaccgcctcatccaagaagcgatccaccacaatctccgcctcatcggtcatcataccgcggatgtccagctccatgctggccgcagcgcgggccgggacggacacgctcccttttcccttgcgcggcgcggccgccttttggcttccgcggctctcaccttccaccagaaacacttcgccgggcctggcattaattttcaacgccccggcctgcagctgcagcgagccgtctttattgatggaaagcaccgtggcatgggtcttgacaccgggcagctccacacggtcccccaccgcgatggggcgctcatttttacgccggggggcatccggcaatgcggcatccccctgcagcttatccgctgcggcattcaaatcccgcagcaatgcggcgcgcgcttcattctcctgctgcgccgaacgctcctgttccgccgcagcgcgcatgcggtccaactcgtcaaacacacgtcctgcctgggcgcgggcatcctccagaatacggcgcgcttccttttctgctttcccccggacattctgtctggcccgttccatctgatcgcggaactcccttgccttattcgcatcggtttgcgcgctcaggcgcagccgcgccgcctcgtcccgatcccgctccatgcgctggcgctgctgctccagctgcgtcagcacatcctcaaagcggacgctctcgctgtccatctgggctttggcccgttcgatgacggaacggctcaatcccagacgctgcgagatggcaaaagcgttggatttgcctggaattccgatcaaaaggcgatacgtaggccgcagtgtctccacgtcaaactcacaggaagcattctgcactcccggcgtggtcatggcaaaagtcttcagctcggcatagtgggtggtggcagcgatctttgcaccccgatcccgggcctcaccaatgatagcaatggccagagccgccccctctaccgggtcggtgccggcacccagctcgtcgaacaggatcagcgtcccctctcccgcctgttcgagaatctttacgatcgtgaccatatgggaggaaaacgtggaaaggctctgttcaatactctgctcgtcgccgatatccgccatcacatggtcaaagacagacacgcagcttccgctgtcggcgggaatgtgcagcccgcactgggccatggccgccagcaggccgatggttttcagcgtgacagttttgccgccggtgttgggaccggtgatgaccagggtatcaaagtctcctcccaactccacatcaatgggcaccgctttgtctttatccagcagaggatgacgggcacggcgcaaaaagatgtgtccatcggtgccgatgtccggacaagttcctcccatctgataagagagctggccccgggcaaaaatcagatccagctgcaccagcaggtcgtagtcccatagaatatcttcctgcagggctgccgcctcttgggaaagcagaagcaaaatccgctcgatctcttttttctctttggcttccagctccttgagttcattgttggcctgcaccacgcccatcggttcgacaaacaccgtggcgcccgaagacgacacgtcgtgaaccagtccaggaacctcgctgcggcactccgctttcaccggcaccacaaagcggccgtcccgctgggtgatcaggctctcctgcagggctttggaataggtgggcgatgagatgattttctgcaggatctgccgggagcgggcgccggcagcgcgcatatggcggcggatatcggccagttctgcgctggcgttgtcggcgatctcgttctcttcagggatggcccgggtgatcctgtcttccagaaagcgtcccccatgaagggcgcggaacatggtatcgagcacagtgtcccgatcgctttcgtcgccgcggtaatcctttacccggcgggcgcaccgcagaagcgctgcaatatccagcaattcccgcgtgttcagcataccgccgcgctgcgccctgcccagcgcggcagacacatcttttgctccggcaaaggatgggctgccctgcaggcccagcagcatgcaggccgcgctggtctcctgctgcaaacgcttcacatcctccacatccgtctgcggcagcagtgcacgggctttggctttggccgcctcagacgttgcctgggcagccagtttttccaaaactcggggcagctccagcgtgcggagcgatttttcaaataattcatccataccttttgatccttcccaaaggatttgaaaagggggactgccgtcccccctcctgtatcatcaagtcattgcaaaggctgcgcccaaaaggatcatccccgcaatggaaaccaatgcactgttgcggtaggagcggaactccttcgaaccgccctggccggctttgtgcagcacaatcatctggccgatagccgaaccggcccacaccagaccaaacaccagccaagcgcccaaggccgtgaacagcacccgctgcatcatattttcagcgccgaccatcatactgttgcgcacttccaggcctgccatcacgacggtgccggcaatggtaaccacgcggaacgacttgtgcagccacacgagcagtggttcgttcaaacgctctacccgcttttcctgccgttccagctttctgcggcggcgcgcttcctgaatctcctgctccgtacggttgttgctttttgccatatcgtttcttcctttctgtctgtatccgatcccagagatcgctcaacgcagcgttccgccggagcggcgcagctgcttataaaaatccagcgtacagaacccccgctccagctgggcggcggcaaacgcttctgccgcatcctccatccagcgcaacgcgccgggcgacagtgaaaaagcgtataatttcttcggcgcacagcgcagcacatggcgcatggctgccagggaagaggcgcacaacggcatggacagacccctgcgcccttccagcacacagcgccggcagtgcagcacgccctgcaccacatccagcatcggctcctccggcacatctgcgccgcacaccgcgcagcactccagcatcggctcaaaaccgcccagcgccagcaggcgcagttcaaaagccgctttgacctgcgccggctcccggcgcagcgttcccagcgcatacagcgcgttaagcagcagcgacaggatctccggggcgggcacatcctctgccgtcaaaagctcagtcaactcagcaaaatacgatcccagagccaacagctccacgtcctgccgaacaccgtcaaacagctctatcgtagaggcatcatccagtatactccaatttcctttctgatacaaggtcatttcagaatagaccagcagctgggcggcggcagcaatgcggctgcgccgccgggcaccccgggcaaccacggcaagcttgccctccgtgcgggtcagcaccgtcaggattttatccgtttccttggtctccgtttcccggagcacgataccttcaacgatcctgtgcatcccgctcagcagcgttccgtttatccctgcgacggcctagcaccatgccaatgccagcccccagcaatacgccggccaccaggagcagtttgagctgcggctccgtggtaggcagtgacatgaccataagtccgctgatgataagacccgcaatgcagccaatattcccatacagtcgcgtgtagcgatgtgcctgttcgtccatgatgtactccttttctctatgtagggagcgcgctcatacaagccgctcccgctcgtcttccatacggtaagtcaggtaaaacaccggcacgccggtctggcaaaacagcgcccaataaccctcgtttttcatgtcgttcacctcaacgatagcctttggcgcttccaaaagaactatccctgacaaatccagccaaaactgcgcagaaagtctctgttttcactgctccccgtcgtagccgaaggagcggatggtattcaggttatcgcgccagttttccttcaccttgacccaggtctgcaggtacacctgggcgcccataaaggtttcaatatccgcacgggccatggtactgatttttttgagcatctcgccgcccttgccgatcaggatacctttatggctggccttctcgcagtatatcgtcacatccaggtcgatgatgtcgctgctgttgcgctgactgaatttcgtcacctcgatggccacaccgtggggcacttcgcgctgcaggcaatagagaatcttttcacgcacgatttccgcgcacacctggctgtcgctctggtcggtggtcatgtcgtcggggtacagctgcgggccgccctgggcataccccttcagcgtatcaagcaaatcctccagcccttcgccggtacgggcggaaacagggataattgcatcgaagtcataagccccctggtaggcggcaatcaccgccagcaaatcctcttttttcaccgtatcaattttattgatgaccaggatggctttttcaccgcttcgtttcagcctctcgatcaaaatttcctcaggtttacccacgtgggcaatgggttccaccagcatcactaccacgtcgatatcgctgaggctgttctccaccaccttgaccatatagtcgcccagccggttctgagccttgtgcagtccaggcgtgtccatcagcaccaactgggtgtccccggcgttcaccacaccgcggatacgagtgcgggtagtctgaggtttgttggacacaatggcgattttttcgcccaccagcgcattggtcagggacgacttgcccacattgggccgcccgcacagggtgatcatcgcttcttttgtaattggcatggttttatgatcctcaactttcctgagcaattttagattgtttctttccggtgtcattctccgtttttaatgaaatccgtcatcgttttgcttttcttccgattcccagttcctccataatggcttcctcccgcgcgcgcatctgccgcttctgctcaccctcatccaaatggtcgtagcccagcaggtggagcacagaatgggtaacaagataggccagctcccggcggttggagtgtccgtattcctttgcctgggcacacacccgctccatactcagcaccatatcgcccagcggcagaaggccggtggccacgtcgcacagcgccgcatcctcaggcgggcaaccgggagtgaattcaaattccggaaagctcaaaacgtctgtgggcatgtccacaccgcgcatttccagattaatggcgtggatgcccgcatcgttcgtgagcagcacgtccacctcgcaggggagagcaaccctttccagcgccaggaccgtgcggatagttttgcggatcagtgcgcagttgcgctcgctggacgcaccgggcacatcggccgtgatggggatataatgccgctttgtcatacgctcatcgccttacctttcccgccggtttgccgccgcccccggcacggcgcatttcgtcatcctcataggctttgatgatgcgctgcaccattacatggcgcaccacatcgtcctgcgtcaggccgcagataccgatgccttccacatcccggagcacccgcaccgcttctttcaggccactgactttgtcggcgggcagatcgatctgggtcacatcgccggtgatgaccaccttggaaccaaagcccatgcgagtgaggaacattttcatctgctcgcggctggtattctgcgcctcgtccagaataataaaagagttgtccagcgtgcgcccgcgcatataggccaagggagccacctcgatattgccccgttcgaggtatttattgtaggtgtccgcccccagggtatcgaacagcgcatcgtacaggggccgcaggtagggatccaccttgctctgcagatcgccgggcagaaagcccaagcgctcgccggcttccaccgccggacgggtgaggataatgcggtcgatgctcttttcccggaaagccgccacagcggcagctacagcgaggtaggttttgcccgtgccagcagggccgacgccgatggtgacggtatttttctgaatggactccacatatttgcgctggccgatggtcttagccttcaccgggcggcccttagcggtgatgcacaccacatctcgggccagatccgccactttctcctcctgccccgcccgggtcaggctgagcacataacgcacattctgttcgttgatcggctcacccttggccgacagagccagcagcgccttcagtgcgcgggcagccagcagcacgttctccgcttcgccggtgatcttcagctccccgtcgcggttcgtcaccgccacatgcagttcgctttcaatcaggcgtatgttttcatcgaaagaaccaaatacattgatggcctcttccatccttccgatgctcatcctttgttccaccatgctgaacaatctcctccggttttgtctattccgccagcgctacagtcatcccgatctgttcctcgcattcggcatgcagcgtcacagcataggccgcgccgcttttcttcacgctcagtgtgctgcttttcacgctgccgccctcttccatgcagtctgcaagctgccgctgcagagcttcgccggcacggtcctgggcctcctcagcgctcagcgcgcgttccaccggctcatattcccgcaccgtgacgcactcaagcgccagcggcgtagccacaccgcctggcaggcgcaggcgtttcatttttgttattttatcataattggcataggaaatgctactgcttggcgcgatttttatgcgctgttttccaaaaatcagggtaaacacctgttttttccgtccggtatacgctttttccactacagtttcgggctgcagggccgtcaggtcataccaggtgcgcgcccagacatttccctcgccccgggtgatataggcccccagatccccgatgtcagcaataccgctgatcagcagttgaccctccgtcacggtgcttcctttgctcacctcggcgtgaccgccatagagctgcaccagcgtcaccagaccgtcctttttcgccaccacattggcgtcagtgtgttcgtcgcgcagctccggcaccggcgttcgctcgcgcacgatcaccgttgcgcggaacccgttcacattcaccgtcatccaggacagctccgggatttccatcaaaatatgatttttcagcgtttccggatgaatgccaagcccaaaagtgccgtaacgcaccccctcttcctccaacgcccgcagaatacgttcatcggaaatcgtctcattgccctcgatctcaaaatcccaaacgaagaaagatccaataaacagcaatcccagagacaggatcagtcctgccagcagaaaatagcggcgccggaagcggcccacaaaaaaaggaacgcccgtttttttctccacagaaatgtcgcagtcgagttttttggccaggcggcgcaaccggagatagctcttccggctcaatttcatggagaaacaggtagggctgtgccacgccatgtcccaaaaggccaagccatgagccgaacacaggttcagcacccgttcgggaaatccgctttccaccgtgatagccaccgtgcccgaaagcaggtttacaacattcaggaacatgtttcacctcgtcagttcaatcccttcaatagtcccaccaatgcgcatttcgtcgccggtcatggacaacagctgcagtccccgcccccgcacacgcaccagcagcgcgccgcaattcacatcaatagctgtgtcactgtacgataagatcccctgatggtgtgaaagaaacagctgccggtcccccagcagctccagattcggaaggcccgccaccacatccatgggcagatccagcagctcggctgtttttgtcagaatatcgctgtcttcaaatcggttcatgtcgccactcctttgcttgagctactgtatgcagcaaacgggcggctcttgcttgtccagcgttcattttttctgcaggcacgtcatagagtgagcaagaccaatttgcaaggggggacaaaaatgccgcgatcttcacacccgccgcaggcgcggcaatggttttttcttctgtgtgcgctgagcgctgcgctgctgctgcttcgtcccgccccggccatggaagctgtgcgggaagccctgcggctatgcagcgaaaccattgtgccatccctgtttccttttctggttttctctgctctgctgacggcgctccttcccacggcagcactggatcgggctctttccccactgatgcggcccatattccggctgagtggagactgcggagccgtgctggctctgggctttgccggcgggtaccccgtaggcgtgcggacaacggcagcgctgtaccgtcagggcacactgcgtcgcagcgaggcccagcggctgctcgcgttctgcaacaactccggccccggctttctgctgggcgtggtgggcatcggtgtgttcggctccgcctccgccggaatgcggctttatatggttcatattgccgcagcgctgctggttggtttcctgttccgtttctatggtggctccgacccgctgcgcacccatggcgccaagcctgccgccggcccagacgtgccgcccctggcgcagcttttcaccgaagccgtcaccggctcgtttttggcagtgctcaatatctgcgcctttgttctgttttttatgatcgctttacgcctgctttccctgacgggcctgctgcatctgctcgctgccgctctggaagcggcgctgtctccctttggcatgacagagcatctgtccaccgctttttttgcggggcttcttgaactatccactggcgcagcctgcatgcagggcgcgccgctcacccccggcaccgccgccctggccgcctttctcctcggctggggcgggctgtcggtacactgtcagagcctgctgtttgtattggaaacagacctttcctgcaaaccatatttcgtcgggaaatttctgcaggggcttttttccgccgtgttggcttttgcattgttcaccgttttcccctgtggataaagcagagcggaacacagcattttctgtgctccgctctgctttatcttttttaagaatcgccccggtagatattaactcctgtttccccgtccacatctctttcttttctcagagtgtatgcgccggcactgcacagatccatctcacagcgcctgccacccgttgtgaatcccgccagcgtcacagcctgctccgccgtcaattattcggtataatcgatcacccgctccatctgcctgtcgatggcagtctgttccggcatggcagtcggcccggatacggcccaggtatcgcctgttcccttgtcctccggcggcgctgcagcgccggagcggcggacgtcgcagtactgctcgaaccgctgcgccgtatcctgcaccgctggcggcagagcagaaaggcgattcagtctttccatccagtctctttcgtcatcggatgcttctccagcgcacgcttcgccggctaaatgccagagcacagcactgcgccggctttgccccaaagcggtaatttcccgcagcaccgcctccggagcagcgcacagacggctatagagctcttccgccgcttcctgcgcaaacgcgcccccggccccagccagggcccacgccacctgttcgtggctccagccggaaaggtctgtacccgccggcgtatccgccagcatgcttaacgcgacaaaatttccctcgcactgccggacgttttcctcgcggtccccgtcccggtactcataaaaaatccagcttccattgggcatgatattccatccgccgacgcgcccttcataaaagcaatcattgttgaacgccttacagccataccacacctccgcctgacggcaaagggtttccatcagtgtggcaatccccgcaccggacgcttccgcggtttctcttgcccgctcagaacatccggacaggtcaaacgccgcatcgcccaactgcggcgtttcgcccacgctctcgctgcccaaatacataaattggccatcccgccagagatagtccgtccgcaaggcgcacggaatgccgaaggcagctaccgcgacgccgtcctcataatccgtcccatggagcagccaggaaaaaaggacatttccctgcagggtttccagcgtatagcgttccccgctctgctccacactcagcacttccatagcaaaaaacgacctggtattgatccagtccagatcctcgctgaacccggtgtacgcccattcccccacggccagggcctgaatttagtcctgggtcagccgcccggtatggtcggtgacaatggcgaccggctcctccgccgccaggacatcgcttcgtgcgccgcccgtgccgcagatcaccgccatgacaatcactgcggccgcagccaacaggagcgctgccggcctggcattgcgaaaccgcagcacattctgtacccgctcttttgtgccgccctcggtgaacgataccggattgagccagcggaaacgccggtcataggccagattcagcagtgtctggctgtaagccgtccgctcctgtatacccagtgtgcgcactgcctgttcatcgcaggccagttcaagctgcgtgcaatatacatgatgcacgccccacaaccacgggttgaaccaatgcgctcccagagccagccaggcaatcagcttggcccaatgatccccggcacgcagatgggcacgttcgtgtgccaggatatggctccgttcctcttcgttcaaacggggcaccagataaattctgggccggaaatacccggctacgcagggcgagggaatccggtcgcacacatagacgttcccctccagtttcaccgcaaaacgcagtctgtaccgcaggcggagatacgaaagcaacgttaatccgtaaaagagcagcataccgcttagccaaacctttgccaacaccggtacccaggtatccatggcccggtcggccggccggatggcgccgtccatctcctgataaaagaccgcttggatggaatccggatgatccggaagacccggttccggcacaacgcccgcttccacagcgcgctgaaacgcctccgtaccctccaccgcaatttcatatatcccgctgggtccgtccaccggcggcatggcttcctgctgcactgtctggataaaaggcgcgttaaacaggctccaatcggaaggcagcgctccgggaaacaccatccgcagcagcaccagagcaaacagcaggtttgaaaagcgcttgggtacatgcagtgcatccagccccaacaggagcagcatcaccggcacggccacgatcagcgccgtgatcgacatccagcacacctgcacaaacacttcgctcagcaccccgctcaccccttccggtgttcgtcgatcaatgcctgaatctgtttggcctcttcgtcactgatcggccggccgcccataaaggccgccaggaacgccggcagggatccgccgaaagtgcgctccacaaaggcggcgctttcctccgcctgtacatcctcccggggcaccagcgccgtgaccacagcgttttcattgcgcaacagccccttttgagccagtttttttaccatggtgtaggtcgtggactttttccagcccagctgccgggcacacagggccaccagttctcccgaaggcaccggcgcactgtcccacaccacattcataaaccgatactcgctgtcacacagcttccaactgtccatcccccctctttcactcccgctccatacgcagcaccagcatgccgcacgacggacacaccgccgcccggacgccgccttttttcgcgattccccgttctacacggatcgtcccataagtattggccctgagcacatagccttcctccatcgccttccggcactgcggacaaagttccattgccgcatctcctttctgaaaccgcaagcggtcgattattgtagacttcatcttgagtctataacaatcgaccgcttatgtcaagcgtgatttttccgctgtcccgcttattccagatcctgcgcattcattttgttcaattcctttcgccgccgctgcgcatcgcggcaggcaaagtaaatcgccagcagcactgccgttggaatattgcccgcaacaaacacactgatcagcgcaccggccgtctgccacagatcccccgtatgcgccacattcagcatcataacaagcgaagaaccaaacgtgatgatcggcagtattcgtcccgcccatttgttttctctgcgggaaagaaaaatctgcaaaaccaccatggccaccaaaaacagcagaacgcccaccagcgcaaacgtcatgattctcatatcgattcctccttgtgcagtttcttgtattcgtggatcaaaagctttgccgtatccacatccattttgtcatttaccgtcaggcgtttgatcagcgcaatatacggctccgccgcagtatgctcgctgatttggattttctggatcaaccggtccaaccgcagccgtactgtgggataggtaacgccatactgccgtgccacctctttaagcgacccggacgccagcagaaagcgccggataaacgccagatcctcctcttccaattctcccatccactcaggaatgatttctatggccactccccgcacgctcctttcactatatttagtatatactttcattttattaaagtcaatactataattgtagttcaataaaatctcaaaaagcgtcatacggttcatgcagaaaagagcggcccgtttttggcaggccgctctttcgcatatagtttcattccattttgcaatatataaaccaataattacgttttggatttctcttttgcggttttttgcgcttccagctcctgtaccgccctgactactctggacgtgcccaaccggtctgcacccaaagaaagaaaccgttctgcatcttccagagaagcaatgccgccggaggccttgagtttcagccccggacggatgtgcgctttcagcagcgccacatcttcaaatgtggctccgccgccgccaaaaccggtggatgttttgataaagtctgccccggagctggaaacgacttcgcaaagctgaagtttttcttcttcagtcaaaagacacgtttcaataatgacctttaacacatgctcaccgcaaatgcctttaacggctttaatctcttcgccaacccattccatacgcccgtttttcgcccagcccagattgatcaccatatcaatctcttcggcgccgttttgccgtgcgtcctgcgcctccaggcacttcatataggttgtgctgtagccattgggaaacccaatgacagtacacaccggaaggtttccgttgagatattgtgctgcgttggccacatgggccggcgggacgcataccgtcgccacgccataacgcactccttcgtcgcacagcgctttgatctgaggccaggtggcctcaggccgcagcaacgtatgatccactgttttcagaatcgcctgaatatccatggttttttctccttttcagtccgtttcccgcagcaatactgccttcaattcctctgccgttgcgcatacggccacagcagaggacgcttccagttctcccggcggagcaaaatcaaaaaaggtgacgccaatacagggaatgccgcactcctccgccccttccacatcatatttgcggtcacccaccattaccgtctgtttctgtctctctccatcgatccccaaccgggcgaaggctttgcggatcacatcggttttcgcttcgcttttcccatcgctgccgcaggcagcgtccaaatagggctgaaagccaaacttctccacaatgggcaccacgctgcgctcaggtttggaagatgccacggccaacgttcgcccctgttccttcaggcagcgcatcagctccaccatgccgggcgccgctttattctctgcccagccaatggtttcatagcgttcgcggaacacgttcaccgcacggtgcgactcctgtgcatccatgccgcagtagcgctcaaaggagtcgtgcagaggcgggccgacaaagcgcagcagcgtttcgtagggcgggcagggccgtcccagtttatccaagctgtagcgcacactgttgaagattccctcccgggaatccgtcagcgtgccatccaaatcaaataacacaaagcgatacatactgtttccccgttccaaaaaaatccgcggccaaaaccgctcttgtattatatcgtatctgccttgttcaatgcaacttttttccacatcgaaagggacgcagggtatacagcaaattccgcctttcccggccccgaaagaatccggtaaggatcccagacaggctgcttgaactgcacaaacgtttgaaacagaacagaacgctttctgcagctaaagaggtacagccttcatcagtttgatctgggcgtttccggaatgtgccaaacgcaaagcggaacggctttgccatggcatccttgtatggcgtatctccatttactgtcaggccgcggcttccgctgccgccggagaggacggacttcacctgttccgcaaatcgctccatctgttttgtcgcctgcatctggtctcccggctgcaagcacttccaagaacgtatgcggcaccatccatgcagcggccgcaacaccaatgaaactgttgctttcgcacaaattttttcttccagaaaggcatcatcacacccctggttgccatgactcccatggtcggcatccactcgaattcgtccgcccagtgtcctgtaggggacccgcggatgccctgtcagcggcctataaaaaagcaagcggcgagccgctgaattatggaaggaattacggtgcaaaaccttcgggaggaccaccgcgccggatacgaaatccgacccgaaattacgccttggccggcttgttaaagtcccctgcaagtctacatccagcagcaggactttctctcccttacggtaagtcccacaccaatcatgatcgctatacaacaaccgctgcaaaacaaacaagaccgatattgttgatattttttcggagacggaacgtccaaattcaaaaagggggttccagaatgtcaagattatattgagggttcgggccttgaaacgctaccaattccggaaaacatgtatcgcagatttcttgactgataatagcctgccctccaaaaatgcgaaagac

SEQ ID NO: 297 - DNA, 3975 bp, Unknown
  16S sequences of unknown bacteria
catattatatgaacaaaatatgtacaaaatgccgattttactaaagaagttcacagtctcgccgtataatgcctccccgacaggaaatttttcaggcggggttttgcagtgcgcgcaaatatgttataatataatattatacagacaaacccaaagaggtgtgtgttttatggttaaaatcatcacagacagtatctgcgatttggatcctcattatcttgccccctatgacgtggacatgatgccgctgcgcgtccggttgggcgaaaaagaatatcttgacaaggtggatatcgactatctggatgtatgccgtgccatggaacagggcacggtacccaaatctacccaagtgccggcggatatcatgtctgatacctttgaaaaatatgccgcagccgggcaggatttcatttacgtggccttctcttccgtactctccggctgctgcagtctggcggaaatgatgactgccgaactgcgggaaacctatccggatgtccatatgggcgtcatcaattccaaagccggcgccggcggtatgggcctgatcgtactgcagctggcgcatatggccaaagctggcgcgtccttcgaaaatctgatggctcacggcgcttacctgtccgagcatgttgtccacatgattgccctgcgggatctcaagtggctggtgttgggcggccgcatcaacaagctgctgggcgccgccgccggcgcgctggatgtgcgtcccttggtacacatcgacaaggaaggttatctgaaagctttcggtaccgcccggggccagaagcgcatggtgcagaccatctgcgacaaagctctcgaaaaactcaaagctttcccggaacagttggtggcagtctgctacacctatgaacaggaaacctgtcagcaggccattgcctatctcaaggaaaaactgccccagatcaagatcgtcctgcagcccgtaggcagcgtattgaccacctatttgggtctatccggcgtgggcattctgttttttgacgaacggccccgggaatactatttcgactgagaaagcgaccaaatgccatggcaaaacgataccagagcaaaaaacggggctgtgcggcgccttttctgctgtttctctttgcgctgatttttggcggtttatttttgtattggagcaacaatactatcctggttcatgaagaaaccatttcttccccgcagctcccggcggcctttgacggactgcgtatcgcccatctgtccgacctgcacggcaaggaattcggcagcggcaattccttactgcttcaggtggtagaaaatgcccagcccgatctgatcgtcatcaccggtgacctgatcgaccaggaaagccaatacgatgccctgccggcgctgatggaccgcctcaccgccatcgcccctacctattacgtcaccggcaatcatgaatgggctgtgcgcaaagtgaacgtgctcaaagatctgctgcgcgagcacggcgtacgtgtgctcagcgacgagtatgaactgtggacccgcgacggcgccactttggccgtggcgggcgtggacgaccccaacggccctgcgggacaaaaaaccggcccggaactgcgcgccgaaatcgacgcggattacacagtcttgctgtcccaccgggacactgtggaggaatacgccagctggggctacgatctggtcctctgcggccacggccacggcggcattatccgcatcccaattctcgaccggggcctgatcagtaacgatcatacgctgcttcccaaatacgacggcggactctatacgatcggcggcttcacctgctgcgtctcccgggggctgggcagcaacaccgtgccgatccctcttttccgcctgttcaatcgccccgacctgcccattatcgttctgcgcaccagcgcctgaaggagggagattccctcctttcccttttctccgcatttcatatcgccgttacatacagagaggaatgttatatgcaagagtttttggccggaacctttgatattgccgtcatcggcgcgggacatgccggcgttgaggccgctttggcggcagcccggatgggctgccgtgtggtctgttttaccattaatctggacgcggtgggcaatatgccctgcaaccccgccatcggcggcaccggcaaaggccatctggtgcgcgaactggacgccctgggcggtgaaatggcccgcgcagccgacaaagcctgcatccaataccggttgctgaaccgcggcaaaggccctgctgtccactccctgcgtgcacaggcggaccgccgccgctaccaggaagtgatgaagcacactttggagcagcaggaagggctgagcctgaaacaggccgaagtcattgatatccgcaccgaaaatggcgccgtgtccgccgtagtcacccgcactggcgctgtttatgctgtccgtgccgccatcatcgcctccggcacctatctcaacggccgcaccatcgtgggcgaaactgctctggaaagcggcccggacggcatgcacgcagccacgctcctgacgccgcgcctgcaagagctggggctgtccctgcgccggttcaaaaccggaacgccgccccgggttaaccgccgcagcgtagacttttccaaaatggaactgcaaaccggagacgaaaaccctcttcctttttcctttcagacgcggactgtaccggaaaaccgggctgtctgttatctcacctacaccaacgcggaaactcatcggatcatcctttccaatctggaccgttctccgctgtacaacggtgccattgaaagcgccggtccccgctactgtccctctatcgaaacaaaggtcgtacggtttgctgataaagcgcgccatcagcttttcgtggaacccatgggactggatacagaggagctgtatatccagggcttttcctcctctctcccggaagatgtacagattgccatgctccatacggtgccagggctggagcatgcggaaatgacccggccagcctatgctattgagtacgactgcatcgatccccaggagcttctgcccacactggaatgcaagaaagtgcccagactgtacggcgcgggtcagttcaacggctcttccggttacgaagaagccgctgtccaaggttttgtagccggtgtcaatgccgcgcttaagctgcataatcagccgcccctgattctctcccgcgccgaatcttatatcggcaccctgatcgacgatctggtgacgaaggggaccaatgagccataccgtatgatgacctcccgcagcgaataccggctgctgctgcggcaggataatgccgatgcgcgtttgagcgccatcggccaccgcatcggactggtatcggattttcaatacgaagctgtgcaggccaaatacgaagctgtaaacgccgaaatttggcggctggagcgtaccggcgccgccccgacagatgccgtcaatgatctgctgcgccgccgcggcagcgcgccgctctccgctggcatacccctgatttccctgttgcgccgtccagagctgcattatactgatatcaaggctatctccccgccacagccttctctttcccccgccgtagaagaagaagtggagatatcggtgaaatacgccggttatatcgaacggcagacgcgccaagtggcggaattcacccgcatggagcaccggttgctgccagcagagattgattatgaacgtatcttgggtctgcgtttggaggcccgtcagaaactcagtgcagtccgtcctctgaacctgggacaggccagccgcatttccggcgtatcgcccgccgacctcgctgcactgatggtatggctcgacaaagaataattcaactattttgtgctgtgtgagtctgttttctcacacagcattttttctcgcttttccctctgtttcacctaaggggtgcatagcacctctttgaccgcaaagcaaaatccccgga

SEQ ID NO: 298 - DNA, 32759 bp, Unknown
  16S sequences of unknown bacteria
ctgtatgggaacgatgggaatcggacgtgggcacggatatgcactctttcgatcatcccatgttcgccgcctacgacgggtttctcttcaactatctggcggggatccgcacgaaagaatgcgaaaatgcctttcagaagatcgtcgtcgagccttgtttcgtaaagtgcctgcaaagcgtttcggcatcgctcgaaacggtccgcggcaaaatttccgtccgttgggaaagaacgggtaaaacgatcgtgctgtccgtagacacgcccgcgaacacgcggctcgtcgtgcgcgcggcgggcaaagaactttgcatgaacgggcgttcggtccgggacgggatcgaacttaccaacggtaaatttatcatagaaataggagaatgcgatgaaacgaatcaaaaagtggtcggcgcttgcgatcggactgctgacggcggtgtgtatgatggtcggctgtaccgataaaggcgcgggaacgcccgaggatacgttcccgtactatccgcagaggacgcagatgaaagaggacgggcagtactacgcgcccgaaggcgtagaatttcccgcgtcgctgtggcagacgcccgcttccgaacgatatgaagcgctcgacagaggcgagatcaaggcgtatttcattcagtccgtcgacgatacgaaagtattctgctacgtgggactgcccgaaggcgcgagcgcggaagatcccgttcccgccgtcgttctggttcacggcgcgctcggcacggcgttttacgactgggtgcgcgcctggaacgaccgcggctatgccgccgttgccatggatacggaggggcgtatgccgaaaaccgatacgtctacctacaacgccgtatatgaaacgagcgtcatgccgcacggtcccgccaacgcgtcgtttaccgactgcacgaaaccgatcggcgaacagtgggtttatcacgcgctcgcgtccgtgatcgcctcagccagttttttaaagagttttgcgggcgttgacagttcccgcatgggcattacgggcgtttcctacggcggttttctcacctgtcttgcggtggggtatgacgaccgttacgcctttgcggcgcccgtttacgggtgcctttccaacgcggaaggggcgggcgaattcgggagttatatccgcaataacgaaggcgcggacctgtgggacgatacgggcgcgctcgcggcaggcaatgcgccgattctgttcgtgaacagcgatacggacacgcactttacactcgattcgatggcgcggtgcatccgcgcggcaaagtacggcgcggcaaccgtcataccggggctgacgcacggtcacgcgcagggcgccgaggtcagggaagtgttcgcctttgccgacgaaatctgtttgaaaaagacgccgctcgtccgcgttctgaccttccccgaaaacggcgagatcgggatcgccgtgcccgaaagcgtaaaggtttccgaggctgtacagcgctatactctttcggaaaccgtcgattcgtcgaccgagtgggcggaagaaaaagccacgctaagcggcggatacgtattcgtttccgcagaaaaatacaaacggcattattatatccttcttcgcgacagccgcggtttatatgcggcgagcgttctcgtttgaaaaaacaggatcgcggggcggcacatttgccgccccgcttttcatattattatagtaagactttgattacataacggtatctctctttgcgtgcggagggcggtattgttatgtaatttttttgaggttcataaataatgccaatcctacaacgatattccaacattaaaaacggcgggatcgtgttgatcggaaatacgctcgggctgagcaaggctgccaatgcgaacgcacccggcacgctcggttccatcggtgcgttcgtcagtttagatacgtcgctgcaagtgggcgcgtttcccccggggaccacgctcgattacaccaaaaacagttcggcggcttccctgaatcttcccgcaggcagcagcgtgctgtatgcggaactgatctggggcggcctgttccgttcgagtgtcaacaatatttccaacctgttggataacgccgtcacgtttacgacgccgcagggcgtcaattcgatcgtccccgacacgcagacgcggcagaatttcaacatcaccaacgacgggcagaccgtcggtttttacgtgcgcagcgcgaatgtgacttccctcgtgaaaacggcgatgaacggcacgtattcggcgggctcgatcccgtcgctcatcgaggcgatcgattcgcgcacctcggaaaccaaccacgcgggctggactttggcaatcgtctacgaaaatgcgtcgctgcccctgcgcgatctcactttatggggcggcggcacggtggtttcgccctcttcgggcagcaccgacgtgacgcttaccgattttatcacgcccgacgcccttcccattgcgggaaaactgtttatatccgcgcaggaaggggacgcggtgctcacgggtgacagaatgctgttcgggccggattcggcttcgctcacgcccgtatcggggccgaacaaccccgtaggaaactttttcgcctctcagatcaacgattcgaacggcgtactggatacgagcgggacgttcggaacgcgcaacgcgaacgccgctgcgggcacgaattcgacggcctgccgacagggctgggacatcacggcggtagacgtttcgtcccttctttccgcgggaatgacgactgccgccatccgctttacgaccgacggagatctgtacgtcgccaacgcgctcgccttgcagatcgacagcaaaggcgcgcagctcatcgtgcaaaagagcgtcgataagaccgttgcggaagtcggggaagccatcggttacaccttgcagatcacgaatacgggcagcatccgcgcggaaacggtgaccgtacaggatcttcttcccaacgaggccgaactgatcgcgggctcgatcaccatagacggggttccgtacggcggcgcgctgcccgtgactttcgggcctttgaatgcgggcgccacggccgtcgtcaaattttccgtccgtgtgaattctttgcccgtttccaatccgatcttcaatatagcgcaggcggattacacctttatcccgttcccgggcaacgtggtgacgagttcttccgattccaattacgtcgccgtgtatatcgtccgcattgccctcgacgtcgtcaagagcgtggataaagcgtatgccgtcgcaggcgaaacgctgacgtatacttccgtcgtgacgaatcacggaaatctgcctctcaccaatgtgcgatttaccgatccgattcccgcgggaacgagttttatcgcgggttccgtcacggtaaacggcgtttcctttcccgcttacaatccgtccgtcgggtttccgctgccgagcctggttcccgcgcagagcgcgattgtaacgtttcaagtccaaatcaatccgtaggagaaaaaatacaaatgatcatactcaaccaatccaacgtaacgttcgattacgttttgcccgaccaatccacgcagagcggcgaacaaaacagcaacgtcgtgcaaacggaagtgctctcttcgtctgtatccaaagtcaagagttcggataaagcctttttgaacgaaggcgaaacggcgcggcagaaagtcgtcgtcacgaacaacagttcggcgtatcttgccgcactgatcttcaaagacatcatgacttcgggcgcaacttacgtcgcgggcagcgtggcaatcaacggcgtggcgcagccttcgtacgacttgtccgcgggcttcccgcttcccgatctgcctgcgggcggaagcgtgaccgtcgaatacaccattcttgccaataatcccaaaacggacaattccgttaccaacaacggcgccgtcacgtacacggtcaacgatcccgtgcgcggccccgtgacgtataccgaaaacaccaaccccgtcaccatcgctctgatctctacccgtatgagcgtggtcaagagcgtggataaggcgtacgcggtcagcggagaaattctgcattacacttctttgatcaccaatacgggcactctgaacaaaaccaatctcgtgttctatgatccgatccccgcgggcacgactttcgtagcgggcagcgtgaagatcaacggcgtgtcctatcccgcgtataaccccgcggtcgggttccctctgagcgatctcgcggtagggcagagcgttacggtagaattcgacgtaaaggtggtgtagcgctatgaatacgatcgtcaacgtatcgaatgtgacggataacgagggcgtctattacagcaaccccgtcacgacgctcgttcgccgccgtccgagatttacgccgtattactatccctgcagccggagttgtcaggattgctgcgactgctgttgttactgtatgttttgcgatttttggttctgagaaaaagggaagcggttgaatttcaaccgcttctttttttgcatcgtgacaaggataaattttggtaatacattccataagtgattattcgtgaaataattgtgaaaaaacatggaaactatttgacaaaattgtaaaaataaatgtataattaaacacaaactagtagtgtattcattttaaaaacaaccggttgttttttcgttttcttgcgttgcaagaaaacgaatgatattgacagccgaaatatttgttcgacagcaccgtcaacatccccggggcgttcccggcttttttgttagacgtaaatattgcaagaggtgtttatgaaaggagtcatccataagattctcatcactcttttggctgtttcggcgctcgtctgcgttgcgctcggaatcgtagcctgccagcggcagatcaaggattccgtgaccgtcactttgatcagcgagacgctcgaaaaaaaagaggtcgaggccaagcccggcgaccctctgcccgtgctttcggtagaggacagggatttcgaggggtactggacggacagcggctatcaggtgcgctatgaaaacgacgtcgttcccgacaagaacgtaacgctgtattataagttgaatctgcagtattacaatctcgtgctcgactacggaacgagcggacagttgcattttcaactccgccgcggcgtcaacgaaaaactgcccgatatcgcgcccatgggctcgcttgcggtcggattttccaagacggaagacggcgaggcggatttccttctcggcgacactgtcaaaaatcttgcggaaaaaggcggcacggctactctctatgcgcgttatgaagtaaaggacgcgggcgattataccatcgagaacggcaccgtcgtcgcatataacggcaagagcacctctctcactctccctctgggggcgacaaagatcgctgccggagtttttacgaacaataaaaacagcgaaaaggtgacttccctcatcgtgccggcaacgtataaagagatcgcctgcggcgctttcgaaggcttgaccgcgttagaatcgcttaccgtgccgtttataggcggcagccgcacggcgaaccgctttttggcgtacacgttcggcgcaaagaaatacgacgagaacacctattctttcgcaggctataccgacggctcttcgctctatatgggggaccagcatttcgaaaatcaggtcctgcccctctctttaaagacggtgcgcgtcaccgaaaagacgaaggaatttgccgagggcgccttttacagtgcttacgctctcgaaaacgttgtgcttgattaccccgaggcgttggacaaggtcggcaaatccgcctttgaaaactgcatttctttcggctacaatgccgcgctcagtattgcggtcagtcccgcctggttgcgttacgttagcacgatcggcgaagcggcgttcaaatcctacacgggcaacaccgaatcttccgtcaaggtgatctatccttacggcgaacagttgccgagttacaccgcaaccctgattacatacgcttatcctttcaacagtttgaaaaccattccgaaactcgacaatatcgtgagtgtcggaaacgaggcgttctattttgccgccgcgttggattccttggaattcggcaacaaattgaagaccataggcgagcgctcgttcgcctatacgctctccgtttcgggactgaaatttcccgattcgctcgaatcgatcggaaactttgcctttgcgctcaacggcgcgctgaacatcgaattcggcacgggcatcacctacatcggcgtcatggcgttcgaggaatgctccaacttgtccgaagtcgttttcaagggcacgcaggttcccgaactcgacgggaaacagtgtttcagcaatactctgaccgataacggttcggatggctataatatcggatttgacagtttccgtatttacgtgcctacggccgcggcggaagagtacctgctcgatcccgactgggcggaatacacgtcctatatttatacggcgacaggcagccgcgcgcctgcctattggtcgaaagacggttcctcgtgggacgcgaaattcgaatttaccgacggaagcatcgtgttcgtgaccgatcccgaacaaaaattcatttcggaaatcgattatctgaatttcggtgaaatgacttacggcgcaacgtgcggtacgtattatccgatgatgtacgaattcatcgatgcggaaacatatgcgaaaaaggcgttaggcaagaacgcgggcacgcatgccaaagaattatacgaaaatcagacgcttttgcatctgtggcatcccgaactcgtcagttacgacggcacggtcctcgacgatctgtattttatgatcagcgatcttccttacggatatgagggctcccgcgtcgctttgcccgtactggaaaaaacaggctataaaaatgccgatttcggcagcgctactgcggaaggcagttatgtgataggcaccaatgcctacggagtcccgcaactgaacaaagtcatgagagacggcgcgttctattacctcgacgcgattcccgatcctgcggggacgttctattcccgcatgaccgacgacgacatttcctatactttcacctatttcgacaaagattataaggtgatcgacgaaaaggttttcgtccgttataatgatgtgacggcaagttggtcttcgccgatttatccgaaaagcgaagactacatgacgttgcagaccaacgcatattataacaattccaacgaattgtatctggatggcagaggcggcgccatcgtcagtatagaaaacgggaaagtcaaatataattgttcggtcatcgaagattcgcagaagaaattcggcgaggaaggatataccgtacggcttgttcaattcaaatccgacggtacggcggtatcggggctggatggcagtgcggttttccgcgactatatgaacggaaactattcctgtatcgatttaacggtcggagagttttcctataccatactgaacgtcacgtatgattccggctggtatcgttatacgtatgattacgtatcttccgtaaaaatccatatgccagaatacagtaccgacgtaaacgatgatttttggcgttatacccgcctttcgaccgtcgaggttctcggaaatatttctatctatatcgtttcttttgacgagaaagaaacgatcgcagcggcgtattatcgcgaatacgatgaagtcaataatatgatatcgttcggcacggtcgaatacggcgcaggcgcggagttttctatcacggacagcgacggaaataccaggacggcgcaaacaaaggataatcgcggttcgtttaagatcggtgaaaaaaattatatccgctacgacgattcggaagacatgacgttggtcctgaccgaaaatttctacggcaccttgctatattactatacggtcaaaacggacggctacgggaatatgtatattctcgacgagcatgacgacgatatctgcgatatgtatgtgggcacgtacgacgactataacggttttgtttcaaacggggcttcttattacgaactgatgttcagcggcgtaaaagtggataagaaaggcgagcccgtctcggatgaaacggtaaatatgtggatcctgtatgatttcggaacgctttccgcctggtcggacgaggacagcgatgcgcaatggtacggacagatcgcctcgatctataccgaccatgaggaaacggtggtcagcgcatatgacgatttcggctataaattatttgacctcaccgtagatatttacggaaacaccgagtatgtacagtattcttatgtgctcgatatcaaaggcaatgtaacttataaggccttggaaaaaggcgatgtggaatattttatttccgttaccaatgcaaccggggacgtactctattttatcgctttcgattcaaacggcaacgcgatgtatagcattcgacgggaagaggggagcgatcaatttgtgatcgtgcgtgacggaggacagtttatcgagtccggcgtacgccgctacgtagtcgtcgaaacggaggatctgaaaaaactctccgaagacggcgcctctttcggaaaactgtaaaagcagcgcgataagccgcgcttgtgtaaatcctgaatctttaaaggagagaataaacgatgaaggtcaaaaaaatacttctgagattgctattgtgcgtgttcgtacttgccgtactgtttgctgtggcggcgtgcgaacccgccaaaaaagatgacggcgacaaaatttcgtctatagcgatcgaacccgcttcggcggctttgacggtaggcgaagaactgaattatgacgattttgaaattaccgtgacttacgaagggaagaaagcacccgagaaggtcaaacttacggccgcaatgatttccgaagacgacaaactttcattgtcggagatcggaacgcattcgcttaccgtcaactgtatgggcggcacgacgactctgcaagtaacggtcaatcctctggcaatggacgtaaccgtggaaaacgcctccgcggtttatacgggcgagcccgtccttccttcagtgaaaggcgctcccaaggatgcgaagatcgaatacaccgtttacagcggcacgagcgccgttgaagcgaacaaagtggacgaagccgtcgacgcgggcgaatatttcgtgcagatcaaaatcagcgcgaaaaattacgctaccgtcgagaagactgcgacgatatccattgaaaaagcgcagttcgacgtttccgaactcatctggtcaaacaccggttatctttatacggggacggaaatacaacttgcggcaacctgcgaagggatgcccgaggggatttctttaaacaattttaccgcgaaggataatcaggcggtcaaggctacggaaaaaggctattatgaggcgaccgcaaactttacgggttcgaacaaaaactatacgctgacttcatgcgtccttacctggaggatcctggaagcgagcgcagtcgatctcgaaccctggttcggtatttcggaaggaactttgatttccgcggttttcgataaggatacgtttactttcgacggaacgacgagtaattacgaaacgttcgaatacgatgcggacggcaacgccgtcatacccgttgacggctatatttccgttaccgtaaagggcggcgttctccgcgtacaaaaagcggatcgtacatatgcgcttgtttccgaaagcgcgctggcgcgttttgcggggcagtattccatgttggtcgaagaattcgaactcgttttcgataaagtaaacggcacggcaaacctcgtttccaaattgaaaggacaagagtccgtcactcgtcccgtaaccttaacggtagcggacgaaggcgacgtggaagacgccgtgatcgccgtggaaggcgtcgattgggagttcagatacgacttcgccgcgaaatacctgcgattggacaactatgcaaatcccgccgatttcaatgtgatcgatacggacggcgtttaccttgcggccaaagaagaggcggacgcatacgtcgcaaacatgcctgtcggaacgttcgtgaattacgataacaccggtacgataacggcaaatgaaaacggggaaattttctataacgggtatcccgtcacgatctattgctcgatgtacaacgcttccgttcaatgctatatttcctataattccaacaatcgcgaacagaattttgtgatcgataaagattatttccaactgagcatttataaatatatctatcttcctcaggattacagtcagttcttcggtatttattatctgaaagataacgacggtctgcacagcggcgataagatttctttcatggaatattcgggacaatattccgtaatagtcggttccgtcacttacgattatctgaaagggcaggtcaaatttgtactgaacggagacgttctgaccgcaacgttgacgagagaaggcgaaaccgcttttgacgttgtgtttacggacggtataaccgttgcgaacggagattccgaattcctgaaagtacagagtctgatagaatatgcaggttatgcgggcaaatatatttatggcaacgcaaagggcgaacacctttcttacgacaatcaaggtgcgtttacgctcggcggcgagactaccggcgattataccattcagaaaacggataacggtacgaaattaacgctgaatttcggcggcgaaacgcgtacggtcgaatggggcgcagataaccgttacctgaccgtgaacggaaacgatctgttcgtttacagcgagatggcgagagatacggacggcagaacttccggcatgaattacgtttcgggggatgacgtcgtaaaattcgtcgacgatacttattttgtcaacgacgccccgttaacagacctttcgttctctttggtcgacgacggcaatgaaaacggcagaaacgttttgcaggtgaaaggcaaactcggcgcggtcgagtatacgatcgtgcattattcgcaggcggtactcaaagtaaacggcgaagtgtatgtagcggaagtgttcggcggcatttacggcagcgaattcaagccgacggttgattccgaaaacacattcaaactgggcgcggacggaaaaatgatgttccgcggaaaagaaatatttgtctattccgcaaacacctatacgcattttgatttctatcaggattcgaaattgtattattattccttttcggtaaatgcgacgaatattacatttaacgattccatcgtctatgaagttccctattattttgcggcgtttttcgattttaaaggcgcatatatctccgcagacggtacgaaagccttctatttcgcggaaaaaaccgtttattatgacgaaacttcatccacgtctttcagcgtcatccctacggagagcggcgcaacgatgaaattgggcgatcgtaccgcaatatttaccaaaaccgcccaaggcgttatttctttggtttataacggaatcacttacaatcctgtatctttcgacctgaacgatattgtcggagattatatcgtctataacggcaattccggcggcattaaaatgagttacaatccgaatgatacctcatattatgcgcccaaactcagtaaactgatcgttcggaacggcgagatcacgcctgtgatcaatttcaactacggcgacaatgcatatctgatcaaaaataccgatggcgccacggcggcgaaattgccttaccttgccgtacaggataaatttgcgaacttgatcggctcggaattgtttaacggtaaaagtctttccattgccgtaggcgtgaccaccaaacccgacagcaccgatttgatgccttcgctcgtcgtgctgtacgacggcgaaaccgctacgctcgtgaaagaggattaccagaatttcagagtgacgttgggcgggaaagagtacttcttgcgcagcaacagcgattctgcaacgaaagatattctgccgcttctcgtattcgaaagttggtgggaagattatgacggcgaatacaaattcaacggcaatacggtcaaacttgaaatcaccgtgggcggcgcggaggatcagcccgccaccgtattgaaaacgacgttcaacggcgaagagatagaacctgcgttcgaagatataacgggcggtaaaatgatgacgtttactttggacggagttacgtataagggcgtcatgagcaaaacggggtctgtcaacgttgccgtatacaagacgtttgaatatgatttcttctataccgaaaactttacgaatacggtagagggcaaagcgctttccctgcctgttgtgatatccggcgattttgcagagtacgtgaacggctatgcgatcaaatttgatctgacgaatgcgaaatacggcgaagagagcgttatctatgcgcagtatctctataccgaaggcattttgattttcgaaaccgcaacccagagttatgcttacgacattgccgcaaaacaattatatagcgacgttttgcccgaaggcagcgatttccgcggcgcagtgaacgaaggcgagtacggaagcgttctggatgacgtacagattctcgtccgctttgtgtcgtttgataagacgagcggaaaagccgttctcggtttctatttcgacgatagttatcgcggtacgaatctcaacctggcgacttctgtccgtgtaaacgaaaatctttataaactgacgggaaaaacggctgcggcagattccgtgaccgcatatctcgaaaaacaggcggacggtacgtttgttctctatacagagagcgaatatctctttgacggcgagtttaccgtagacggaaaaactcttgtgatcgagcgcagcattgccgcaggcgtcagaagttataccgcttcgtatgacggcgccgatgccgtggatatcaaacccgatttcaacgcaaattcctttactttggtcttgaacggaaaatattattacgtgacttggacgatcgaaaatgaaaaagtttctttcgcgcttgaagagattcccgcagcggtcatgcagttcgttaaaggaaacacgtatgtttacaatacgtattattcgtatcatgaaacgatgatgaatattacttttgcgggcatgtcgggcgaaggcgctctgttcaatatcgaatgttccggaagcataagcggaacgtatcagggagtgctcagttcggacggttcttatattttagcgacactcagttattatgcttatcgtatctatttaaatcctgtcgatgatttctatgtagactatgttctcgtttataattcgggtaccaccgctaaattcatgggatcgcataccaccgaggacggcaaagaattgacgattttgatttcttctgaatcaatagaggacgacgacggttttgccggattcaacgcgccttcgtttgtcgttacatatgacggaaaatcctgtacgacgaccgcgaaatacagcgactatatgtcttctcttgaatttaacgtagacggcaagacttacgaggcgaagatcgaaaacaaccagatgacggttacggaaaaaacggcggcgtaaaaccgcagacaacactcttcgataagaaggggaacgaaatgtaaagcgttacggcattgcccccgcggtccgcgggggcaaggatgccgtttcggagtcgatttttatgaacgaaaaacccgaatcaaccgatccgtcggacgacgggcgcacgattgccgatatgtccttcgattggatgccgtggaaccgcggtatcgtcaggcgcggcaaacgccgcaagcgcgaacgcgctgcccgtgacaaaaagacggaaaaacaacaatttcgcgacgcggtcaaagggcaatatcttgcgatgctgcccgtactattttgtattatcgccgcttttacgctcatttacctgttattgcggctttggttgaaatcttgaggtacctatgaactttcacctttcaaagcggaaaacgattctatgtctttttctcctgtttctttcgtgtcttgcgctcgcggcgtgcagcaaaacgtttctgcccgaggagcacggcttcaccgctctcgtcgtgtacgatgcgaacggcggcagtttcggcacttccgacacgacggggatcaagacgtataaatataaaccgtcggtatccatcatggaaccgggcggaaaacataatttgcagtttaacgcgccgagcatgtcctcaaagcatgtcatcgcgtggtttccggcccttctcgacgagaacggcgcacccttgaaaaacgaagacggctcttttcaacttgcggacgagccctgggatttttcggcggatcgccttcccgacgaggcgggctataaattgtatttggtcgcgaagtggggaatgaactataaactcaccatcgacgtaggcgaagaagcccgcaaagcgggcgtggaaaacatcgtcaatcagagttttaccgaagcaggtcctatttcgcagcccggactcaaccccgaatggaacggatatactttccactattattatacggaagacggaaaacgtttgagaacttctgaagattgggcgcaactggttttgaatgacgaaactcccgaactgactatttacgttcgctggctgacgggcaagtggtatatcgtcacttccgccgacggattatccgacatgggacagcgcaattatatccttgacgcggacatcgatatgggcggaagggaattcaagacgccgacgaattatcagggcacgttcgacggaaacggacacacgatctccaatttcgaaacttctgtcagacagggcggtcaggtatcgtcggtcggattgttttcctttgcgggcagaggctgcgtgaagaacgtgacgtttgcagacgcgacgttggcggtcacgttaacgtccagacttacgggcgtgggggcgcgtttcaatgtgggatttttctgcgggaacggcgaggcgctcgatctggaaaactttgtcggacttggattcagaaattgtgtcttgaacgtcaagcgcgaagtcgcggcagtggatatgccagtaaagacgggtgagagcacgcatttcgggattttcggaacgctgaaaagcgaacagaattttacgcccgttgcgggcagcacggcaatatccgtgaccgtcgaataaatattttttacaatttttccgaacattttcggaaacggatagattgcaggggcgaaagcccgaacgaataatattgcgaggagtttagaatgaaaaagattttggcagtcatgcttgcttttgttttctgtctcggcatctttgccggttgcgggaaaaaggataatggagacgataatccgcccgataaggaagtgtacgttcccacggaagacgagcagacaaaagcgttggtattcgggatcgacggcgcggacggcgtattcagccccttcttttccagcgccgcgtacgattctgagattgtaggccagacgcaactcggtatgctcactacggataacggcgaactgaaaagcggcgataattatgcctgcgtggcgaaagatcatcgcagcgtttatttggatagtcagggaaacgagatcaaaaatgcgagcgacgcaaagtttacccgctatgattttattattaaaaaaggccttaaattctccgacggcgtcgatctgacgatcaaagacgttcttttcaacctttacgtgtatctcgatcccgtctatacgggcagcgccaccatctattcgacggatatcgtggggctgaacgaatacagaacgcagtccaaagacgaaagcgcgaacgacgcgctcgaggaacaggcggccgtcaacgcgcagacgcgtttgaaacgcgcatccgactggctgaacaaccaggcgctcctcgaagatacgccgaacggaaaatacgaagaactcactgccgaacagaagaaacagtacgtaatgggtttggaaaaatacgaagccgaaatcaacaaggatatcgaatttttcattccgtattaccgtcaggaagtagaggggaattatcagtcagcaatttcctcgtttgaagacgaccgcaaaaatacttacgcttatgacgatggcgaatactggcagtctttcctgtatatgtacggcattatcgacatcgcgtacaacgcgaagggcgaacccataaaaacgacggtcggcacgggcgatgacaaagtcgaactatatacgttcaactttgccgacgatcctaccatgaccaacggctgcaaatgggtaaaggattacatagaagaatacgacgccgaaaactgggagaatatgtcgggcgcgaccacgcttgaaaagcacaacaacgcaaaaatggaagcggcgatcgaactcgtttacagtacgacggtcggcgcaaacgacgagaacggcaaattcaaatacgaatattcccagtttgccctgaccattctttccagcggcagcacgaatacgctgttgaccgaaatgcaggcggacgaaaaatccaagatcatcgacaatacggcgggcgacaatctcgtaaggtcgatttcgggcatcaccacctcgaaagtcgatacctttgcgggcgaaaagttggacggcgagtacgatatgctttccattaaaattaaaaacgtcgaccccaaggcgatctggaactttgcctttacggtggctcccttgcattattattcgtacgcaggcgcgggagatgaaggggaatggaacgtcaaaaataatttcggcgtccgctataacgataccgattttatgaacaacgtcttaaaagacagcgaaaaactgggcgttcccgtaggagcaggcccttacaaggcgagcaaagagaggggactgggcgaaaacgaattgtatccctccaagaacgaattcaaaaagaacaaccgcgtctattacgagcgcaatacctattttgatttggtcgatggcaaaaagggcggcgaaattcagaatgcaaaggtcaaatatttgcaatatcagatcgtcaactcgaattttctgctcgattcgctttccgagaaagaaatcgacgtggggaacgttaacgcgacggccgcaaacgtcaagcgtatcaacggcatcgattatttaaagggcgacaccacgcgcaccaacggttacggttacgtgggaatcaacgccgccaaaattgcagacgtctggatgcgccgcgcgatcatgaaggcgatggataccacgattatcagcaacggttattacaacggcggcctgtgcgacctgatttaccgtcccatatccatggaatcctgggcgtatccgaaaaacgacgcggctgagaggccttacgcctttaccgacgatctggggtatgaagtggattacgtttacgacggttcgggcgccgatattgcgaaaatgcttgccgctcacggttatcaggtcagcaacgataataaagtccttgccgatcccgacggcaataaattgcccaagatcacctttaccatcgcgggcgaatccaacgatcaccccgcatggcagatgttcaagaacgcggaaaatgttctggaaggcatcggtttcacgatcgacgtaaagaccgatcagtttgcgctgcaaaaactttccaagggcgaacttaccgtttgggcggctgcctggtcgagcacgatcgatccggatatgtaccaggtttaccacaaagattccaacgcgggcagcaccttgaactggggctaccgcgccattaaggcggacaaacagaaatacgcctacgaatggggcgttatcgaggaactttccgatctgatcgaccgcgcccgtacctttatcgaagaacctccccgcaaggatatttacgccaaggcgctcgatctcattatggaacttgccgtggaaatgcccacgtatcagcgtaacgatctgaccgtctataacatttctaagatcgatacaaaaacggtcaatcagaatcctacgtcttacgacggtatctttgcgaaaatttgggaagtcggatacgtcagataacggcgttcgcctcggagagttttcatggttaaatatatcatcaagaggatactgctcgccatcgtcatactgttcggcgtatccgtcatcatttattcgctcgtccgcatgatgccgggagatttcattaccaataaattcatgcagatggttatcgacggcaagatgagcgagaaagaattcaaccgcctgttagaggtgtacggtcttgcggatcgttcgttctggggtatcttaaaagggtatttcacatggatcggcaatgtgttccaaggggatctcggccgctcgttcaagtacgaagacagcgtcagcacgatcatcgtcgagaacatgggcatctccttcggcattgcctttgcggcgctcattctcgaattcatcatcgcgatcccgctcggcgtcaaggcggcgaccaaccaatacggcgtcgtagactattccgcaagcgtcctttcgatgatcggaacggctctgccgaccttcttcttcgcggcgatctgtatccagttgttctcggtgcagttggggtggttccccgtcaacggactgacgagcacgctcccgtccgacgcaaccgagtggacaaggttctgggataagatctggcatctggtcatacccgtgttcatcatggtattcctttccgtcggctcgctgatgcgatacacgcgcaccaacacgttggaagtgctcaatgcagactatatccgtacggcgcgcgccaagggtctgagcgaggggaaagtcatctataaacacgctttcagaaatactttgatcccgctcgtcacgctgcttgcgggcacgctgccgggacttttcagcggcgcgatgatcacggagcagatgtttgccattcccggtatcgggctgaaagcgtatgaggcgctcaaagcgggcgatattccttttatcatgggatataatatgttcctcgccattctgactgttttgggaacgctgctcgccgacctgatgtacgcggtcgtcgacccccgcgttaaaattttgaagtaggagaccgacatgagcgagaaagatcaaaataaaaacgcggacgaggtcgtgcccaacgaagaattcgaaaacctgtcgcccctgcaggcgacggggcggcccgtcaacgacagcgcaacagagtacgccgaaacggcgcttgtttcccgcggcgaagcccccgaagaaaaactcgaagaccgcatcaagacgttatcgccgggggcgatggtcgcaaagcggttcttccgttccaaactgtcggtcgtagggctggtgacgctcatacttttattcgcattttcctttttcggaccgcttttgcaactcgtctgtcccgcgatctggcaacaggacgaagtggaccgtagccagggcaagatcatcgagatcaatcgtccttacgaatatcaggacgcagacggcgaaacgcaggtcgcttacgaatacagcgccacgccgaacagtttcaatttcgatgctcccgtcagtcccacgcatttactgggtacggacagaaacggctacgatattttttcccgtctgatgtacgggggaaggatctctttgacgttgggttttgtcgtcgtcatcctggaaacgcttttaggcgtttttctggggggcttggcaggatatttcggcaagtgggtggatatgctcatcatgcgaatcgtggatatattcaactgtatcccgacgctgccgatcatgttgattatcagttatatgcttgacgcaaacggagtggcggacatgccgaaactctatatcatgatggcgatgctcacgctgatcggctgggcgggcgtcgcgcgcatggtacgggggcagatcctctatcttcgggagcaggaatatatgatggcagccgaatgtacgggcatcagcgtatggcgaaagttattcaaacaccttttgcctaacgtcctgccgcaactcatcgtttccatgacgctggggctcggcggcataattctgaccgaagcgacgctcggatttttgggactgggcgttcccgccgactttgcgacctggggcaacatgatcaacgtgcttacgagcgaagtttcctattggggcgcatatccgaaccagtgggtccccgtcggtatctgtatcgtgctcgcggtgctcgccttcaactttgtcggcgacggtctgcgcgacgcgttcgaccccaaaatgaagaggtagaacatgtcggaagaaaagaatcattacctttccaaaaaagaatcgcgtaagatcgcaagcgaaaacaagcgctttatccgcgttctggaaaaaaacaagcgccgcaaggcggacgaaacggaatatacggcgacgctctcggacgagcataatatcgtagaattcgaaaatctgcatacctacttttttaccgattcgggcgtttcgaaagcggtcaacggcgtttcgttgaacgtgccggaaggctccgtcgtcggcatcgtcggcgagtcgggctgcggaaagtctgtcacgagcctgtcgctcatgcgcctcgtgcaggcgccgcagggacagatcgtggaaggcgagatccgttttaaatccagcgaatataaactgggcgcggacggaaagcctattccgatttattgcacggaacccgacggacagggcggagaacgtcccgtcatggtcgcaaagcgcgacaaaacggggctcaaaatatgcgatgcgaagggcgaacccgtgatggttccgctgcaaaagcgcgacgaagcgggcgtcttgtgtttcgaaatggaagaaaaggtgttcgatcttgccaaaatgcccgtcgcgcagatgtcgcgtatccgcgggcggcagatcgccatgatctttcaggagcccatgacttcgctcaatcccgtatttaccgtgggcaaccaactggacgaagtgacgcttctgcacattccgggcacaaataaacaggaggcgaaactgcggagtctggatatgctccgacaggtgggaatcgccatgccggagcgcgtctataaatcttatccccatgaaatatcgggcggcatgcgccagcgcgtgatgatcgccatggcgctcgcgtgcaatccgcgcctcatcgtcgcggacgaacctacgaccgcgctcgacgtgaccattcaggcgcagatcctcgatcttctgcgcgacgtgcgcaagaaaatgaagggctcgatcatgctcattacccacgatctgggcgtcatcgcggagatggcggactacgtgtacgtcatgtatgcgggcaaagtggtggagagcggcaccgtgcaggagatcttcaaagatccgctgcatccctatacggtggggctgcaaaagagcaaacccgtcgtggggaaagaagtcagagaactgtacagtataccggggcaggtacccaatcccatcaatatgcccgattactgttattttaaggaacgttgcgaccgctgcgtcgccgactgcgcaggcgcgtatccagaattcgtatgggtctcgcccacgcacggcgtggcgtgccatcgctatacggagggcggcaaaaaagaatgaacgaagatatcgaggtttataacgacttcaaggcgtcggagcccattctgaaagtgcggaatctgaaaaaatattttcccgtcggcggcatcggcaagaataagaaatatctgcgcgcggtcgacgacgtgtctttcgacgtgtaccccggccggacggtcggcatcgtcggcgaatcgggctgcggcaaaacgacgatggggagaacgatccttcgtctttattcggtcacgggcggcgacgtgaaattcaacggctacgatctgggaaagatgaaagcgcgcgaacttcgcaagatccgtccccagatccagatgatatttcaggatccgtattccagcctttccccccgcctaacggtcggggagatcatcggagaggctgtgcgcgagcacaggatcgtcccgccctccgaatataaaaaatacatactggaagttatgcaaaaatgcggcttgcagccgcaatatttcgagcggtacccgcacgaattttcgggcggacagcgccagcgcatctgcatcgcgcgcgcgctcgcgctcaaacccaaactggtcatctgcgacgagcccgtttccgcgctcgacgtttccattcaggcgcagatcatcaatcttttgaaatctttgcaggaaaaggacggcatcgcctatatcttcatttcgcacgatctgtccgtcgtggaacatatttccgacgaagtgggcgtgatgtatttaggcagcatggcggaatacggcaaaacggaggatatcttcgagcggccgctgcatccttatacggaggcgctcttttccgccgttcccgttcccgatcccgattacaagatgaaccgcattattttaaagggcgacattccctcgcccgcggatccgcctttgggctgtaaattccatacgcgctgcgaaaagtgcatggagatctgccaaagggaagagcccgtattccgtgaatacgcgcccggacattacgtagcctgccacctctacgacgaagagtgccgcaggggttaaagaggagtttatggtttacaagaagtttaaatttttgtcgtgggtactcgtgctcgtcatgtgcgccacgtttgcaatttcggcgctgcttcccgaggggaaacgcgtagacatcagtgcggattcttccaaagaattcagcctgagcgaagacgattctctgggctttgccgacacttccgcagcctttgacaaaagcaacgtagtcaatgtaaacgcgaacgtgcagggaaaacactggatgatcgtatcgctgaaaggcgaaagcctatccgaaacacacggctcttcgctgcaggagtacgcgaaatccgcgcgaggcaagcgcgaagcggataaacttttgtccaagcaggcgaagtttctttccgcgctccgcggcgaaggaattccctttgaatacaagtacggatatactttgctcgccaacgccgtcgccatcaaggcggacgtaaaatatgcaaaccgtatttcgggcatggacggcgtaaaatcggtgaatatttccgaatattactatgcccccaaggacagcgccgtgaccaacgacgccaacgtgtggggcacgggtatctataaagtagacgaggagatcgccgccgagtataacggcaggggcatggtcgtcgccgtcctcgatacggggctggacgccagccacaaggcttttttgaccaacccttcggataaggaagcccttttgaccaaggacgatgtgggcgcgcgcgtgttcgacggcgccagatcgggcgtgcaggcgaaaaattcttcggttaccgtgaacgacgtctattacagcgaaaaagttcccttcgcctacgactacgccgataacgatgcggacgtatatccttcctattccgcgcacggcacgcatgtggcgggcatcatagcaggttctcccattctcgacgataacggcgaacaggaaaccatcaaggatcaggacggcaacgagatcctcgataaaaacggcaatcccatgacctttacgggcgtcgcgccgcaggcgcaactcgccatctgcaaagtatttacggacagcgaaaccaaagaaactttgggcggcgcggaaaccgccgacattctcgcggcgctcgaagactgcgtgaaactgggcgtggacgtcgtcaatatgagtctgggctcgtccgcgggcttttcgacgggcgacgacgaatatatgcagaccgtgtacgacagcgtgcgcgaagcggggatttctctcgtggtcgcggcgagcaacgattacagttcgaattacggcggcgcatacggcaccaacctttcgggcaatcccgattccgccacggtcggctctccctccacctacgcgggcgctctgagcgttgcgagcatcaacggtcagcaggcgaaatatatccgcgtcaacgtggcgggtaacgataaatatctgtactataccgaggcgagcgacggcaacggaaatcagaaggatttcattgccgagttgaaagccaaacaccccgaactcgtgaacagccagactggcgacatcaaactcgattacgtggtcgttcccgggtacggcttgtccgtcaactatacgcgcaatatcgacgtgaagggcaagatcgcagtcgtccgccgcggcggaaacgtcacgttcgaggaaaaggtgcgcgttgcaaaattgaagggcgcgatcgcctgcgtcatctacaacaacgtgtcgggcattatccgcatgagtctgggcaacctgaacgatcccattccaacctgctcgatcaccatggacgcggcgaacaactttgtttccttccagaaggggaccatgtatgtgaacgaatcgcagaaagcgggtccgttcatgtccgacttttccagttggggcccgacgcccgatctgaaactcaaacccgaaatttccgcgcacggcggcgagatcacatccaccgttcccaacggttgggcggaatacagcggcacaagtatggcttcgcccaatatggcgggcgcgatgagcctgatcctttcttacgtcaaacaaaacgtatcatacgatcagaacaacaccgaccgcgacgcggtggcaatgtccaacttcctcgtgatgagcacggcgaccatcgcccgcgacgaagccgatcagccctattcgccgagaaaacagggcgcgggtcttgccgacatcaaaaaggcgatgtccaccaaggcgtatctgtatgtggacaagggcgacaaagcgaaaatagaagtgggcgacgatcccgaaaaaacgggcgaatatacgctgaaattccgcgtgaagaatatgtccgacgcacagcgtacgtatacactcggcaccaagacgatgaccgaaacgatcgcatccgacggcatgaccgtcgccgaacgcgcgtatatgctcgacaatatgtcggatatttcgttcaaaggcaagggcgtgacgggcgataaactcgtgctcgccgccggcgcggacgtggagatcgccgtacagatcaacttgggcgcaagcgcgaaagcgtatatcgataagaatttcgaaaacggaatgtacgtcgaaggtttcgtaactcttacggacacttcgaccgatacgcccgtcgatctgaacattccctggctgggcttttacggcgactggtacgccgcgcccatgttcgatatttccgaatacgaactgagcgaagcattgcaggacgacagcattcccgacgacgaaaagccgcaggcagccatctatcccaccgtaccgctcggctcctataacgaaaacaaatatattattcctctcggcacctatctctacgaacaggaagcgggcgtgcgccagatctattcttcgtcggacaaggcggcgatctccatctacgatacgaaaggacaccgcacagtcagccagttgtacgcgatatatgcgggacttttgcgcggcgcagaatatatgaatatctccatcaccgacgccgtcacgggcgaagtcgtgttccaaaagactgacaagaacgtgcgcaaggcgtacacgggcggttcgagcaccgcgcgtgccgccgtcgtcgaactggaatggagcgccaaggaattgggcttggataacaacaagcagtacgtattccatatggacggaaaactcgccagcatggaaaaccgcccgtacgacgcgagtcagtatgcctacggcaaatctttcgacttcaatttctacgtcgataccgaagcgcccgagatcgtcgattaccgcgtgcgctacgagccgtataaggacgagagcgaaaagatccgttattcggtatatctcgacgtggacgtatacgacaatcattacgcgcagtccattgcgctgtgtttcgccgattattctaccatgacgctcgaacttctcgatgcgaacatgacgcctatttacagcgaaaagaactcgacgaccaccgtgacgctggatatcaccgactattacgatcagaacgtcgatttatatttgcaggtagatgattacgcgctcaacgcgcgggcttatcgcatcaataacttcaaatcgcttgccgacgcggtcaattatcccgaatccatcgagatcgtgagcggcgaagacgcgacgggcgaaggttattccaaggccgtcaccatcggcgtcaacgaagcgtataaacttgaaacgctgatcgcgcctgccgacgcgacgtccgtcaacctgtattggagttcggacgacgagaacgtcgtgcgcgtcaaagacggcgaactgttcggcgtcggtcccggcaccgcgctggtgcgcgtgtacggcggcaagaacgaatatgcgagcgcatcggacggcattctcgtgaccgtttcggacgaagtcaagagtgagccgggcgtcaataaaatggagttgggactcattcagaataccgacgataacctcgtcaatccgacaaatgcggtggttaaggtgcacccgaacgaaagtttccgcctgcgtgcgactctggaaccgtggtatacctccgtgccgcccgtcatcgagtgggaatcttccgtgcccgaagtcgcttccatcggtaaggatacgggctacgtcaagacgctttcggagggaagtaccgtcatcaagggaaccctgatgatcaacggaaaacccagcctgtattccgtgtccacgacgctcgcggtcggccccgaattcgtggtgcagaacggatatctcagagagtatcacggcgcgggcggcaaggtgaccattcccaaatcgctcaacgtctactatatctacgaagaagcgttccgcgacaacgtgaacatcacggaactggaaatttccgcgccctgcacggaaatccagcccttggcgtttgcaaacatgaaatcgctcaaacgcgtcgttttccccgaaaccattgaattcgtctaccgcaacgcattttacggctgttccaaactcgaacagatcgatctgcattcgcgggcgatctctttcggtgcgcagtgctttgcaaactgcgtatcgctcaaacgcatcaacaacgtgcaacttctgaacggactcaaaaaagaggacgtacagatcctcgatctgaaagagggtgtggatttcaagcgtattcccgcgcatatggcgtccatcggcgacgaggcttttgcgggatgcagcggccttgaagcactggatatcacagggcttcgcgtcgcgggacagggggctttctacaactgtatcgggctcaaaaaagtcacgctgagccgctttaccgccatcagcgacgatatgttcctcaactgtaaaaatcttactcagttggtctacaccgaccttacccccgatcagatagacgtcatcacgtatcccaacaaggtgtcgcctttcggaaattgcaatatacgggagatcacgttcctcggcggcggcgatgctttcgtcatggaagaagtgaacggcgtttccgcgatctaccgcggcgaggacaaaaagacgcttatacgggtggggcagaacgcggtttctttcacggttcccgcctcagtcgaagtcattgcggcgaacgcgttttcgggtaactcgaaactgtcttccgtcaactttgcggagagcggcaacttaaaagagatcggcgcgtacgctttctcgggcacgggactgacttccgtcaaactgcccgcgacgctggaaaaactcgggaaaggcgctttctcctggtgcgagttcatgacgagcgcagacctttccgttttccgcggcgcattgcccgaacaggcgttctacaacgcggcgttgcaacaggtatcgttcggcgcaaacatcacggaaatcggcgcgcagtgtttcgcctatacggaactcggtgacgtggatctcagcgcgacgaatgtgagcgcgctcggcgacggcgcgttcgaaaattgcgaaaaactcgtcggcgtgaaactgggcaggatcgtttccatgggcgacggcgtgttcgccgtgcacggcagcggagcgctcgtcagcgtttcctttgccatgggcagcagcgcgcttggcacgaatactttctctcgtcaggccgttttgcgccttttggaacttcccgaaagcatgaaagcgctcaccgagatcggaaacggcgtgttccgcggctgtaaagcgctcgaaggcgtgccgttcgtccccgtcagcgtgggcgattccgcattcgaaaattgtacttcgctcaaaaatatagatctttccgcactgaaaaccgcaggcgacgcggcgttcaaaaactgttccgtatttgcggcgggcgatctcagtcagttgcagatcatcggcaaagaagcgttctacggctgcgtaaaatcgctttcgttcgaccttccttccgtcacggcggtcggcgcgcgcgcgttcgaggcctcgggcgtgaaaagtctggatttccccaatatcaaaacgatgggggattacgcgttcttcaataccgcaatcgcgggcgcaaacggcacgttatcgattccttccggcatcgaaaagatcggcgagggcgcgctcggcggactgacttttatcaccgctttctctatgggcgaacacgataaatactttgttgaaaacggcgttttgtatgagcgcgtgcccaacggggtgcagattcttgcctgccctgcgggaaaaacgggtaaagtcgtgctgaacgaccgtaccgtgcgcgtggctgccagttcctttgaaaatgccacccgcatcacttccgtcgaattcccgtacgtattcaaagcggtcgggaatagagccttcttcaactgcggcgcgggcgaatacgtgttcggctgtctgaaagcgcccgtgctcgaagccaagcccttgactgcggacgactttgcggcgggctctgaaatgtaccgtattctcgacgatgcgggcagcattgccagcgaaaaattctacgcaaactttaaagactacgttgcgctcgtactctttgcgggcaaaaacggcatcgtaggcaaggatgatctgcaattaaaactcgtctgccccgaaaacgcaactggctttgacgggcggatttatgcggcgtatttctccgacaggcgcacgagcgaaatcatcgcggacgacaacgcgcgcagcgcgctcgctctgatcgggcaactcccttcggcggaaacggtgcttgcgctcgataagagcgacgcagccgcatggaaagaataccgttccgcggcggctgccgcgcgcgaagcgttaaatctggtatccgcaacgcagagtcgattcgttaccaacgccgaaactctctatcaagtggaagaggccatgcgcgagcgtgccgccgatttcggcgaaatcgttacccgcaagagcatttccgtaggaaaggaagcggcgaagatgagttatctgcgcggtgaaaaattcgatcccgcgggcatggtgctcgtacttgtctggtccgacggttccagggaggagatcacgaaaggatatagcatcgtcggcggcgataagccgctcacgctgaacaaccgtaccgttaccattcagtacgagggactgtccaccgtgctcaacgtgacggtcaataaacccgccatcgaatccatcgaggtggaaacgctgcccgcagagcaggattatcggcccggagatacgtatgtgtcggcaggacttgtgatcaagatcaactatgtggacggcatcagcgaacttctgtacacgggttataccgtggaagccgacttgctgaaagcgggggacaacgtcatcaccgtttcctacggtggcaagacgatcacctataaggtcacggtagaagagcaagacgacggcgtggatcccgaacccgcgccgaaaggctgtgcttccgcggtcgcgtttgcgtccgtagttcctgcgggactgcttctcgcggcggcgctgttcgtcctgcgtaaaaagaaaaattcttaaaaacccgatcgggcgccgcgccacattcgcggcgcccgtaattttttttgcggcagattgattttttcggccgtttatgatatactgaaaaaagaagcggcggatggccgcaaatttgaaggcggaaaaaaagatggatgaaaagatccgtgagatcggcgtggcgcagttcaatccctacgtccgttacgtaaatcggctggaaggctccgtccacgaaaatcacatcgtgccctggcgcattctgtacgatttcgaagtgatattcgtcactaagggcgcgttgaaagttttgaaggatgattccgaatacacgatcggagaggggtgccttcatatcatgccgccgttcgtgcggcacacgcgcatcgtgcccgaacgtgtggcgacgacctattacggcgtgcatctcgattttatgttcgacgagagcagccccgatttttccgcgtgggaagtttataaacagccgtgcgagcgcaaactcaataccgttccgatccgccccgacctcgcggcgagaaagagttataaaccggccatcatggaactcgtcgagagttatcccgtccgcaacaaacccagattcgtggaacttttcaacaaactttacgaaacttttcaggataaatcggtgggcggccgcttttgcaccaaagcgtatatgatcctcattatcgccgaatttctggacgatctgaaaaatcaagatgcggaaaatgcaagtggcgccgattacgtttcgcagttcatcgattataccatgaatcattattccgaagagatcgacctcaacaaggtagtgcgcgattacggtatttcgcccagccgcttccgcgctattttcaaacatcagatgaaccgcgcgccgctggaatatatcattgattatcgcatggaacaggcgaaaaagttgttcctgacgggaaaatacaatatttccgaagtgggctacatggtcgggtacgacgatatgcattatttttcccgcctattcaaacagaaagtagggtgttcgcccactgcttttatcaaaaatttacagcatacctcttgacgggggtatgctttttttaatcgaaaaatccaaagatacgaaaatattgtctaaatacaaactccgatctccgtgatacaataaatttgtaaacggagatttttttatgatggatgaagtttttgccgagttttacaagaagataaattatccgctttcggtccgcaaagagaaaaacgcgcagggcgccgcgacgctgtgcggcggcagcggagaactcacgctatcagccggcagttatgtcgtatacgatatgggcgcgccgtcagtgggcgggtatccgactttccgcgtcagcgccttttcgggcgaacctgcgctgcatatttcctattccgaccgcttcgcgccgtttgaaaaggaagaaacgatggaaaagggagatttcacgcgcggcagttgcacctatttgggggtagaacttcccgtcatgcccgccaatccctatcgtttcgaagactattccgtgcgccgcacgggacagttcgtctatcccctcattcaggggcaggagcggttcgtgtgcatttccgtgcccgaaggctcggcggggcaggtgagcctttccgagtttgccatcgtcgacgattccgcccccgttcttcccgtcgggtattttcaaagcgatcgggaagatctgaacaggctctggctcgccagcgcgcgcacgctgcggctcgcgagcgtgcaggcgaatcagtgggaggacgtacggggtaaattatgccttcgcaaactgaccaaatggcagaacgcagcgctcgcccgagaattcgatctcggcgaaatgcgcctttgctgcgattttcagatttcgcgcaatcccgaatacccgacgggtatcggtatcctcttttttgcacaaactccgagagaaggcgcccttctcgaaatcaccgaaaaaggcgaggtttcgctctggcagacggggaaagacgatcgcgtcctcctcgccgcttcgcgcgttgcgcctcttaccgataacgtttcctatcatttggagatcgacgccgccgcgtctggcgcggctgtgtttttagaaggaacagagatcctgcgtttcgatgcccccctgcaaacgggcggcagtttcggattctggatggatacggaatggcgcgccgtctgcgaggctttgtccgtctttgtaaaaggcgaaccagtctacgaatggcagggcggaacggaagatttcgatatccgccgcagcggctttttcatttcggacggcgccaagcgcgaccgcctgccctggtcgggagatctggactgggcgttcgactgcggctggtattcgttcggggagcgcatggacgcgctcaacaccttgcagatcttagcggtgcaccagtcgcccgaaggctacatattcggcacctgctatccagaaaataccgttcccccgaacaacggcgaatacggcgattatcagtcggatatgtttgccgcatggtacgtcgtttccgccctcacgtactacgaactgagcgccgatatgcgcgtaaaaggactgttcggtacgctgcgccgctgcatggattatctgtggcgctacgtcgataaggaagacggtcttttcgaacagcgctttgaaacgagcaaggggctatgggaccactatctgggggataccggcaagaacacatatacgaatcttatgattctggacgcttttgagcgtttggctccgtttgcggaattctgcggcgaaacggcgtacgcaaaaacgtgccgcgaccgcgcgaaaatcatgcgggaggggatatt

SEQ ID NO: 299 - DNA, 8216 bp, Unknown
  16S sequences of unknown bacteria
ccgcgcccaggcagcagccatcctccagcggtttgcgacgaagatcgtcaagtaaactgcgaggcaaaagcaggggagcgtgaatcgctcccccccagggggcggcaagccccaagagagggggcgaatccccccaggggtgtggaaccccatataaaattgatcgcttcttcatattctttatttcctttctaccgggtgcgggcccacacccgcacccacccccctccggcacttgccgccggaggggggcctctctttctgaaaagaatgttgacaggcgtacaagaatatgatataagaataatataaattgaactacatcgtatcatcctcccctttgccgctgcactgcgtggcgggggggataaaaggaacccggtgggaatccggggcttaccccgtagctgtatttgcagctgcgcggctttgcgccgaaaggcggccattgtggggcgtttccccatgagaaggcaggaagccgcgcggggcgtggattttatttttacggtctgcgcccagctgcatgagccagaagacttggtgatgcgtgcgcgcctttagagcgcaaattgggcacggaaagatcggccgtggtggagcaaaactccaccacggcttttgtatttgtatctgccccggaaaacgtgtcgcgactggtcgcgacatgcttttctagccaaaagaaaagcatgaaagatcttgtcaatcgccgcgtttgcggtgaataaaaaaccagaaaaggaatggtgaagcgaatgaaaaagctgcccaaacggcttctggcggcgcttttggcgctggcgctgatcctgggcttactgcccggtatggcgctggcggcagagtcggcagaggcaggccaaggggcctatcaggtgacgatctacgcatcggtacaggccctgacgctgcaaaacgcagccggagagaatgtccccctgacaaagggagaatccggcgactatgcgacgtttaccttccggggtgacgccggaacgtatacctaccgcaacgacgcggcgggtacgggtatgttcaaggtgacaggcgacgcggatgtttatctgcgcctcattacctacaatgtcaaggatgcccggacggattacaaaatgcgtatcgtgaatacggaggacacgtccctcgtctgcgaatccctcgtgacgacggacaagcagagcgcgacggtcctcgtcccggcttacgggtacaacgtccgctaccagtacttctgcgagccgacggatgagacctactgcgggttctatggcaacctgtggtccctgccgggcgcgacggagtttgcgggattcaaggcggcgggctttaacctgtccgacggccgcgtctataacatcggccggaaagcgacggtctcctttaagatccctgccggggcgacgctgaaggtcgaggagttggtcaaattctatcgtcagaataaccagttcaagacgacgttcgtcaagaccgagggcggctatgactactataccgccgaggccccgacgaactccggcggcgatgtctactatgtcgtctccaaggaagggtacatgaaaaaggcccacacgttcacccccaaggtgggcctgagcatcgaggtggacgcgctggaagcgacgcccaatctgcatgagagccgctatgaggccagcattatcacgaacggcaacgcctcgaagtttatctccctgcagcagggcgaggcctttggctcctggtcctcccgggcttggcaggccattaacgacggcctgcagaacgggcatcttgagccggacaagcattattatgtgctcgacggcgactcggtcacggtggatgaatacggcatcgtcaaggctgtcaagccgggcctgtccatcgtggcgctgacgtatgacgccatggagtttgacggccaggtctacggcgcgatcaatgacgagagcgtcgcggtctacgcgtttatggttaacggcaaccgcgagggcgtcacgactggcctggagggcctttcggacctcaatacgttctattatgccaagacggtcaaggtcgacggcttggacgaagtcaaaacgaacgattccattccaaagacgataaagcccacggcggaaaatggccagagcctgaccgtcagcctgatgaatgtctgcgggtatccgaccccgaaggcctccagctggcagaccgtcgccgccaatgctgacggcagctacaccttgaacctcaaggccgggcgcaatatcgtcaaggtccaggcgggcgacgccatgcgctgctacgtgctgggcgccgtcggcagcgatgtcacggtgcagaatgtgacgagccccggccagaccatctgcgccggtgagacggtcaaggtcgcatactccaatgtgacgacgccgcagccgaagctgggcgcgatctataaccccggctacggcaacacgacgtacctggagggcacgctgctggatgagagcggcaaggagcttgccacggtcagcggcgaaggcacccagtacggcatcaaggaaaatgccgggctgcaggtcatcccggacgcggcgggggaattcacggtctccaatgtccgcatccacctggggtcctacggctccgcgccggatacgcacctggccctgagcccccagagcgagggcggcaattatgacggcacggattccccggaggccaccaactactggtgcagcttccaggatgtctccttctccgtcatcggctcggactacccggagcgggcggcggccattgttgagaaaatcaacgccatcggcgaggtaacgctgacggacgaatgcaaggcgaagatcgacgcggcccggctggcgtatgacgaagctccggtaggcgtcaagaacctcatcacggcagaccagctgaaggtcctgacggacgccgaggcggcctatgaaacgctgctgtttgcccagattgagacggcgattgaaaaacggaccgtcgacgggaaagaatattatgttttgaagacggcggatgagcttgtctggtttgcgaagctggtcaacggcctgcagtccggcggctgggatgcccggcaggaaacggccaatgccctgctggacgcagacatcaccttcaacgaaaacgtcctggatgccgacggcaatctgaccaagcaggctggctggcgccagtggacgcccatcggcggctacacctggatctccggcacgggctttggcgcgacgagaaatacggcactctataagggcattttcgacggccagggccatacgatctccggcctggtcatgacgacagcctggtcgggcgatgcgggtctgttcggctctgcgccgggtgcgacggtcaaaaatgtgaaggtaaaagattcttatctgagcggcgacaacgtcggcggcattgttggcagcggctctaaggcgacgatcgagaatgtctcctaccaggggcagatccgtgccaacatgtatgcagccggtatcattgcctatacatcgtctgcgacggtccgcaatgcttcgtttaccggcacgctggttacgaaggacagcacgactgcttatgccggcggcattatgggcctcggctctggcacggtcgaggattgcgcggtcgacgcgacgctggaagcgggctgcaaagtcggcggtatcgtcggcgggtataacaatctgacggtccggcgctgcagcttccgcggcagtgcagtgtcctccctggaaacggcagcgggcattgttggggagtccaacgataacgttacgatcgaagactgctactccaccggcaatctgacggcggccgggcgggcagccgggatcacgcagggcgacagcgaaagcaatacggttcgcaactgctacgccctgggtacgctgcaggcgccggagacattcggcattgcgagcaaggcagagtccctggacggtccgtcctactgcctggatgtcaacgccagcacagccacgggcaatacgatcaccaagacggccacggaattccgcggcggcaccgttgcctggctgctgggcaaggcctttggccagaagctgggcgtggatgcctccccggttctttcggacggcacgaaccgcgtctttatggcgggcggcgatctgcgcaatgcatccgccgagacctgcgatcttttgatcactgccatcggcaccgtcgcactggacgggacggaaaactgcttcggcaatgttaccctggcgcaggattgctacgatatgctggcgaaagccgagcgggccaaggtcacaaagctggagaccctcacccagaagcaggcggattacaccaccgcggtgaacgccctcatcgcccagatcgacgccctcggcgagatcaccctggcgagcaaggacgcgctggaagcagcccgcggcagctatgaccgctacctcgcctggggcggcgacgcagcgcgtgtgacaaattacgagaccctcacggcagctgaggcggcctatgccaagtgcgtccaggccgacaacgagagcaaggtcgaagagagcatccagatcaagaccatcgacggcgagaaatactatgccatctcaaatcttgagcagctgcagtggtatattgccctgctgaacggcaccctggccgcaaaggagcgcaacacggcggccaacgccatcctgacggcagatatcaccgtcaacaaaaacctgctggcgacgctgctggatgagaccggcgctgtcaaggaggaccagcttgccaacatgacccgtctgccgatgatcgacaagctggacggcacgtttgacggcgatggccacaccatctccggcgcgctctactgcagctccgtggcaagctatgagcatgacggcgacgcgatgattctcaatgtcaacggcaccgtcaaggacctggtactcaaggatgcctatacccagggcttccatgtcgccggtatcgcctactatttgaacaaggacgcgaagctgctgcgctgcggctttgagggcaagctcttcggcaagtattgggccggcggcttgacgaacacgtccaatccaggtgcgctgatcgacagctgctattgcatcgcggatatacacctggaggacaccgcggatacgacgacgcagcaggcgtaccgcatcggtggtatcagctgccataactacggcaaggtccagatcaaaaacacctttgtctccggcaccattggccccgcctatttccagggcgcgatcgcaagcatcctgaatggcagcggtaccgtgatcgacaactgctactatccccaggtcgatggcctggagtgcatcagcgacctctcccgggatgtcgcgacgcagatcggcggcgggaagctccagggcgaaatgatgaccagcggcgagctggcctaccggctgggcgatgccttcggccagcgcatcggcgtggatgcccatccgatgttccgcacggccgataatgcggtctactacgtgaacggcgcgtatgccaacgcatcggcccaggtcgccattgcgctgatcgacgccatcggtaccgtcgcactggacggcgcggagcattgcttcacgaatctggcgacggccgacgcgtgctaccggtccctgacggaggcggagcgcgcccaggtgacgaacgtggcgacgctgcgcgctgcccaggcggcagagcaggcggtcatcgaccagcttgctgccgagatcaaggccgttacccccatgacgctggacaagatcgagctgctccccgccctgacggcgaatctggcggcctatacccagcgcggcggcgatacggcgaagatccccaattacgccgactatgaacaggcgtgcaaggacgccgagcggctcccggtcgaggaagcggaaaagaccatgaagaccgaggagattgacggcacgacgtattacatcatcgaaaatgccgaccagctcaactggtttgcccgtctggtcaacggcaccctgcccacgggcacggcgcagaacaatgcggccaacgcgattctaaagtgcgatatcaccatcaaccaggatctgctggcatctctggatgacatcctgctgcccagcgcggcgtcgacggagaagctgcgggccattgcacccatcggctatggcaatgccctgaatggcgccaagtacaccggtacgtttgacggcaatggccacaccatctccggcctgtacctcccggcaggggaagttacgagccagtttggtctcttcggccagctggacggcacagtcaagaacctgcatgtgcgcgatagctatgtcggcggccaggcgacagaccgggtcggcggtatcgtcggctacggtggcactgcagtggtcgaaaactgcagctatgaaggcgttgtcatcggtgcatcggatgtcggcggcctgatcggctactataacggcgtcgtccgcaactgccgcacgaatatcaccatggcgacctataacactgcggcacggcagaatgccggcggcttagtcggtaatatgggcagcaagaaggactttatcaactgctacgcccagggcacgatctactgcaacaagggcaccgccggtgcgacctactgcggcgggctgaccggcaccagcgcagtggggaccatagcgcaaaactgctatgcggccgtagaattggtcggcgccagcaagaatgtcggcggcctgacaggttttatgatggccaacaagtggagcaactgctatagctacaacacggtcaaggcagttggcgcgtcgaacgccatcggcaaggacgtcgccgggaaggcggagagcaagacggcagaggaatttgccgacggcaccgtcctggctctgctgggcgacgcttatgtccagcgtgttggggtcgacccgtaccccgtctttgccgaggcgctgcccacggcggagatcacagtcgagctggagcgggataactatgcaaagcacgccgaagtcattgcccgggtttatctgacgggcacccagacggctgggacggtcggctacagcctgacctacaacgcggcagagctggagctgcagacggcccaggccgcagcgaacctgacggcggacgatcgctccgcagcgggcagcattctccggaccctgaccctggcggacggcgcgaagctggaagcgggcgaggatggccgcatcctgcttgacaccctgaccttcacggcgaagaaggcctgcacggcctcctttggcctggatggcatcgcgggggacgagaccttcggcgacagccccgccttcgtccatgacaccggcgtttccctggcaacgaccctccgccagacctacgtgacgacggaggccgccgaccgagaggccgccgcagccgtcgacgccctgatcgacgccatcggcaaggtcacgacagacagcggcgatgccatcgcagcggcaagagccgcctacgatgccctgacgccgcagcagaaggactatgtcgaacactacgagaccctgaccttcgccgaggagacctaccagcgcctgcccgactgcgcgtccggcaagcatgtctaccccgagtggaaggtcacgaaggaagccacctgcgacgagaccggcgaaatgtccggcatctgcaagtactgcggccatgtcggcaccctgacggtcgcggccctgggccacgattgggacgcaggcaagcagacgaaggcgccgacctgcacggaagcaggcacgatgcacttcacctgccagcgcgcgggctgcaagggcgaaaaggacgagaccatcgcaaagctggcccacgaatatgaagccacagtcaccgcgccgacctgcgaatcggccggttacacgacgcatacctgcaagacctgcggcgacagctacatcgacactatggtcccggccaagggccacacggacaaagccgtcgtcacagccccgacgtgcgataccatgggttacacgacccatacctgcgccacctgcggcagaagctatgtcgacagctacaccgcggcgacggaccatgattacaagtccgaggtcacgaaggaagccacctgcacggcggaaggcgttctgaccttcacctgccagcacgaaggctgcggcaagacctacacccaggctatccccaaggcggaccatgcgatgacggccaccgtcacgaagcccacctgcctgagctttggctatacggaataccgctgccagcattgcgactacagctacgtgaacgccttcacccagcccacgggccacgcctggaac

SEQ ID NO: 300 - DNA, 4150 bp, Unknown
  16S sequences of unknown bacteria
cggtatccgagctccgcgacgcgtatctgccgtccggtctcaaggtcgatgatgttaaggaaggatttcattcatctgccctcgacaatataaaaatacggactggtcggcgagttcatcatccggaagcacgcgaccgtatagtcgtgccggtcgagctttgagagcttttccccgacgagcctgccctcgagctcgccctcggcgtgaccgggatagatcgcgatgagaacgatcgcgtcggtgtccatcatgcttatcgcggcgtcgatggcggcgagggtcgtctcatgcatcgtcgtgactttcttgtcgctgccgggcaggtagccgaggttgaacatcccggcgcggacctttccggtgacaaactccgcggcgcggtggtgcgagacgttgaaaagcgtgtagttcgccggagcgccccatttctcgaggttcttcctcgtcgactccatcgcggcgagctggatgtcgaacgcgaacacctttccgctctcaccgaccgtctccgagaggaacgcggtgtcgtgcccgttccccatcgtgtaatcgacggcggtgtcgcccggtttcaggtgtgcgagaatgaagcttttctgtaaatcgagcaggtcaaccattatccgtgtccccgctcagcgcctcacataagcgttcgcgtcgcaaacatccttgttgaccgttccgaacggcgcggggacgtttccggacataagcacgtcgtagttcgcgcgcacgtctgcgactgtgagctcgcgcggcctcgtgatcgagtcgggggtctgcatcgagagctcgtagagccacggacccgtatagccggcgtccttcagcattgccatgaggctcttccagtcgatgccgccctcgccgggaatccagtggcgctcgttctggaagtcgtagtcggagatgtggagggtgacgattctcttgccgaggagcttcatgaagttctcgtgagtgtcctcaagcaggtggtttacgtcgaatgtgacgccgaggcggtcgtcagcggagactatctcgaggagctcagcggcggtgttgccgaggcaggtgcgagggagatcctcaacggcagcggtcatgccgtagccggcggcgatctcggcgagcttcgccatggattcctgcgagtatccgacgcgggtggctctctcctcgggctttgtgggctcgagagcgggatgaacgacggcgatcttcgcgccgagctcagccgaacggccgatcagatcgcggaagtgcccgaccgtgtagtcgcgcaccgacttgtccatatccgccgggtcgatcttcgggttgccccagaaaggaaggtggagcgaccagatgccgacgccgctgtccttcgcgttctgcttgacagagttccagtcgagctcgcgcaggacgttgtcgttgaccgacacctcgaccacgtcgacgccgttcttcgcgcagtcgtcgaacatctccttcgtgaggtttcctattgataatccgagtttccagttgtacattttgtttgcctttctttattctttattctctttcgtaatcggttatatttgtgttcttgctgccgtcctcgttgtacgtatattcaagagtgcgtgacacgaatccgtcagcttcgtgaatatcgcagcgtatctcttttccgatatcatcgaaataggtgacagtgtagcgctgaagctcaccgtcagcgttgtatacgctccgcgtcatggtatttccgctgtagtcataaactatatagtgcttcagcgacccatctgcgttgtaatgggtcgtcttcttttcgagctttccgtcatattcacaggtaaaatagctcctgaagcttccgtcatcgttacccatgtagcactcgatgagctgtcccttgttgttgtaggtgtcctcctgcaatattaccccatactcgttgtaccagatagctatcctcggtgtcgctttgtctatgtatgagtagtcgaattccgcgaaatcttctgcatatgtccagtgttgaagctttccgtcacggtcatacgatttgagctctttgatcagatagccgttgctcctgtcataccttccccagttcttcagtgacccgtcttcatagaagtacgcaaactcgatcggcaagccatccgcactataaattgtataacgctcggcacaggaatcctttttgagcttcccgtccggatagaactcataggtgtgtccttcctcggcggtgatgagcttttcctgctcattggttatagcgccgtcagcagagagcttgtacgcgagcttgctgtatactttgtccgccgtccccagcgacagcgccgaataagtcatcccgaccatatccccgcgaagaaacccctccgccgggcagtcaagccccttctccgtcgcaaactcaattgccttgtcataagtgaagtctttagcgtccttatcactatacccaagcactctcagcacaattgtcgcatacatctgcgccgtgcaaggatcgtccgccccatatctcccgtctccgtacccattagcaagcccgttctgccagaggtactgaatgtaaggcttcgcccagtccgcaacatcgttgaatggagccgtatactcaagtcccatcgcctcttcctctttcccgaggaatcggacaagcataactgaagactgcgcgcgggtcggaacgttctcgaggtcgtatccattgtcggttcccttgaagagtcccatctcgttgagcgcgtccgcctgcttttcagccgtttccgcgtcgtatgccgagattcccgcggtcatcatcgccgcgaggaggattgccgttatcgctgttgtgatctttctcatatgtaaattctccttgaatggactgtaacttaattttacgccaatggaaggaaacaacataaggggatcgccatcccgccctgagacggcagacaacgatcccctcacgggttcatattcagaactttataacctgatcaagctcagccgacttgaacgccgcctcgatgaccttaaggtcaagaagcatctgctcatgtgtgacaagctgcggctcgatgccgtcaatcgccttgacgaagttgcggtaataatcgtgaacgtcggaatgcggacgctcaacctcgtactcgtcgacggtcacgctgtcgcgcggagccatcgtcttcgtgagacccgcggcggtctgaaccgggatgacctcggactcatgccagtgcttgcacttgacgaccttggtgttctctctccagtcggaaatgagcgccgtgcccttcatgccctgcatatagaaacgcggcatagcgatgaagttatacgtgccgacctcgatgtaagcgcgcttgccggactcgaacataagctcgagcttgaagccgtcgtcgacctctttatttgtgatatgatcctcacggcagaagaccgtgtcgatcttttccggaatgatctgaaggatctggtcgataaggtggatgccccagtcatagagcattccgccgccgtgctccttctcgcctctccagtcgctcgggatgccgcgcgagccgtggatgcgggactcgatattgaatatatcgccgatctcgccggaattgtaaatctgcttcatagcgaggaaatcaacgtcaaagcggcggttctggtgaacagaaaacacctttccgcacttgtccgcgaccgcgatcatatcctcaagatccttcgaggacagagtgaccggcttctcgcagatgacgttcttgcccgcctcgaggcactcgatgacgaccggcttgtggtcgtcgttcgggatagcgacagtgacgaggtcgaccgacttgtcgtcgaggacctccttcagcgacccgtaagcgtggataccgcgggactccgcgaggtcgcggcgctccttcttgatatcccagataccgttcaggtgaacgacgtcgctctcaagcgcgtgctgacaatgccagccgcccattccgccgtaaccgataacaactaaatttttcatgataatctgcctttctcaaaaaagcaattagatttcccgtgacaagatatcacggtttcctagagcaaatgcgaagcaggtttcctgacccggagcaaagctcactttaccgcagaaactgcaccgtggcggagttcacctttcgtagaaacttcattaggt

SEQ ID NO: 301 - DNA, 32759 bp, Unknown
  16S sequences of unknown bacteria
acaccacaatgaaatggataggtaccccctaaaccccaaaagaatttatagagccgcaaaatatagggtataatacctatatctcagagtagattcagagtagatatcaagcaccttgcttgctgagccactggacgaagttccactaataaaatatctacttctgtagattgtagatttcggtgccgtagttgatgtcttgggagcacaggttgcgatgtcgttcttgtaagtgagtttgaactttacattggctaggcggttcgaagaggtcttaatctcaccattctcatcctgggagaacaatttcggtgttctacgatgagtttatcatggctctataaactttttaggggttttgtaaaaatcagctttaacgaagtttgtggtgcttatgaaagaaaacagaaatagaaaacgagggtcgaaaggctctcgttttcgtttgaataaaatgcttgccaatttttttaaaatcctgtaccccttgcaaataagggcatacagaagactttggcttttgagccactttataaaggctgctgtggtgtgtataatatcaataaagtaaattcacactgcgcaagggaagtgcagaatacaaagaaggagcaatgttatgaaagtaaagaataagattattgcatctgcagtagcggttatgatgctggcatcagctgcgccgatgactgtctcggcagcctccaaggcaaaggcaccgtcaaaggtgtctatcacaagcgtaaagcgagtgaataatacgaaagcaaatgtgaagtggaagaagctgaagaaagctccttcgggttatgctatataccagaaaaccggatccaagggctggaagctggtcaagaaggcatcgaagaaatccgcttcggctactgtttctgccggaactgaggcaaagacccagtacaaggtaagggcctataaaaacggcaagaaagtaaagaaatactataataagaaaaccaagaagtttgtctccaagaaagcgtataagaagctttcgaagaagaatagaaccaggaagaaagtaaccacggtaaagtggggcaagtacagtagcgtaaagacactgaatgccgtattctccggcaagatcggtaccgtcaaaggaaccattggaaacgacatgaagacatctctaacctggaatgcggtgaaaggggcgaagacgtatgaggtatattactccgatggtggaaagtacatcctcctggatactgtatccaagaatagctatgtcaatacccactataatccggagaagtcctgctattacaaggtgcgcccggtaaacggcgcctatacgggaagctggtccacggtgcttaagctgaacccgcagaacatgacattcaaggtaacctataccaaagaaatgccggaagtcttctgcaagacttgcggagaagatatcaccgctatgactgagaaggcacagaatgagaagcacggaactacctattactgctctgtatgcggtctgaatagtgaagacagcacagcagcatcccatagcaaggaagatattgtaaagcacattgaagagaagcatgctgcagtaactcagtcggaagatgaagatcagaatgtaccggcagtggaagaactcagccaggttcagagagaagagactgggaataagaagagcgtcaccattaccgacgatcagcatcagcatgcatgggagaagaccaccggtaccgaagagcgtattaccggatacaagtacaagacggtctataagaccatctgtaacgccgcactgccggatggcaaaggcggatgggtaccatgcaatttcgatgaaactgattatgataattcgatgacagatgatgaatatgctgaatttacattgaaacatactcttgaagataaagccaaaggtgcaaggggttatggttcttctagaaatgaatacgactacgtaaagatcccaatcaagaagagcgtaaccgtgacgaagtatacctgctcctgcggggccacatgcgcaagttatcaatagtttattcctttctctctttctttaataaatagatatacctgaaaccagggagccgatgacaggctccctttttcatgtcccaaaccgcatgctttgatatgcggttttttatatacagtccgttatttccaatatgtaattttccagaaggaggaagctcaaatgggaaagataagacaagttattaccaagggactatccattctcatgctcaccgcaatggtattccagccggtggcatcctttgccgtggatagtgaatccctgccaagcgcggaagggaagactcaagcgcagcattcggattctgagccgaatacggcaccgattaccgtgaagctgaatggatccggagagattcactttgataagatctcagacaagacggatgaaaagacgaagaaggaacttcaggagaaggccatccgggatgacaaggaatacaccttccggtatccggtgggggagaagattaccatcgttaccgagtctgaagaagacgagatccgggttcagaatgattccgtagatccgaagaaggaactctctaaggagtcgaaaacaaaggcagatggagagaaatccgtaaagatggagcaggagattaccgcagctgataagggcaacaaggtggaagtgacctgtaagaaggcatcggaagaagatgccaagaaggtgaatacccagtcttccgctaagggtgttaaggcgaagaccgtaaagagcagcgccgcaacttatgcgtcaaaggcatccactacgctgccgaagaaggggtcttcatccagtggcactgcaacctgcaaaagttccaagagaggtcatccgtctacggcgaacttcaagatcaactctggaaagtataaggataaggttatcaaggcccactgtgtcgataagggtgtgtatcttccggaaccgggagcgaagtacagcttccacgccaaagtatcttctattacaactaataaaaatggagatgctgtggtgaaagtgacatgttccaatatgaagaatacaaaaggtcactatacccagaatatggcgggctcttttacttacacaataccacaggatgcatacatccagatcaccaagaaaattgccaacaccgactgtaccgtggggaacagcaactattctgttacaggtacggtttacaaaatctacaagaccgccaagaagacagggtatgtgggtacgctcactatcggaagcaatggcttatccaataagctgaaggtgaagaagggtacttactatgccttcgaaaccaagccgggcaagaatctgtccacaaaggatgagaagggcattgaccggtccaagaagccattcaagattgtagcatctgcagggaagaccgtaaagaagacctacaaggataccgccaagctggacccgatgttcattcaggtagagaagaagaacaagcgtccggaggataagaagcagtactctctggccggtgccatctaccaggtgaactactacggatccagatccagatccggaaagccaatccgcagctggaagttcaagacggatagtggcggctacatacaaacacaatccagaaatataaagaaatatctgtattcgggaacaccatataaggataccaatggtaacgttggtttcccggtagggaactacactgtaaaggaagagcatgcgccggagggctttgcagtggatgagaagacttatccagttaccgtcaccggtgctgccggaaacaccgatccggtagtttccccaaatcagaagattatcacaagtgacgagtatcagccacgaggcgatgtgaagttcgtaaaggtaggcgagacgtcctcccagaacgagaatggagaaattaagacatcctcgaatcgtctggcgaatgtgaagttcaaactcacttataagggcccgaagggagatgaatcccatatcatctgcaccaacgacaaaggcgagtggaactcttccgcatcctttgcaaagcacacgaataacaccaatgaagaaggtgtcggaaacggcgtttggttcggtgaatcggaagatggcaaagccgacgatagccggggagctcttccggaaggagactatgtcttagaagaactggaatgtgaagccaatcggggttacagtctgattgatccggtgaagttcactgtcaccaaggatggtgccaccatcgaccttggcactctggtagacccagaacacaacttcaagaccgagctcaccgacaaggagactggggaacacctgatctacggagaaggcccaatcgaactaagagaccgggtaacttacaaggacctgaagacggataaagaatacgaactccgagggaccctgatggataagaccaccggcaaaaaagcactggataaggacggcaaagaagtcgtatccgagccggtgaaattcactccatccgagccggatggttatgtggatgttacattcaagttcgacggaaccggagttgtcatcggcaaacagttcgtggcttatgaagacatgtatgaagaaggcgtattcttcggcgcacatcatgacatcaacgaccagtctcagacggtgaaatttccggagattaagacaaaggcagcaggaacggaatccggccttaagatgatctccggtgtgggcaaacagaccattacagacacggtatcgtataagggcctgattgccggcgagaccttcaagggcaaagtatggctgacagacgagaacggaaagactatagacggaacgacttccgagaaagagttcacggcgagtgccgaagatgggtcctataccatgaatgtaactcttccggatgcatccaagtatgccgggaagaatgtaatcgtctatgaagagctttataaaggaggcaagctgattgcatcccataaggataaggacgacaaagatcagacgctgcaggtcgtaaagctgaagacaaaagccgtgaacaaagaatccggtctcaacattatcgggaaaaccggcgaacagaccattgtagacaccgtagattacaataatgtaatcccaggaacggagctcaccggaagagcatggctggtagacgaaaacggcaacgaaattgaggataccatggccgaaacaaagttcacgccaagtgaatccaaaggatcctacaagattgagctgaagtacaatgcagatgatgtagaaggcaatgttaccgtatttgaggaactgtatcttggagaaaatctcatcggagaacacaaagacctcaccgattccgagcagacactgtatcagccatccatcggcacaacagcaacgggcaaagacacgggctcccatatcgtaaatggaaccggcgagcagacaattgtagatgaaatcgaatacaagggccttgagaagaacgtagagcatgttgcaaagacttggctggtagacagtaatgggaataagctggatgtaccggaagtggagactaaattcacaccaaacactgtgaccggaaaagtcaaggtagaaatcacctttgatgcatctaagtatgctggtacaaacgtgattgtattcgaggaagtatacctccaggggcagattattgcggagcacaaagataccgacgatgataatcagacaattcaagtttcgaaaatacagacttctgcaaccggcaagaccctgcggaataatatgatcccatccaagggtaagcaggtgattgaagatgctgtagattacgaaaatcttccagcaggcgaaccggtgaccattaagacttatgttgtagataaggccacgggaaagagggtagatggaactgaaacagtaaagcagtatacaccggagaaggaagaactgacggaggagacagatgataaactccaggatgatacgtcagacgacatctcagaggataccgcaaatccagagccagacgcagccgataaagagaacaatgaaaaacctcaggacgtagaaatcgtgcgcgcttccggcacctttacaacatccgtaacggtggatggggagaaggtcaaaggaaagaccctggttatctttgaagagatttacaacaaagacggtaaactcgttggagaacatcgtaaccttcaggataatcttcagaccatcgttgttccggacattggaacaaaggcaactccggaaaatgctcttaagaacatgctctccggtaaaggcgtagagtctgtaaaggatactattaagtacaccaacatgattccggacaaatataccgtgaagacatggctggtagacaagaagacaggtaagaaggtttctgatgtaaaagtaagtagcatgaatatcctggataaaagcgctaaaaacgaagaagagcagaattatgatgcatcttccgcaaaagctggagaattcacagtgtctggaattaaggtagattccagaaagcttaccggaaagaagctggtcgtctttgaagaaatcactgtccaggaagaaggtggatccgagcattttgttacagagcataaagacatcaatgacgaagcgcagaccatctcggtagataagccaatcacacctccgggaactggagaccagaagagcctattgatgtatgtaatcacaatcattatcggtgctgctgcaggagcagcatattacaagaccagaaagaagaaagcatcgtcgaataagtaattaagcactttcggccattaaacgctttcttttttaatgtagcgatttggtttatccaagtaagtcagctgtagcgttgaaattaaaaaagtgggcggtacatatcaccacccactttttttaatcactcttttttcccttcatcaataatctcatctttgcagctatcgagcatttccacaacagctttttcggattcattgatagcttttgcaataactggtattgtcatgccgccatcataaaggcgtttaatgatttcaacttggccttccgcatggccttccgcatggccttctgcctgacctttagtgaagccttcattgaagccgtcattgaaattttctcgatcgtgttcgattgacttcatgtaactcagttcccacatctcattttcttttccgcgacgaacttcttcgtctatctttcttgtcagcatcgaatcagccactcctttcgtcaaatatgtcaggaaactcttgagatcatttgacatcgtattctctgtactgatcgcatttacgaagactctggaagtttcgtcatttagccgtaaatccggttttcttgtgcaacgcggttcgaattcatagattggaaaatccaaattgaaaaagtcgaacatacagataaaaacaatgtagctccgtttcaagtccctgaaatcagtgccagatctaatttggtttagatcgattaggccttggtaataccggctgcgctttggtaaattcggtctgtttactgtttgcatttcgatattgtataaagtatcgaaatcatcttcaaagtaaacgtccaggcgaacacctttttgccccaatttaatatcaagggccttttgtgcttccgagaacttaatctctccgattttcctatcgaggataagttctacgagatccttgcaaatgtctaggttgttttgcataatattgcaaaacatgaagtcatctgcaaacgttaagtcttggtacgcttttttctttagtgtcatagtagatatctcctttttaatttaatattgataaataacaaggaaacatccgcttttggattttccctgttacaaatcgactagggaaaacccatatcatatttagttataactttttttcacaaataaattattttacatataaattcttgcaaaaacattatatcgtgtctgaaaaatctcgtcaatcttagaatgatgaagaataggtatattttgcaagactaatgcaacaattcattccgcagaactagtgcaacggaagtgttgcactggcattgcgaattttccgttaaaaaataaacggcgaaaaagcctgaaaagccctttattaaagggtttcagcggtgtataataaccaacggagtatttatagaaaaaaccaatggttattttgcaggaggagtattgcaaatggaaatcgcaaagaatgcaggaattacatacaagcagacaccggttgccaacggcaccctggtaaaggtcatcaaggcggcgatggcttcccatctggaggacgagaaggggtggaactactacgtttctaagtccaaggagtcgattgccgagctggcggaatccggtgagaacgccgccgaagtgaaggatgcaccggccgttatcgttccggtatacgcaccggcaaaggaagcgccgaccgcagaggatgtggagagaagccgcgctatcggaaacatgctggtaatcatggaagaaatcggtctggccggcacatgggtgagcgtgatgtgtgacgaagcgcagcagaagaaggtggcggaagccatgcacatttcttcggaattcatgccgatgggcattctgacgctgggctatccggagcaggatgcagaggaggataagccgggcaaaaagaaaaagaaagccgaggaacgtttccgcaagaagattcactttgtggacacgctgggcagatactaagaactttgtgtcggaagcaaaagacttccggcactttttttacaaaaaaatccgtgtatgaattgcagtacaatccgtaaaaagatataatggaaaagattatgaatcaataccgttttggttagttggaaaggacagagaaagatgaaacagttagaagagacgaaaagcagcggattggcactgataccgttcctgttgttcattgtgatctatatgggcgccggaatcatcctgcagatgcggggggtggagatggcgttctatcagttcccgtcggtggtggccatgtccattgcggtaattgccgcatttgtcatgttccacaaggcgggcattaacgagaattttgcgaccttcgccaaaggcgctgccagtgaagacgtggtgaccatgctgatgatctacctgctggcgggcggattctccgcagtggccggtgcgatgggcggaatcgaatccacggtaaacctgggcgtgtcgattattccggcacacctgctcactgcaggcatcttcgtgatttctgcttttatggcgacggcgacgggaacctccatgggaaccgtgggcgcgattgtgccgattgccgtgggcgttgtggataaagcgggcttgagcatgcctttggtgatggcggcctgcatgtccggcgcgatgttcggcgacaacctgtccatgatttcggacaccaccatcgccgcgactcggacccagggcgtagagctgaaggataagttccgcaccaacttctggtgcgcccttccggcggccatcatcgcactggtgcttctggtggcattcggccgtccggaacatgcggtggcaattcctgccggaaactatgagttgatcaaagtggttccgtacatgctggtactggtgctggcgctgctgggaatcaacgtgttcctggtattgctcttcggcatcgtgtccgccggcatcatcggaattgcctgcggcgacctgaccgtgattacttttgccaccaacgtgtgggaaggttacaagagcatgatcgaagtgttcctgctgtccatgttcggcggcggcgtggcggagcttacggcgaaatacggcgggcttcagtggatgattgagaagctcagcggcatttgcaagggaaagaaatccgcccaggcggcgctgtgcgtgctggcgggagtgacggatatggcgacggccaacaataccgtggccatcatcgtggacggaaatatggccagatccatcagcgaaaagtacaagatcgatccgagaaaaaccgcgtccatcctggatgcgttcacctgcatcttccagggcatgattccgtacggtgcccagtttctgctggtggcatccctgaccaagggacgagtgagcccgctggacatcattccgctgctgtggtacctgttcctgctgggccttttcaccgtgctgtccttcctgattccaagctacgagaaattgaccctctccggcgaatgggattgggagaaccacaccgtcattcgatagttgtggaaggagatgagttggaatggaaaaaaatcgaaatcaggtcatcgtgcgggccagcgtggtgggcatcgtcaccaaccttttgctggcgggctttaaggcttttgtggggatgatgtcccattccgtggccatcaccatggacgcgctgaacaacctgagcgatgccatgtcctcattgattaccatcgtgggcacccggctggcggcaaaaccggcggatcgggagcatcctctgggacacgggcgggtggaatacctcagcgccagcgtgattgccctgattattctctatgcgggcattacggctttggtggagtccgtgacgaaaatcctccatcccaagacaccgaactataccggcgttaccctgctgatcgtggcggtagcggtggtgaccaaaattgttctgggtctttgggtgaagaagcagggggtaaaagcaaattcggaatccctcatcaattccggtgccgatgcccttctggatgcggtgatttccgtcaccacgctggcagcggccggtctgtatctgggattcggtcttcgggtggaagcctggctggcagccatcatttccctggtgatcgtcaaagcgggaatcgacatgctgcgggaaaccatcagcgacatcctgggggaacgggtggagaaacccttggctcggcaagtgaaaagcatcatctgcatgcaccctcacgtgaccggcgcttacgacttgatccttcacgcttatgggccggatcagtaccagggatcggtgcacatcgccattccggataccatgaccgccgtggaaatcgaccggcttcagcgagatattgccgatgatgtgtacgagaagaccggagtcatcctgatgggaatcggaatctacgccatcaacaccaccgatgcggatttggcgatggttcagaaaaaggtgacggacctagccatgagcgtggaacacgtgatgcagctccacggtttcttctttgatccaaagagccggcgcatgagcttcgacgtggtggtcagcttcgattccccggaccggatggagacgatgaaacaggttcgccgaaaagtccttcaatggatgccggacctgaagcttcgaattcggatggatgcggatctcagcgattgattttccgcaataagtgttaagatttcttaagaattgttaagattgggctccggatgttgtacaccggagcccaattcagtataattaatatcattaatttcgaccgatactgtaacagcatggggaaagaaaggatagaattatgtcgcatatgattgaacttcataacgtatcgaagttctacagcaataaggataccgtgagtaccggattttccaaggtggatctcaacctggatatgggggaattcgtggtgattaccggcgagagcggcagcggcaagtccacgctgctgaacgtcatttccggactggacagctatgaagagggggaacttttcatcgcgggagaggataccagcggctaccgaacggaagattacgaacggtaccggaagaaatacatcggaaatattttccaggacttcaacctggtgaacagctataccgtataccagaacgtagagctgagcatgatgctgtccggcatgcctcggtcggagcagaaacagaacatcccggaatacatcgagatggtggatatgacggcctataccaagactaaggcatccaagctttccggcggacagaagcagcgggtggccatcgcccgggcgctggcaaagaacgccccggttatcgtggcggacgaaccgacgggaaatctggacagtgcctccgcagagaaggtgatggaaaccttgcatcggatttccaaagatcgcctggtggttatcgtaacccacaactacgagcaggcggcgccgtacgttacccgaaaaatcaccatgcatgacggccgaattatcgaggataagaaaattcagcccgcggcgggggacctttccgatgatgagatggaatcctatctgcatccggaggaagagcgaccggtataccggaagatgtcggccgggtcgcagcttcggctgggggttcggaacaccttcaaccttccggcgaaattcattttgcttttattggtgtacctgttcgtcacggcggcggtgctgagccagtacgcgtccacgaagcaggccctccattccaacgatttgatggggtacaacaattacttcacggatacctccccggagcggctgattctcaccaagaaggatgggagtgctttcaccacttcggattacgagagccttcagaagatggacaatgcggattacatcatcaagggcgatgcgggcatcgataccggaatcatgtttgagtccgacgatatcgatatcagcgggccgatgtatccggtgagctgcctgaaggaaaagccgaccatcggccgccttccgaagaaggatacggaggtggtgctggtggcggatccggaatgctattcctacgatgccatcaaggagatggataagaagattctggggaaaaaatactacatcgatgccctgaattccatggcgatacagggcggcgaccggctgatcaaggacaaggtgaccgtggtcggcgtggtttttctgagcgaagatgccggccggtccagcaacggaaacgtcatgatttacgtaacggataacgtggcggctcgggtgctggtaaagaccgcagcggcctcctccgccgtaacgctggactttagcggtacgaagagcgattacagcggcatgcaggtggtgtatccatccaagaaggtgccgaagggcgaggtatacatttccgaagaccaggcataccagttctacgaagaaggtgcggctcggggaaagaccatgggtcttcacgtgaaaaaccattattttgaggagtctcgggatttccgaatcggtcaggtgttcaaagccgacaatatccggagcctgctgggtctttccaaaaacaattacgacgaatacacgtccaacgtgtacatcaatccgtcggattacaacaagattttcaatcagggaaatttccagagcagctttttcatgaaggacgagaagctgtccgattccacggtgaaggccctggaaagcgccggatacaaggcgctggtgattaaggatacctttacggatgccaccggcgggtatgcgtttatcctgcggatgttcagcatggttcgcctggcactggaattcatcgtgctgttcttcatttcctatgcggtaatccggctgatcatgcggtcccgaaattcctattactctacactgcgaattctgggcgccagccggaagaatacggataacatcctgcgcatcgagctgctgctcatgatggcgatttcctacggcggcgttttggtgggaagcaacctggtacggcggggaatcgtcgcggtaccggcggtgaatgagcgactggcgttcctgtccgcgacggattatttcatcctgttcgtcggacttctggtgatgtccctcctgattgcgaagagatattcccataaaatcttcagcaagagcgctatgaaagtttacagagaggaggcgtagatatgattgaacttcagaatgtaaataagtatttcaaccgaaagaaaaacaacgaaattcatgtcatcaacgacacctccctgaatctgccggaaagcggcatcgtggcactgctgggcccttccggctgcggtaaaaccacgctgctgaatgccatcggcgggctggaccgaatcaactcgggaaaaatctacgtggacggggaatgcatcacccggaagagttccaacaaggtggacgtcatccggaatgcaaagatcggatatattttccagaactacaacctgctggataaccgcaccgtctttgaaaacgtggccatcgccctgcgaatggtgggcatgaaggatcgggaacaggtgaaggaacgggtgaactactgcctggaggcggtgggcatctatccgtatcggaacaagatggcggatgccctgtccggcggacagcggcagcgggtggccatcgcccgggccattgccaagaatccgaaaatcatcatcgccgatgagccgacgggaaacctggacagccggaacaccatcgaaattatgaacatcatcaagtcgatttccaaagaccgactggtgattctggtgactcacgagacggatatcgcggaattctacgcggatcgggtggttcgaatcaaggacggccgggtggtatcggaccgggagaacgatccttcccggaagctggactatcagctggaaaacaagatctatctgaaagatatggaacacggagtgcgtttccggcacgatggactgacggtggacgtgtatcaggatgagattcgggagacggatatcaaaatcgtcattcgcggaggcaacctgtacatcaataccggcggggcgttccacgtggtggatgaaaccgccaacatcgagatgatcgatgcgcactacagcgccatggattccaccatctacgaggacgtgcacttccggtacgacgagcacatgccggagagttttaaggcgaaatacacctccgtatataacgtctggaacatgttggccagcggcttccgcaatgtgcggaaattcagcctgctgaaaaaactcctgctcatcggattcgtgtgcgcggcggcgtttacttttaccgcggtgagcaacatcttcggtattttcaacgtgcaggagaaggacttcctcaccaccaacagtcattacatcaccgtggccaacccgaagcacgatgagtcgatgctgaagaaaattcggaagatgaacggggtaagctatgtgacgccgggagatacccggatttgcgtgaccctgccgatggacgattactatcagaccgcccaggcgtctgccggcctcaccggctccctgagccattcggaagagctggaaaccaaagatgtaatcgaaggacgtcttccggagaaggggcatgaaatcgtcatcgaccggatgattctggataaattcatcaaggccaaagcgggcaacatggtgggactgacttccgtaaaacaattcataggacggcggattaagataccgcacctgaaggattacgaaatcgtgggcgtttccgacaccaaatccccgtccattttcattccggcaagtcagaccatcgacgtgctgtccaatgcgaagaagggaacggatgatacggcgagtgatttttcggattccggcgaggatgacgagatggacgcagaggcttccggcgaggaggacaacgccatcgtgaattacgacctgcgttcttcggctcttcggattaagaagggatccgcaccgaagaatacctatgaggctgtggtgaacaattcccacaacggcgaggatgggtacaccatcggcaagaccctcaatcgaaaggtgaacgggcacaagctgaaattggtgggattctacaccagcgattatcagaacgatatcgtctacgtgagcaaggatacggttcggcagaattacattgcaaaacaaaaggtttgttcggtatacaccaccgacacctatgggacgctgaccacgctgcaggaagagggctattccgcaaaaataaattacgagcgggaccgcaccgattacatgcgaaagcaccgggacaacctgcgctccgcgctggtagtggcgggaatcattttgctgatttctctcattgaaatcttcctgatgcttcgatcctccttcctgtccagaatcaaggaagtgggtactctgcgggccatcgggctgaagaagcgggatatttaccgcatgttcaccggagaaattctggtgattaccgtgctgactgcggtgccgggtatcggggcggcgtattacctcctgtacaatttgatgcagggaatcgattacatcgccaaccagtatgtggtgaatccgggcattgcgctcctgtccttcggcgtgctggtgctgttcaacctgctggcagggctccttccggtattccgaacccttcggaaaacgccggcggaaatcctgtcaaggacggatatataggggcattttcatatccgggttcggcggtttgtcgagcccggaattgcattacgctgattgtagaaaatttcccgttgtgctataatcacaaataagtgtattaattatttggaggctggaatgagtaacgaaaaaacgaacgaatacaaagagatgagagggaattttatccacgacatcatcgacaacgacctggaaaccggaaagtgggatcatatcgccactcgttttccaccggaaccaaacggctatctccacatcggacatgccaaatccctgtgcctgaacttcggaaccgcattgaagtacggcggaacctgcaaccttcgttatgacgacaccaacccggtcaaggaagacacggaatacgtggacgccatcgaggaggatgtacactggttgggattccagtggaacaagagactgtgggcatcggattatttcaatcagatgtatgaagccgcagtgtctttgattcagaaaggaaaggcctatgtgtgccacctgacggcagagcagatgaaggaataccgcggaaccctgacggagccgggaaaagagagcccatatcggaacagaagcgtggaagagaacatggagctgttccggcgcatgaaggacggagagttcggtgacggagaagcggttctccgtgccaagattgatatggcatccccgaacatcaatatgagagatccgattatctaccgggtagcgcacgtgacccaccacaatacgggggacaagtggtgcatctatccgatgtacgatttcgctcatccgattgaagatgccattgagggcattacccattccatctgtactttggagtttgaggatcaccgtccgctgtacgactgggtgctgcaggaagtgggtctgtggccgaatccgccgcgtcagattgagttcgctcgtctgaacatcacccacaccctgatgagcaagcggtacctcaagagaatggtggacgaaggtcatgtagacggttgggacgatcctcggatgccaaccatcgccggcatccgccggagaggatatacgccggaagcggttcgggcgttctgcgacgaaatcggtgtggcgaaagccaactccaccgtggatattgcgcagctggaagccgcagtccgggacgatctgcaggataaagtgccggccgtgcacgtagtgaccaacccgattaaggtggtaatcaccaactatccggagggtcagattgaaatgtgcaccgtagaaaataaccggaaggttccggagctgggcgagcgagaggttccgttcggccgggaactgtggattgacggagatgattttatggaagtaccggtaaagaagtatttccgtctcttcccgggaaatgaagttcgcttcaagggtgcatactacattacctgcaatgaagtgattaagaacgaagatggatccattcgggagcttcattgcacctacgatccggaaacccgcggcggagacgcaccggacggccggaaggtgaagggtaccatccactttgtggaggctagcaccgctgttcggatccgaattcgggagtacgattacatgatgattgaggacgaggaaggaaattccgtattcaacgaggattccctccgcgacacttggggttatgcagagccgtccatcaaggaggcaaagccggaagaccgattccagttcttccggaagggatattatattgcagacaggaagctgactaccgaggatgagaaggtatttaacagcatcgtaggtctgaagagctcctggaagaagtagcatagacagagggagaaaacattggataccatcaatggcattgtgaattcaatattatctctggcgagttcccatcccgaaacggcaaagtacatcaccaccggactccggtgggtgttcgtactgctggcggtgtggattctgttgatgtgcatcatttcattgctgtccaccagagccacgccggaggtatgggggtatctccacgtggaaggaggagagggcattcccatcacccattgggaaaatatcatcggccgatcctcctccgtggatcttcgaattaaggacaaaaccgtctccaagagccaggctttgctgatccggcagtcggacgagaagtggatgatcaaggacctggggtctaccaacggaacggtggtgaacgactggaagctggtgcccggaaggcggtatatgatcgagccgggggacaaaatcaccctgggcggggtgcgtacgaccttggcctccatcagcttggaggaaactcgcaacaacgaagaacttcggctgatggataaagaaccgctgtcaccgtggtcggcgatgctgggtattacggcatttcagattctcgctgtggtgcagctgattctgggaatggggacgaaagtgacggtgaccgcccttctttccattttgctgctgggtgtggtgatgtgggtgtacatcctcaccggaaaggcgatgggacgaaagggttttgagattgagctgatcgccttctttatgtccaccatcagcctggcgattactgcatcctcggagccggagcgaacgttcacgcagtttgtatccgttgtcatcggcctgctgatgttcttcgtcatctgcctcttccttcgggatttggatcggacggagcggattcgtcccatcatggcagtggcgtcggtgcttctgctggccttcaacctggtgtgcggccagattaagtacggtgccgccaactgggtgtatatcgggaacttcggttttcagccgtcggagctggtgaaaatcgtcttcgttctggtgggtgccgccaccctggaagagctgttccagaagaagaacctgatgcagtacgtgctgttttccttctactgcctgggatgcctggcggtgatgggagacttcggtacggcactgattttcttcgtcacatttctggtggtatcctttctgcgaagcggcgatttgtcccggctgattctcaccggagtcggtgccggaatcatgggactgatgattcttcgttttatgccgtatatcgccaaccggttttccatctggggacatgtgtgggacgatccggcggacaaaggataccagcaggttcgaaccatgtgctacagtgccggaggcggactcctgggacagggcgccggaaacggatatctgaaaacagtgggcgcctccaatacggacctggtattcggaatggtgacggaagagtggggcttgatcatcgctctgctgctgattgtgtgcatcatcaccctgtgcctctttgcggtgaattccatcgtggccggacggtccactttctacaccatcggggcctgcggtgcgtccacgttcttccttttccagaccatgctgaacgtgttcggtgcggtggatttgttcccgctcaccggtgtcaccttcccgtttgtgtcggcaggaggtaccagtatgatggcctcatgggccatattggcattctttaaagcggcggatatgcggaaggatgccagtatcgccataaaacggtctaaggtaaaagtatctctgcaggattatgcggaggagaccgatgaggacgcagaagaggtgtgaggcgactgaaggatcgatagaaagaagaggagctatccatgcgtaaagtagaaagacgtgcaacaatatgtctgcttctggcagcggtcctgttcctggggaccggggtgttcgtgtggcgttttgtgactcagggaaagacctgggccagcttctccggaaatctgcagatctacgtggatggaaacctgaaccgaggaaccatctatgaccgccacgggacgcagcttctgaagtgcgataaggacggtacacactattccgacgactcggagcttcggaaagctaccgtgcatacggtgggcgatccggccggaaatgtggccaccggtgccatcaacatgtggagcggggacctgatcggatacgatctgctgaacggaacttacgacacctcggcagagggcaagaaaatcacgctgaccatcgatgcggaagccaaccggacggcctatgaacgactttccggcaagaccggtacggtgggcgtctataactacaagaccggagagattctgtgcatggtgagtacgccggctttcgatccggagctggatcaaagcggaaatgacagcggagactccatctatttcaacaatttcctgcagggagccatgacaccgggatccaccttcaagttggtgacggcggcttccgccttagagtccggcgtgggcgtagattccttccgattcacctgcgacggaaagaatcgatacaataaagatgatatcacctgcacctcggcccacggcacggtgaacttccgccaggcccttgcggtatcctgcaacggcgccttcggaaaactggcccgggaggtgggtgccgcaaacctttccaccaccactcagaaagtgggactgaccaaatccgtggatgtggacggaatcaagactcaagcaggttccttcacttttccggaggacaacgaggtgaatctgagctgggcaggcatcggtcagtacgatgaccaggtgaacccgtgcgccatgatggtgtacatgggcgccatcgccaacggcggcgagccggtccagccgaagctgatgaaatcctccagcttcctgtccgccggcaaatccggtaaatccctgggagaatacatcagttccgaaaccgccgacgagctgcgctccatgatgaagaacaacgtcaaagtaacctacggggagtccaacttctacggactggatctctatgccaagtccggtaccgcggaaaccggcagcggagaagacggctggttcgtgggattcatcgataatgaggattatccgttggccttcgtggtatggatcaaaaacggcggcaccgggtacgcatcggcgggaccggtggcgaaggacgtgctgaatcggattatcagcaataatgacagtgaataaaaagatttttcacttttactagagggttcacaaccaacaaacctgcaccgtttagctgagattgctttccggatgcaggtttttttgttcctaggcgtaagcaaataagacaacagacagggaaagtccggactatgttggcgggagaaacacaagaaaggtagagaaggaaaatgaacaattgacggctatattgaatgatataacatgttttgctacaataagcgtaggacttatatgattgaatctaggaggttttatatgaagacagacgtacagattgcacaggaagcgcagatgaaaccaattgtggaggtcgcatctcagttggatatttcggatgatgaattggagctgtatggaaaatataaggcgaaaatcagcccggatgtgttggagcggctgaaggaccgtcccaacggaaaactggtgctggtaaccgccatcaacccgactccggccggagaaggaaagaccaccacgaacgtgggactgtctatggcactgaacaagctgggaaagaagaccattaccacgctgagagagccgtctctgggaccgtgcttcggcattaagggcggcgctgccggcggcggatattcccaggtggtaccgatggatgatatcaacctgcattttaccggggatttccatgccatcacttcggcacacaacctgttggcggcaatgctggataaccacatccatcagggaaatgcgctggatatcgtaacgaagaaaatcgtgtggaagcgcgtgatggatatgaacgaccgttccctgcgccacatcatcgtcggcctgggcaagaagggcgacggcgtgatgcgggaaagcggattcgacattaccgtggcttccgaaatcatggcaattctgtgcctggcaacggacatcgaggatttgaaggcgcgcctgtccagaatggtggttgcgtacaacagcaagggtgaagcggtaaccgccggcgacctgcaggcaaccggtgcgatggcactgctcctgaaggatgctattaaaccgaacctggtacagacgctggaaaacacaccggctattattcatggcggaccttttgccaatatcgctcacggctgcaactccgttatggcaacgcagacagcactgaagctgggcgattacgtggtcaccgaggccggattcggtgcggacctgggtgcggagaaattcttcgatatcaagtgccggtatgccggactgaagccggatgttgcggtaatcgtggcaacggttcgtgcactgaagatgaacggaggcgtggcaaaagataatctggcagaggaaaacctggatgcactgaaagccggatcggcgaacctgcttcgccacctggacaacgtggcaaaatacggtgttccggcagtggttgccatcaaccgtttcccaaccgatacggaagcggagctggaactgctgagagatctgtgcaaggaaaagggcatcgacgtggttctgtccgaagtatttgcaaagggcggcgaaggcggaatggagctggcaaaggaagtcatcaacatctgcgaaaatcagaaatccgatttccacacgctgtatgatgtgaacgattccatcgaagataaaatgaacaccatcgcgactgaaatctacggcgcggatggcgtggacttcaccgcagatgctctgaagcaggttcgggagctggagaagcttggcctggaccgcctgccaatctgcgtggcaaagacacagtactctttcaccgatgacccgaagaagctgggtgcaccgaagaacttccgaatcaccgttcgggaggtaaaagtatctgccggcgccggattcatcgtggcgctcaccggatccatcatgactatgccgggtctgccgaaggttccggctgccaacggaatggatatcctgtccgacggcaccatcatcggattatcttaatagacaaagcagggttagcctcgactgctctgagaataagcataagaaaagacctgtatcgtcagctaaagccagacgatacaggtctttcatgttttcacttggcggcgggctcgggacttggtgcaagaaatcccgcaaagctttgaagtaccgttgtgctattcccgtgtccggtcttcgcaatccggtgcgcaggaattgattctcgggcattcggacatgaaattatccacgtgattgcaaatcgcttcgaaggactcgttgctgatatcgtgctcgatgttgcaagcatcctcgtcggcaacctccttgtccacgcccagcataatcagaaactgggaaagcatcttgtggcgttccaggattttatgagcgatggccatcccggaatcggtcagcgtaatcagtccatcgttgttcatttcaatatagccgttctcccgaagccgtttggtggcgtaggaaacgctcggctttgtcacattcagatgttttgcaatgtcaatggagcgaacatacccgttctgttccttgagcatcagcatcgtttccagataatcttcggatgatttccgtatttccatggtggtgaatcctcctgtcttgcctgtataatctctacatagaataccacagttagaagtgtaaaacaaggtatgacgcgtttttgttcaatccgtctaacctccggatatcccgccataaaaacactttcgccatccaatatgagtattccgtgaagtatttcaaagaggggttgacttccaaagcggaaacgattatactaactgtacaagaaaagtaaagtaaacctttcgaatacagtatagtttgaaaaaggttcatgaaagagaggtaagaattatgagtaaatgggtatgtcaggtatgcggatacgttcacgagggagatcagccgccggaagaatgtccggtatgccacgttggcagcgataagtttacaaaacaggatgacgaaatgagctgggcagctgagcacgtagttggcgttgcacagggcgtaagcgaagatatcctggcagatttgaaagcgaacttcgaaggtgaatgttctgaggttggtatgtatctggcaatggcaagagtggctcacagagaaggctatccggaagtcggcatgtactatgaaaaggctgcttacgaagaagcagagcacgctgcaaagtttgcagaactgctgggcgacgttgttaccgacagcaccaagaagaacctggagctgagagttgctgcagagaacggcgcaactgccggcaagaccgacctggcaaagagagcaaaggctgcaaatctggatgcaatccatgataccgttcatgaaatggctcgcgacgaagctcgtcacggcaaagcattcaagggtctgctggagagatacttcggctagaaccggcaccgttagacttgaatatttggatgtctcactgattttttcggcgagacatccttttttttatgcgtctgttatcgtacaaaagaatccaagaaatacctttataaaaataatgaataactatagtttttttcttgacaattatctgtcagagggtataatcaagatgagagtagaccacggtctataacttagtcagaaagagagataaagagatgcacgcgattacgaatattcagaaattctcggtgcatgacggtgatggaattcggacgacggtgttcttcaaaggatgtcctttgcactgcgtttggtgccataacccggagacccagaagtataatccacagatgcagtttgatgaagcaaaatgcgttggatgcggattctgtatgaaagcctgtccaaacgatgccatcaagattgagaacggcaaggcggtaaccaacccgctgaagtgcatgctttgcggtaagtgcgtaaaggcttgtccgagcagcatccgggatatcctgggacatgaacacgagattcgtcctttggtgaaggaacttctgaaagaccagatgttctatgaagaatccggcggcggagtgaccctttccggcggcgaggttatgagcgtcgatccggaatacgttctggcgctggcaaaagaattgcatcgtcagggcatcgacatcacggtggacacttgcggtgaggcgccatacgaacggtttaaggcaatgctgccgtacgtaagcaccttcctgtacgatgtgaagtcgatggatccggagattcacaagaaatacatgggggctgacaacgcccggattttggacaacctgtgccggctgagcgcagacggagctcggatctacatccgaattccgatgattaaggaagtcaacgccacggaaaagaacattcgggcaactatcgatttccttcataaaaacaacattcatgtcgctcaggtcaacctgcttccgtatcataacaccggatgcagtaagtacccgagaatcggaatgacatatgaaggtgcggacctgcaggcaccgacaaaagaagaaatgcaggaatttgcggagatgttcaaagaagcaggatatgcgaataccaagatcggaggttaaaaaatggcaaaacgcggtatgaacgaaagaatccagcgcctgagagaacagagtgtaaccacgccggttcacatcgacctggagagagcaaaaatcgaaacagatttttacaaggaaaacgacggaaagtattctgttccggtaatgagagcgatgactctgaaggaatacttttccaagaagaccttgtacttcggcgatgatgaactgattctgggtgagaaaggtaagaacccacaggcttccccaacattcccggaactgtgctgccacagtgaagaggatatgaaggttatgagcgaaagaaagctggtttccttccataccacagaagaagatcgcaagctgcaggctgcagaaatcatcccgttctggaagggcagaaccattcgtgagaagctgctgtccagaatgacaccggaatggcatgattgctacgaagccggcatcttcaccgagttcatggaacagcgcggcccgggacacacatgcggcggcgagcaggtattcactaccggctacttggattacaaggaaaagattaagaagaccatggacgctctggattggatgaacgatccggaagcttccgataagatggaagaactgaaggcaatggacatctgctgtgatgcggtaatcatactgggtgaaagataccacgagatggctgttgagaaggctgcagcggagaccgatccaaagagaaaggcagagctggagcagattgcaaagaacctggaagttgtaccggcacacaagccacagactttctggcaggcaattcagctgtattggttcactcacctggcagtaaccactgaactgaacccttgggacgcattcagcccgggcagactggaccagcacctgaacccatactacgaagcagacgtagaggcaggaatcctggacgacgagcatgcactggaactcctggagtgcctgtgggtgaagttctacaaccagccggctccggtaaaagtaggtatcaccctgaaagagagtgcaacatataccgactttgccaacatcaacaccggtggtgtaactccggaaggaaagaacggagttaacaatgtcagctacctgattctggactgcatggacgagatgaagctggttcagccgaactccaacgtgaccatcagtaagaagactccgcagaaattcctgaagagagcttgcgaaatctccagaaagggatgggggcagcctgcattctacaacaccgaagcgcagattaccgagctgattaacgccggaaaatctctggaagatgcaagaagaggcggatcctccggctgcgtagagaccggtgcatggggaaacgaagcatatattctgaccggatacatgaacattccgaagatcttccagttgactctgttcaacggatttgatgaatattccggcaagcagctgggtctgcagctgggatatgcgaaggacttcaagacctttgacgaactgtggactgcattcaagaagcagctgaagcactttgttgacatcaagattcgcggaaacaacgtaattgagagactgtacgcagaggaaatgccggcaccgtgcctgtccgttgtaaccaacgactgcatctccaacgcaaaggactacaatgccggtggtgcaagatacaacaccaactacatccagggtgttggaatcggaaccgttaccgactgtgtagcatccgttaaatacaatgtattcgatgagaagaacttcaccatggaagaactgatcgatgcaatggaacatgacttcgaaggctatgattacatctacagcctggttcacgataagactccgaagtacggaaacgatgacgattatgccgatgatctgatgagagaaatcttcgatctgtatcacgacaccatcgttggccgtccgaacatgaagggcggaaagtacggcatcgacatgctgccgaccacttgccacgtatacttcggtgacgttatcctggctaccccgaacggcagaaaggctcacaagccggtatccgagggtatttctccagagaaatccgcagataccaacggcccgaccgctgtaatcaagtcttgtgcaaagatggatcacctggcaaccgcaggtaccttgctgaaccagaagttcacaccgaacgtagttgccggtgaagcaggtctgaacaacatggccagcctggttcgttcctactttgcaatggatggacaccacattcagttcaacgtagtagatcgtcagactctgattgaggctcagaaacatccggaagatcacaaggatttgattgtccgcgttgccggatacagtgacttcttccgtaacctggacaaaccgctgcaggacgaaatcatcgaacgtacggaacagtctttcgaataatataattgcttttaccataggcgttcctctagcgggagcgcctgtggcataaataaaaggtgttaaccaattaactatctcaagtgtgaagaaaaggagaatgaaatgaaacttggatttatcggatgcggagtaatggccaatgcaatgatgggcggcattatcaaggccggcctgtacaagccggaggacatctggggtgcagatcctttcgaaggaagcagacagaagacaaaggaagtaaacggcatcaatgtaaccgatagcaacatcgaagttctggagaactgcgatactgttttcctgaccatcaagccgcagtactatgccggcgtaatcgaggaaattaaggatcacgtaacagataagcacctgttcatcagcatcggtgccggcagaactctggcatatctggcagagcagttcggcaagccggtaaaaacagttcgtgttatgccgaataccccggctcaggttggagagggtatgtccgctgcttgcccgaacgaatatgtaactgaggaagaaactcagcgcgcactgaacatcctgaatgcatttggtaaggctgaaatcatgccggaaaacctgttcgatatcgttaccggtgtgagcggaagcggcccggcttatgtgttcatgttcatcgaagcaatggcagacgctgccgttaacggtggaatgcagagaaagcaggcgtacacattcgctgcacagaccgtactgggcgcagcaaagatggttctggagaccggaaagcacccgggcgagctgaaggacatggtttcttccccggccggtaccacaattgccggtgttagagagctggagctgggtggtctgagaactaccgttatcgaaggtgtaactgcagcgaccgaaaagtccatcgctatgcagagcgcaaaataagacactacttccttagtgggttttataattgccggaggagttgccgcagggatgcggcagctcttctatcctagggataataaaaaaggcttgcaattagcatagcgaatgtgtatactatattagtagtgcgtttgatttgagaccacgaaaacacttttaaaaagaatttaaaaaaagtgttgacatgaggctcaaaatgacgtatactataggagtcgcaaataagggacgaattaatccgaggtagctcaatggcagagcaaccggctgttaaccggtaggttgtgggttcgagccccaccctcggagccatttattttttacgccggaatggcggaattggcagacgcccgggacttaaaatcccgtgagaagtgattctcgtaccggttcgaccccggtttccggcaccaattcttaatatcgcggggtagagcagttggtagctcgtcgggctcataacccggaggtcgcaggttcaagtcctgtccccgcaaccacacgaatttgaaatcgaagccgaaggcttcgattttttttatgcccagaatccgataatctgacgaaaacgatggagctttaagtaaaactgagtataatatatacaagaatcggcgtgattgaaaaaagaaatgcgatatgtaaaggaggtatattatggcaatgaagagattactgattgaatttggacagggcgtggatatgcacggcggcgaccagaacaatgcagtacggaaggccacggaagatgccatccatcactgctgcatggcgggtatctcagagatttttgagattaccgaccgaaagaagcaggcatttatcaaggcggacatctatgcgccgcatccggaggaagtggatccgaaaatcgtaacggattatctgcactggtggaatgtggaagcagaggtgcatcacggcggtgcaaacccggaggggattgccttgaacggaaaaccgaaaaccgagattaccatcgcaatcgtcgcacttaccgtgtacgtggatgcataaaagaaagacggaaacctatgactttaacgcagcgcaaagattctttgcgctgtttttatgggcgatgcaaatgtaattggatagactttcggctataataaaggcagaatcatcttgcaaatgtttttcgggagagggtgtcgaatatggaacttggaagaagaattacggagctgagaaaagcaaataacctgacccaggaggggctagcggagtggtgcagtgtcacgcggcagaccatttccaattgggaaaacgggaaaagctatccggacctggagatgctggtttttatcagcgattcttttgatatttccttggacgctctggtgaaaggagatggcaagatggttcaggagattacgaaggaacagcgcaaggggcgttttcagaactataagatggcggcgctcacggtggggctgcttctgttggtgggactggggttgttcgctctggaccatacctacgttcggctgagcgccgaagattgcggtgcagaggtggtggaggtgaaatcaattcatctcgacgatgtgaaaatcgatcggggtcggaagatggctttttataaatttccaaacgacaatacgagaacctactacggggtgaacgggaccaaagccccgggcaagggaatctacgtgttcgagggggaagagtacaagcaattgatgaacagcgaagcggcatcttatgtaacgctgaaggtaccggagcgagccggcatttcgctgggattgtctgagacgagggcggacactttggagctgagcctggcgatgagaaactccgaccgggttttcgggaagaagggcggaagcgccatttcgacggatatgtggttcagtgatgtgaatcgaatcgtggatgcgaatgcgggcaattccactgtgtggaagaaaagcaagtagatgtagaaaaaatagaatgagaggaaatctccgacggccgcggatgaggcggcgtcggagattttttggtgaggagcagaaggaaacggctccgccgtttccaacatctgtgtaagtgcgaccggacccgggacgcttcgccgccgaagcgtcccttcggacttgggagacgtggtgcttctaaacgaaggaacaagggctagcggggagtgaagcaccacgtccggggcgccgaaaactcatttggctcgggggacgtggtgcttctgaacgaaggaacaaaggctagcggggagtgaagcaccacgtccggggcgccgaagactcatttagtacgggagacgtggtgcccggcgacgaagtaatacgggctggcggggagtgaagcaccacgtcctgggcgctgaagactcatttagctcgggggacgtggtgcccggcgacgaaggaataagggtttgcggggagtgaagcaccacgtccggaccgctgaagactcctttagctcgggaggcgtggtgcccgtcgacgaagaaataagggttagcggggagagaagcagcacgcccggaccgccgaagactcctttagctcgggagacgtggtgcccggcgacgaaggaataagggtttgcggggagtgaagcaccacgtccgggtcgccgaagactcatttagctcgggggacgtggtgcctggcgacgaaggaataagggtttgcggggagtgaagcaccacgtccggagtgccgaagccccaattcgctcgggggacgtggtgcccggcgacgaaagaataagggtttgcggggagtgaagcaccacgtccggggcgctgaagactcatttagctcggaggacgtggtgcccgacggcaaaggaataagggctggcggggagtgaagcaccacgtccggggcgctgaagactcatttagctcgggggacgtggtgcttctgaacgaaggaataagggctggcgggcgatgaagcaccacgcccggccggccgaaaccagtgttcgctttgccggtcgcaaatcaaggctttcgctgaccgtctagagccttgacaacccgatgtactcaaggtatggtgtaaccaagaaaggagtcgcggcggaatcctttaagtttgtacgaattccgttgcggtgatgtgcaatgggggaagattttaaatgggtcaatgtggacaaacgagaatatattgagccttttgcatttaattacggcgctagattccatcagagtatgtccagagagaacgaggtacgaaatgcgctgcacagcttgttgagcgatgagtggaaaggggatcgtattctttggattggagattcctgcagtgtgaaagaatcttatcccaacgatttgattcgggttctatacgagcaaacggtggaattcggttatcccgaagatgtgtttgatttaatttgcgagacatatcaggatgtatccggtttgttcaaagaagcggaagaaatggtgcgagaatatatcggagcttatattgcagacgttagagcagggttagatattcccaatgagttcggaattgacatcaatcatccgttccgcggactgttccaaagggaaaccgaagaataccactacacgataaactataccaagggaatctactatgaactgggagagactgcggttgtggcacgtgtttataattcagatttttcgacggaaagatattactatgaagtggaggaagatccgctgtcgcttcttttgggatatgggggaaaggccaaaccgggagaatggctgggggatgcaattggcgtatccaaccagcgaccggaaggattctttcggattcctcgaatatacctgaaatactatccttactatcataacggctgcgcactgtctcgcaggatggtccgg

SEQ ID NO: 302 - DNA, 2313 bp, Unknown
  16S sequences of unknown bacteria
gttcagaatcgaacggcgttttttctatggtttagtgctgtgcttttgccaactcggtcagctgggtgaacgcagccttgtcattgaccgccagctcggcgagcatcttgcggttaatctcaatgccagcttttttcagcccattcataaaggtggaataattcattccattcagcttgcaggcagcgctgatacgggtgatccacagtctgcggaaatcacgcttcttcaggcgacgaccggtgtatgcatacgtcagggacttaaacacggcctgctgagccatcttaaaatgcttggatttggaaccccagtagcccttggcgagcttcagggtcttatttcttcttttgcgcgtcatcattgcgccttttactcttgccatagtaaattgcctcctatatcttcagcttgatcgcggtgtcgtagttcgattatttgtaagggatcatcttgcggaccgtagcggacagggtcttgtccacatagccgccggcgcgcaggcgacgggtgcgcttggtagtcttcttggtcaggatatggctcttgttggccttggcgcacttgactttaccggttttggtcaggttgaatctctttttggaagcactgtgagtcttcagtttcggcataataggttctccttccgtttgttcgcggcgcatcgccgcatccgtttactttttctggctgctgggcttcggcgcaatgaacatcgccatatggcgaccctccagcttgggcggcttatccatcacggcaacatcggcacactcctctgcaaaacgcttcagcagattctcgccgatttcggtatgcgccatttcgcggccgcggaaacggacagtgaccttgacgcgattgccctcggcaacaaacttttgcgcgtttttcagcttcacattgaaatccccaatgtcgatgctgggcgacatacggatctccttgatttcgaccacatgctgatttttgcgggcctctttctccttttttgcctgttcaaaacggaactttccatagtccagcagtttgcagacgggcggtaccgccgtcggagaaattttgaccaggtcaaatccctgttcctctgcgatcttcagagcctcatccgcagacataataccaagctgttcgccctggccgccgatcaggcgcacctccttgtcgcggatctcctcgttgatctgatgagccacgttgctaataccgaagcacctcctaaaaataatgcttaattgcaaaataaaacgcggacgccgtaaggcacccgcacacaaacaaaacgcataaactatgcgttttcttctcctgttaacctttttgcataaaagcgaaaggtgagagcggatgccaccgttcttctttgttttacttggtaagtatactctctcatgctttgcttgtcaaccacattttacaaattttttcaataccatttctgccgcagcgtgcgccacaggaaaagccgccaggacgcggtgcgtcccagcggccccgacgtcatttatttctgatacggcgccagttccagccggcagaaccacccctgcggatggccgcagaccgggcattccttgggcgcaacggtagcacgggtcataaagccgcagttcaggcacacccatccagtctcctgttcgctgatatacagctggtcccggctcatataatccaggaacagctggaaacgctgagcatgggtcttctcaatttcagcaatcagtccaaactttccggcgatttcctgaaagccctcctcatgggcgattttggcaaaatcgggatagatgagcccatgttcctcttcctcgttatgaacggcataattaagcagcgccctggtatcctttttttcatccacaggatagcccgccgtgatctctacactgctgcagccgcagccgcgcagatattcatagaaaatctccgcatgctctttttcctgtcccgccgtgtagtggaacagcagctccaaaacggggtatccctcctttttcgcggcagccgcagcaaatgtgtagcgattgcgcgccatgctttcgccggcaaacgcacgcatcaggttctcttttgttctgctattgttcaattccatagtgaccctccaataagattttgcgcgacgtgtcgcgcatacctttattgttctttttttccatccatttatacgtcaaattttccaatccatgtataaactgccggctgcaaggttacaataggtgcatactccagttctgggaaggaggtgccctcaatgaaaaacaataacgagaacaagcagaaccagaacagccagaaccagcaggatcagca

SEQ ID NO: 303 - DNA, 26201 bp, Unknown
  16S sequences of unknown bacteria
agaccgccgacatggtatttatcacaagcggcatgggcggcggaaccggaaccggtgcggctcccatcgttgctcagatcgcaaaggaaatggatatacttaccgtcggtatcgtgaccaagccattctcctttgagggtaagcgccgtatggaacaggccgagatcggtattgccgctctccgcgaaaacgtcgacagcctcgttgttatccccaacgagcgtctccagtatgtttccgacacaaagatcactctcaccaacgctttcaatattgccgacgacgttctccgtcagggcgttcagagtatttccgagcttatctccattcccgcgcttgtcaacctcgactttgccgatgttactgcggtcatgaagaattccggctatgctcacatgggcgtcggtgttgccaccggcaaggataaggccgaggttgccgcaaatgcagccatcacctccaagctcatcgagacctctatgaacggctccaagggcgttatcatcaatatcaccggtccttccgacatcggtcttgaagaagttactgcggcttctgccatcgttgccgaggcggccgacgaaaacgcaaacatcatctggggtgctcagatcgacgacagccttgaggatgaaatccgcgtcaccgttattgccaccggtgctcccaacgagaacgacaagcatcgcaagagcagcggcggagccctcgacgatattttctcgtccaccgacaatgacgacgattattccgacattatgggaatttttgatcagaaataagttttgaatttttctgctcctccgtaccctgtgcgggggagcttttcaataagaggtgaaacatggggaaatttacttcagacgaaataaaaaaatcatatttgaagcttttaaatctgcgcccggtaaacaaaataaccgttcgggatattgccgacgactgcggaattaaccgcaacaccttttactatcatttcgccgatttgccgacccttctcgaggatatgattgaggagcaggccgaggaaatagtcgatagctttcccacaatcggaacggttgagcaggcctttgacgttgccatgaaatttgcacttgacaacaaaaaggcggcctatcatatttacaactcggcgagcagagatcttttcgacaggtttatgatgaaaatgtgcaactatgtcgtttcccgttatctcgattcgctttttgccgaacaaaatgtgtgcgaaagcgaccgcaggcttattgtgtcgctttacgcttccgagtgtttcggactggtttacgattggcttttaaacggcatgaagggggacataaagggcgatttcctccgcatatgcgagctgcgccgcggaatggtcgaggagaccgttaaacggtgcaaacatatataatctttgggacagccgacgggctgtctcttttattttgtgcaaattcgccccgttgcctaaaaatgtgacatgaaatgaaaagtgcatatttatttgatacaccgacgtgtatataatgagaacgaaaaagatagaaaaggggtcagtttatgaaattagcacgagcggtagtcaaattccgagtgcccattcttatcatcacagttctcttgatgataccgtcatttatcggaatggccgctacccgcataaactacgacatgttgacctatctgccgagtgatatggatacggtcaaggggcaggacattctgctcgacgagttcggaaagggtgcgttctcatttataatcgttgaggatatgcccgaaaaagacgtggcggccttaaaggagaaaatcgagcaggtcgaccatgtggaaacggcactttggtatgattctcttgccgacatctcggtgcctatggaaattcttcccgacgaggtgtataacgccttcaacagtgaaaactccaccgttatcgcagttttctttgacagctcgacatcttccgacgtcaccatggacgctatcagagaaatccgttcgataaccggagaaaaatgcttcgtttcgggtatgtcggccatggttaccgaccttaaggacctttgcgaaaaggaagagcccatatatgtcggtatagcggttgtgcttgcctgcgttgccatgatgcttttcctcgacggttggctcattcctttcgttttcctgctgagtatcggtatgatgatcatgctgaacatgggaaccaacgttatattcggagaaatttcctacataacaaaggcgttgtctgcggtgcttcagctcgccgtcacaatggactattcaatcttcctgtggcacagctataacgagcaaaaggaaaaaatctccgaccacaaagaggcaatggccgtcgcaattcacgagaccttcacctcggtgcttggaagctcgataaccacgattgccggctttatcgcactttgctttatgtcctttaccctcggtttcgacctcggacttgttatggcaaagggtgttctgctcggagttatcggctgtgtcaccgttcttccttcgctcattcttatattcgacaagcctcttaacaagacccgccaccgttcgcttattcccgataccaagaaaatggcgacaaagcttgtcaagattttccccgtattccttgtcatatttgctctgcttatcgttccggcctattacggatacagcaagaccaacagcgaggtatactacaacatcggcgagtgcctgcccgacgacatggcatatgtaatcgccaacaccaagctttcggaagaatttgacatggcctcgacccatatgcttcttgtggacgcgaacacgcccgacaaggacgtccgttccatgataaaggaaatggataaggtggacggagtcaaatatgttctcggcatggagagcgttgtcggttctctcgtccccgaggaaataattcccgacagcataaagagcgtgcttgaaagcgacaactggaagttaatgctcataaattctcagtataaggtcgcaagcgacgaggttaacaatcagataaccgagcttaacaacattcttaaaaaatacgacccgaacggaatgctcatcggtgaggcgccttgcaccaaggacatgatagaaaccaccgaccacgacttccaggttgttaacgcagtttcgatacttgccatattcgtcataatcgccgtggtggaaaagagcataacacttccctttatactcattgcggttatcgaacttgcaatattcataaacctcggccttcctcactatctcggccagtcgcttccctttatcgcgccaatctgcataagcacgattcagctcggcgcaacggtcgactatgcaattcttatgaccacccgttataagagcgagagaagagcgggagcctccaagaaagacgccgtcaccaccgcgctttacacctccattccttcaatcatagtcagcggtatgggactttttgccgcaaccttcggtgtggccgtctattcggatattgacattataagctccatgtgtatgcttatggcacgaggcgcaataatcagtatgattctcgttatcttcattctgccggcgctgctcagactttgcgacccggttataagaaaaaccaccctcggcatgaagccgcaatccaaccgaatttgagaaggaggaacttcattatgaataaaaagatgaaaagtgtgcttgctgtggcgctgtcctgctgctttgtgggaagcggaattgccgcaaccgcccttgccgcaaacaacgacaaaaaagaagaaacgaccgccgctgtggaaactgccgaaacttccgacagcagcgtaaacagtaaggacgaaaccgtttatgtgcttgcgggcgccgacggttcggttaaaaaaatcatcgtcagcgattggataaaaaacagtcttaattcaaacaccattgacgaccaaagcggtcttaccgacgtggaaaacgtcaagggcgacgagacctacaccatgaacggcgacaacatgaagatctgggacgcacagggcaacgatatatattatcgcggcaacatcacaaaggatcttcccgtcaaccttaagctcaactatactctcgacggcaaggcaatttctcccgacgatcttgccggaaagagcggtaaggttaccattcgttacacttatgaaaacaatcagtatgaatatgttgagatcgacggacagcagcagaagatatatgttacttttgccatgctgaccggactgctcctcgacagcgacaatttcagaaacgtcgaggtcaccaacggcaaaatgataggcgacggagaccgtatggccgttatcggaattgccttcccgggacttaaatccaatctcgacattgattcggatgaggtcaacattcccgattatgtggaaatcaccgccgatgtcaccgatttctcccttaccaacaccgtgacgatagccaccaacgaggtgttcaacgcagttgacacaagcgagcttgacagccttgacgatctcggttcttcccttgatcagctgggcgacgccatgaatcagctgcttgacggttcttcgcagctttacgacggactttgcaccctccttgaaaaatccggtgaacttgttgaaggcattgacaagcttgccgcaggcgccgcacagcttaaggacggagccgcaaatctcgacagcggtgccggaacactccaaggtggactttcgaccctttcttcgggactttctcaaatttccgccaacaacgataccttgaacggcggttcaaagcaggtctttgaaacccttcttgccaccgcaaacagccaaatcgccgcatcgggagttaccgcccccgagcttaccatagacaactatgcgaccgttcttgacagccttgtggcttccatgagcgaagaggcaattaccaagcaggttaccgacaccgtaagagctaacgaggcacaggttcgcgccgcagttaccgccgcggttaccgagcaggtgagacccaaggtggaagaggttgcaagggcaaacgtaaaggcagccgttgtttcggccgcaacacagatgacggttgaacagtatgacgccgcagttgcctcaggtcagatccccgaggctgttcagcagcaggtaaacgccgcgattgaggctcagatggcctccgacgaggttaaggctcagatagaggcaggtcttgcggctcagatggcttccgatgaagtcaagggcatcattgacacccaaaccgaggctcagattcaggctcttatcgctcaaaatcttcccgctgcgcttgaaaaggcaaaggccggcgcacagagcctctcaaatcttaaggttcagcttgacagctatgccaccttctattacggacttaacacctacaccgaaaaggtttccgaagcatcaagcggcgcaagtcagcttaaggacggctccgatacattgaaggcaggtaccgcacagctcagcgccggcgctgccgagctttacaacggaattctcacccttaaggacggcgctcccgcacttgtcagcggagtgactcagcttcgcgacggcagcatgaccctgtccgacggtctcaaggccttcaaggaacagggcgttgacaagctgaccgacgctgcaggcggaatttccaatctcatcacccgcttcaaggcgacggttgacgtttccaaggattataagaccttcaccggactttcgagcgacatggacggacaggtcaagttcatttaccgcaccgattccatcggcaaataaaggttaaataaacagcaaactcccaaaggagcccgaccggactttctttgggagtttttttgcaaaaaaatgcgcggcgaatgaaaaccaaacgcacgcgccaaaacaaaaaagggaatagggtatgagggagttgtgtaagtataatagcataaattacataaaatgtaaatagtccgaaacggttttttatcgcaaaatgtctcataaaacgacatttatgtgtgaattcggtatgaattgcaaataaattcatataaatttcaaaaatactatttattttttataataattgtgatattatatagacaaggaaagagaatttattttgagattttcttttcgtatacctttttcaaggagttgaaatgtatgaacatcatgattaccgggcgcaaattcaatctcaaagacagcttccgcgactatgccgaacagaaaatgaagaaaattcagcgtattttcggggacgaggcggacgtcaagataaccgtcacggtggagaaggaatggcagacggtggaaacaaccgttaaaaaggacggagttttataccgcgccgagtgctctgccgaccgcatggaggacgcccttgataaaacaatagacgatcttgtgagaaagctgaggaagaacaaaacaaggatagaaaaaaagctgcgtgacgtggctcccgaaattcccgagcccatttccgaagaaggcgaggagggggaaatcaagattgttaaaagcaagcattttcccataaagcccatggacgccgaggaggcggtgcttcagatgaatctgataggacaccagttctttatgttccgcaacatggattcgggcgaaatcaacgtggtctaccgccgcaaggacggaaattacggactgctggcgccggaggaataacagcccttaggctattgcctgtttaaatttaaagaccgtattcgcttgaatacggtctttttgtgtttggacaaattaaagatttgcaaaaatccgcgttccgctctttttaagtctgcttgcaaatacggcgcaaagacagagcaaaataacggtcagcgcaaggaaaacggggaaaaatcccaagctgctttgcaaaaggaaatagacggccgccatgacaatcggaagtgctgagcccacaagaagcgttattgcaacgcatccgctttgctttatgaccgtaagctcggtggtccagttgagattcggcattttaagtcccataaaaaggccgaaaagcgccaacagcaccgtgaaaacctgggggaaaattatcatcatgaccttttccgaggcgccgcagctcagcgagaaaacggcgcataatgagcaaaaaagcaagggaatcgacgtcagcgaaatttgcagcagcagctttgctctaagtatttcttccggcaaaacgggaagagattgcagcagccatatgctttttccctcaagcgacaccgacggcaccgccatgttgttcatgcccgaaacaaggcacatggcgaaaataaccgcggccgaaataagctgcgagggtatccccatttcggtctgagccgcaagcgaaaactcgccgccctttaaaagcagcgttccgcccaaaatcaagataaaaagtataccgaaaccgcagttgagcatataacccgcacttgaagtaaaacgtttgagctccttaaaataaagagccgtaaagggcttttttaccttgatttccttttgtctgtatgccttgacagaggtcttttcggacgcggtggcgatttttaaaaagctcttgaaaatgatatgcgccacggcaaaaaagaacacaagcgtgacggcggtaagctttatacagctgacggcgtcgcctgcggccgccatgccgaaaacgtaaacggcatttgcggtatcccttattttctgcccgtaaagagcggcgtttgccaaaagctctcccatgagatttccggctttgaaatacacgaaatagtaaagtccgataaacaagagcgccgaaaggaccgccacaaagcttttggtcttaagcttttggcttattttcgcaaccacatatcccaaaatgcaggaaagcgtaagcacaatcatcgatataaggaaaataaatacaatcccgcaaatgacgcttgcggcagtcgcctttatgacaattgtataaacggcgactgcgggaattgttgccgagccggaatatataagtcccatgatatagaccccgagaagacgggatattattatgtcctttgtcggtatgggacaggaaagcaaaaggtcgttatccttggcaagataaaggcctgaataggtgttgaaaacgctgccgaaggctccgaaaagaatggcaatcagacctataagcgcaaaataaagccaatccattcctaccgaagaaagggtgggggcaagcgagactgacagaagggtgaacattccgcctattaccgcaacaagcaaaaatacaaaaagaaccacaaagccggccgttgccgccttggaacggcttttgcccgttttcggattgtaaacataactgcggaaaatttcggtcagctgttttttgacaagtgtttttatcactattctccctccaattcgagaaagacctgctcaagggattcgtcgcctttgacttcgtccgttgttcccgtgcgaatgagttttccgccttttattatggcaattttgtcgcacagcttttcggccacctcaagaacgtgggtggaaaagaaaatcgcaccgccgttgtcgcaaacctctctcataatacccttaagcaggtgggaggctttcggatcaagtcccacaaagggttcatccataagtatgagcttgggttcgtgtatcaaagccgaaatgacggcaagcttttgcttcattccgtgggaataggaggcaacgggcatggaaagactgtcggtcagctcaaaggcgtcggcatattttgctatgcgttcgtttctttccctgctgccgacaccgaaaatatcggcgatgaaattcagaaatttaataccggtcatatattcgtaaatgtcgggattgtccgggatataggccatctgttttttacatccgagaggatctgtttttatggattttccgtcgataaaaatttctccgccgtcaaacgagagaattcccgcaacagccttaagcgtggtggtcttgccggcgccgttgtgtccgataaatccgtatatttctcccggggcgatgtgaattgaaaggttgtcgacggctcttttttcgccgtatgttttggtgagatgttgaatgttaagcataattttctcctgatgatattatttgacatcaacgccgccgaaaacggcggttgcggttatataaagcgtgtactgaccttcggatttgagatgccgtttgtcttcggcgcctccgaaaatacccgttgtattgataacaacctttacgttttcgggaacgatgatgtccacaccgccgaaaatcgctgttgcgcgtaaagttttgtctccgtcgaaaattgctccgcgaaggtcacattcaacgcctccgaaaaccgcggtgaggtcggcaccgttaaaattctcgccgttaaagctcatttgacagcccgaaaaaacggcggttccgtttttggaattttgctcctttttaaagcgcttgaatttatcgtcgtcccggccgataatgctgccgataataagccttatgccgatgataacaatgattgcgggaacaagcagcttccagaaaatcgcaaagctgaggattttcctcgcgcaaagcagcaaaattactcccacgcaaagaccgataaagcttgcggttttgtctttttcggttataaatccgataaggcaggggacgatgataaagagcgtccaccaaccggtgaaaaagatgtctgttgctatgacatcaagagccgacagcgaaaagaaaagaccgagtacgatcagggcaacgccccataaaattccgtttagttttttcatataaattctccttaaaaaatatttgacggtcggttatctgtatttcggaagatagtccccgtgagcggcaaaaagctcgtcgcacatggaaacaatgtcatcaatcgaaagctcagctgccgtgtgggggtcggccatggccgcctgataaaccgtttctttttttcttgtgactgccgcctcgattgtcagcagctgagtataaatgtttgagctgttcatggcggcaagctgaaggggaagggaacccacatgacagggatttattccccgtccgtccacaagacagggcacctccacacaggcctctctcggcagattatctataagccccgtgtttattacgtttccgccgattttgattgggtttcccgtcacaacggcttccataatataggaggcatattcctccgagcggctgtgagtgatgtttccgccgtcaagtatgccgtcacgttccttttgccagccctcgatttgggccacacaccgacggggatattcgtcgagaggaatgttgaatttttcaatcagctcggggtagcggctttttatgtaaaaggggttatattcggcgttgtgctcgctcgattcggtgcagtaatatcccaatttgtcgatataatcgaaccgaaccatgttgccgtgcttttcccgtgcgttcatttccttggcacggcgtttaatttcgggatagaggtcattgccctttttgtcccgaatttcaagcagccatgccatgtggtttataccggcgataagctcctttcgcccttcaaggctgtcggacattccgagactgtttaaaaggtctctgctgcagcactgaaccgaatggcaaagaccgacggtttttataccggtatatcgctgcataaacccggtcagcattgccatgggatttgtgtaattcaaaaaaaggcagtcggggcagacctcctccatgtctcgtgcgaagttctccattacgggtatcgtgcgaagggcacggaaaatccccccgattcccagggtgtctgcgatggtctggcgcagaccgtatttttttggaatttcaaaatcggtgacggtgcagggctcatatccgccgacctgaattgcgttgaccgcaaagtcggcacccttgagagccgccttgcggttttgctcaccgagatatgtttcgatttttgcccttgaaccgttgacgtttttgttgattgcctcgagaatgattttggagtcttcaaggcgtttttcgtctatgtcatagagggtgaaggtgctttcccgaagggacggcgtgcacatacagtcgccgatgacgtttcgggcgaaaacggtgctccccgctcccaaaaatgttattttcatgtaactcctcctcaaaatgccgacagcataatgctcatttctaaaatatcacagacaaatatatattacaagcaaaatattcaaatatcccttgacatttatttttatatatagtaaaatacacaggctcactcggaggcaagctgttcacaggaaacggtaagccggataaggtgcgggttgaaatgcccgacttattcggtcttttatttttttacttaaatttacggaggtatttatgaaaattcagctttcggaccattttacctataaaaagctgttcaggtttgtcatcccgacggttgttatgatggtctttacgtcgatttacggcgttgtcgacggattttttgtgtcaaattatgtcggaaaaacaccctttgccgccgtcaatcttgttatgccctttgttatggttatcggaggcatgggctttatggtgggaacgggcggaaccgcccttgtttccaaggccatggggcagggagaacaggaaaaggccaaaagatatttttccatgatgatttattttaccgtcattatggcggtgattttatcggttgtcggcattgtttttatggagccggtcacccgctttctcggagccaccgacgaaatggaagggtatagtgtactttacggacgtattgtaattgcctttaccgccgcttttatgcttcagaatgtttttcaaagctttcttgttgcggccgaaagaccaaaaatggggcttgtctgcaccgttgcggcgggactgaccaacatgacgttggacgctctttttattgcggttttcgacatgggcgttgcgggggcggctcttgccacaggaatcagccaatgtgtgggcgggcttattcctcttgtgtatttcattctgcccaataaaagccgcttggggcttgttgcgacccgtcttgaattcaaaccgattttcaaggcctgtacaaacggagcctccgagcttatgagcaacatctctgcctcacttgtgggaatgctttataattttcagctgcttaaatttgcgggtgaaaacggcgtttcggcctacggagtgctgatgtatacccagttcatttttgtggcgatactgctcggctattccataggaacggctcccattgtgggatttcactacggcgcttcaaacacagatgaacttaaaagcctgctcagaaaaagtacggtcataatgggaataggcggtttggtgcttgccgcggccgctctcttctcgtcgtcgctgcttgcaagcatttttgtgggatacgacgccgagctttacgagctgaccctcaaagcctttaaaatttattcgatacactttatttttgccggttttaacatctttgcctccgggtttttcacggcgctcaacaacggagccgtttcggccgcaatatccttcctgcggacccttgttttccaaagcggctcggtgctgattcttcccgcaattttgggcgtggacggaatttggtgggccgtttgcgttgcggaggtcgccgcgcttattatttcggtcatattccttgccgtcaatcggaaaaaatacagatatttctgaaaaaagcctttgcggagaagttctccgcaaaggctttcgtttttaaatttatttgctttcttccggctttttgttatagataaacagctttcttgccgcaaaattccatataaacgcaatgagggttccggcgatgcttttgactataaaggggacgccgtcctgctgcgggagcacaagccccatggccgcgaccactccgctttttatgagaagtcctataattcctatcacggcgaaggaggtgaactcggcgacgcggtttatgtcctttcgtttgaatacccaaagaatactcaaaatataattgaccacaaggccgatgagaaatcccacggccaccgaaagaacgtctctcgaaagtgaaaagagaccgaagaagctgacgtcgctttttatgatgtatgtgacaaaaagccagccggtaaaaatgtccacaagggtggcggacccgcccacgaaaatgaaacggaaaaactgaataaatccgtcgtcggtgggctcgaccataagctcgcggaatttaaagtggaaaaggaggtcaaaaaaatgtttcatgctctcaacctctcagtcttccaaaatgtcgcccaccgaaccgcagatataggcgggacggtaaggaaattcgtcgagagttttcatcgaggaaacgccagtcagcacaagaacggtgtccaccgccgactgaattcccgcgatgatgtcggtgtccatacggtcgccgattatggcggcgtcggccgaatggcagccgagcagcttaaggccggttctcatcatgaggggattgggcttcccgagaaaataagccgaacgccccgttgcaagctcgatgggggaaatcatggcgcggcaggcgggaatgatcgttccgccctcggcaggaccggtgacatcgggatttgtgccgataagctttgcgccgttcatgacaagacggacggcctttgaaatgttctgatagctgtaattttgggtttcgcccaccacaacatagtcgggacacacgtcgttcatgctgattcccgcctcgtaaagggcgttgtgaaggcctgcctcgccgatgcagaaaaccgacgcgccggggtgttggttcttgataaactcggcggtggcaagagcgcttgtataaaaatggctttcctccacgtcaagccccatccgctgaagcttttggcgaagctcaaggggcgagcgctcgcttgaatttgtcagaaaaagatattttttctgttccttatttaaccattcaacaaattttttcgcaggggggagcagctcgtttccgtggtagacgacgccgtccatgtcgcatataaagccctgtttttcgcgaatttttgaaatgtcgttaatcattttcatcaccataaaaataatactacaattccgcctttttttcaagataaatgtgtaatattttaaatgccccgttcataatctttacaaaggcaaaaatgaaaagaggacggattatatgacaaatacagagctgtataaggacattgccgcgcgaaccggcggagatatttacatcggaattgtgggacccgtcagaacgggaaaatcaacctttataaaaagatttatggacacccttgtgctgcctaatatttccgaggattacgtaagggagcgggcaaacgacgagcttccccaatcggctgccgggcgcaccataatgacgaccgagcctaaattcatccccgaaaccgcggtggagatgacccttgacggcaagcttaaaatgtcggtccgtcttgtggactgcgtcggatatattgtgcccagtgctctcggatatattgaagacgaaaagccgcgtatggtaaaaacaccgtggtttgacaaggaaattccctttaatatggctgccgagatcggcacaaaaaaggtaataaccgaacattctaccgttggcatagtcatcacgaccgacggtacgataggtgaaatcgaacgatcggaatacgaggaggccgaaggccgcgttatcgaggagctcaaggagcttaacaagccctttgtggtgctgctgaattctacacgcccaacggccgatgagacaaagaatcttgccgacgagctgtcgaaaaaatatgaggtcagggtaattcccgtcgactgtctcggactttcggaaaacgacataaaaaatattttgaccgaaatgctctatgaattccccgttcgggacataaatttctttatgccctcatggataaattctcttgaaccggagcattggctgaaactcagtatatttgattcggtgagaaatctcggcaaaagcgtccgccgtatcagggagaccgccgctgccacgaaggagcttgaacaaaacgaaaatatcacttcggcggtgcttaaatcggcaagactcggaagcggaagcgtcgacatcgagataagctgtgccgaaaatcttttctataaaattctcaccgagcaaagcggctttgaaatttccgacgagcgggggcttatgagcacactttcgggacttgcccaaaccgagaaaaagtaccgcagggtcaaaaacgcccttgacgaggtggaggctaccggctacggaatagttatgccggacgttgaggaaatggtgctggccgagcccgaaataatgaaacaggggggacaatacggcgtaaggcttaaggcctcggctccctccatacacatgatgaaggccgaaataaaaaccgagcttgctccggtggtgggttcggaaaagcagtcggaggaccttgtcaaatacctccttgcgggatttgaggacgatccgcttaaaatatgggactccaacattttcggaaaatcccttcacgaccttgtaaacgaggggcttcacgcaaagcttgcaaaaatgccgcccgacgccagaggcaaggtgagagaaaccatcgagcgtgtgataaacgagggctgcaacggtcttatctgcataattttataactttaaattcgggtcgaaggctacggcgtgcggcccgaatttttgcgttaaaaatgtttactttttcggtgtcatgtgttataatacaaaaaataaaccgaaaagaatgtaattatataccgtaaaatttcaaaggagtgaacactatgtcttcgattgaaagaaaaaatgcaggcggcgtggttgtttccgacgacgttatagttaaaatcgccgaggtcgccgcaaaggacgttcccggcgttaagggacttgcttcgagaaccaccgatttccgctctatcgtcaaggatcgttcggcaaagccggttcagataagaatgatttcgggagccatggagataaccatgtatatcacccttcgcgagggcgtgagaattcccgatgtgtgcgatgccgtgcaaaagggcgttaaaagctcggttcagagcatgaccggctgccccgtcaccaaggtaaacatcgtggttgacgacatggagccggacgagaaaagcgacaaataaatttttggggaatttaaggtatgaaaagagcgttagcaagggaacaggcatttatattggtctttgaaaaaagctttaacgacgaaagcgttccggagcttattgattttgccgtggaaaactgcggttgggaaaccgacggctttatgagcgagcttgccgaaagcacgcttgagcacctcgacgcaattgacgaggtcattgaaaagtattgtgtcggttggaaaaagaaccgtattccgagggtgtccctttccataatgcgggtggcctgcaacgaaataatgtttatgcccgacattcccgtcggggtttccattgacgaggcggtcgagcttgcaaagaaattcgcctctgaggaggacgcctatataaacggcgtgctcggcacggttgccaaaaacgaaagctgtgaaaagacaaaatgagcggcgtgattttggctgttgatacaagtaattataccacctcggccgcattgtgcgacggccgcgaggttataaacaccgcctcaagactcctgccggttgaaaagggtcatctcggccttcggcagagcgaggcggtttttcatcatacaagagctcttcccgaaattataggagaagcggtaaaggacggcgcaaaaatcgacgccgtggccgtttcctcccgcccgagggatgtcgaagggtcatatatgccatgctttcttgcgggtctttcgaccgccaaaagcatcggtgccgtgtgcggcgttccagtttatgaattttcccaccagtcggggcatattgccgctgccgcctacggagcggggagacttgatcttctcgaaaaggaattcatcgcctttcatctttcggggggcaccaccgaggcggttgtcgtaaagcccgacagggaaaaggtgttcaaaaccgagcttgccgcacagaccctcgaccttaatgccggtcaggcggtggacagggtcggtgccttgctcggtctcggctttcccgcggggatagagcttgaaaagcttgctttaaaagggtattgcgccgaaaagataaggccgtcgctcaagggcggcgactgctgcctttcgggagtggtcaacaaatgcgaaaagctgctttcggaaaacgcgccgcgagaggacgttgcggctttttgtcttgaatatattttcctgaccctggacaaaatgaccgaatacctgcttgataaatacggcggcagcgaggtgctctattcgggcggggtcatgtcaaacggaattataagacggaaaatgaccgaaaaatacggcggctcggcaattttttctccgcccgccttttcccgcgacaatgctgcgggaatatcaattctcgggagtataaaatatgacggttaaaagacctcctgtgttaagcgttactcagctcaacacctatgcccgcacgattcttgaacaggatccggtgctgaaaaacgtgtttgttgcgggggaaatttcaaattttaaaaatcacataaaaacgggtcatttttacatgactcttaaggatgagaacgccgcaataaaggcggttatgttccgaagttatgcttcaagactgcgctttgttcccgaggacggcatgaacgtgctttgccgcgggcgtgtgtcggtttttgacagagacggggcatatcagctgtatatcgaggatatgcagcccgacggtgcggggtcgctttctgtggcctttgaacagcttaagaaaaaactgtcggagaaaggtctttttgacgaaaagttcaaaaagcccattccgaaatatccgagtaaaatcgcggtgataacttctcccaccggggcggctctacaggatattctgaatattctttcccgccgttggccgctttgcgaggtggtcgtcgtgccctcttcggttcagggccggagcgctcagggcgagcttgtgcgagccgtgaaaaaggccgattctctttgcgccgacaccgtgataatcggtcgcggcggcggctcggttgaggatctttgggcctttaacggcgaggagcttgcacgggcgattttcgagtgtaaaactcccgttatttcggctgtgggtcacgaaacggatttcacgatttgcgattttgtgtctgatttgcgcgctccgactccctctgccgcagccgagcttgccgctcccgacgccgtcatgaccgaggggcttatccgaggatacggcctgaggcttaaggacggtctgacaggttcggtaaacgccatggaaaaaaatcttgaaaggctgaaaaattcgccttttttgcgttatcccgacagaattttcgaaacgagagaaatgtatctcgacggactgtgcgaccgcatgacggcggcgcagaaacttaagctttcagagaaatcgggcaaatatgacattttgaaggaaaagctgcttgctttttcgcctctttcggtgctgtcccgcggatatgcgataccgctgagcggcggaaagccggtaaaatcgacaaaacagcttgaaatcggacagaagctttgccttcgtctttacgacggagaggcaaagtgtacggtggaaagcctgaaaggaagataaaaatggccgaaaagaaaaaggaaatgacctttgacagcgccgttaaaaggcttgaacagattgtggaaatgctcgagggcggaaagcagaccttggaaaaatccatggagctttttgaagaaggcaaggcccttaccgaattttgcgaacaaaagcttaaaacggcaaagctcagggttgccgagctttgcggggaggaaataaaataatggaacaaaaggaaagacttgaattttatgccggcaataccgaggcggcgcttgaaaaatatttgccgaaaagcgataagcattatgccgtgcttatcgacgccatgagatattctctgctcggaggcggaaaacgaattcgtgccgccctttgtcaggaattctgcagagtgtgcgggggagacccgaatgacgcgctgccctttgcctgcgccgtggaaatggtgcacgcctattcgcttatacacgacgatctgccctgcatggataacgacgacatgagaaggggaaagccctcctgccatgtggcctttcccgaggatacggcccttcttgcgggcgacgcattgcagacctatgcttttgaaaccgccctttcggccgatcccgaaaaaattctcgaaaagaatataataaaggcggcgcgtcagcttgcagttggcgccgggtgtaacggaatgtgcgccggtcaggtgcttgatcttatgtctgaaactcataaagcctctcatgaagagctggttgaaatccaaaagcacaaaacgggagcgcttatcataacggcgtcgctcatgggctgctttgccgccgacgcaaacaacgcgcaaatcgaagccgcaagggtttattccgactgtgtcggctcggcatttcaaatggttgacgacgtgctcgacgtaacctcaaccgaggaggaactcggcaagcccatcggcagcgacgagcaaaacaacaaaaccacctttgttacccttttcggagttgaaaagaccatggaatttgcaaaggaattgaccgaaaaggcaaaaaattctcttgacgttttcggagaaaatgccgactttttgaaaaatctcgccgacgctttgctttaccgtaaaaaatagtatttattttctttgaaaagtctttaaacggtatttattttctctttgatttgtgataaactaataaatatacaaatgaggattaggggaacgggatgttagaaaaaatcaaatctcccgacgatgttaaaaaattacatgaaagtgagcttgacgggctttgcgccgaaataagggaaaagctcataaaaaccgtttcgcaaaacggcggccatcttgcttccaatctcggaactgtggaactcaccgtggctctccaccgcaaattcaattcgccgcgtgacagcattgttttcgacgtgggtcatcagtgctatacccacaagctgcttaccggccgatatgacgagtttgacacgctgagaaaattcggagggctttcgggttttcttcgcccaaatgagagtgagcatgacgcttttgtttcgggtcacagcagcacatccatttcttctgctttcggaattgcgcaaagcaataccctgtcatgcaacgaaaattacaccgttgccgtcataggcgacggggcgatgaccggcggacttgcttttgagggtcttaacaatgccggcaaaacaaaatcccgtcttatcgttgttttaaacgacaacaaaatgtcgatttcaaaaaatgtcggagctctttcaaggcatttggccgtgctccgctcccacccgtcctattttaatctgaaaaccaaagtggaaaaaattctcggtgccgttccgattgtggggcggccgataacggagattatacggcggttaaaaaaaggaattaaaaatcttttttataacagcacaattttcgaggacatgggattttactatatcggaccggtggacggtcacgatatttcaacacttgaggactgcttcgagcttgcaaagcttttaaagcgtcccgccctcatacatatctgcaccgtaaagggtaggggctattcctttgccgaaaaatcccccggcagctatcacggcgtttcctccggtcttgacattaacacaggcgagggtcagccctcgggcgagagcttttcgggtcggttcggaaagaagctttgcgggcttgcgcgtgaaaacggcagcatttgtgccgtaacggccgccatgtgcgacggaacgggcctttcggagttttcaaaaagctttcccgaacggttttttgacgtgggaattgccgaacagcatgctttgaccttcgcatccgggcttgcaaagggcgggaaaatcccggtcgttgcgatatattccgcttttcttcagcgcggatatgaccagcttgttcacgatattgcggttcaggggcttaaggttgtgctttgcgtcgaccgcgccggaatagtcggagaggacggggaaatgcaccacggtcttttcgatgtttcctttctttattctttgccgaacacggtaatatacagccctaaaaatttcgccgagcttgaggatgatcttgagcgggcggtgagggggcaaaacaagctttacgttattcgttatccgagaggcggagaggcttctgccgccgacgggtcgactgtcgactttgactgctttgaaggcaaggacaaaaaaacggcggtcgtttccttcggacgggtcggcgcgacggttcttgaggcggcaaaggagcttgaaatctgcggcgtttgctttaacatgataaagcctgttccgcatgaggcaatcgagcggttaaaaaaaatcgataaaatatttctgtttgaagagggcatgagatgcggcgggttttccgaacaccttgcaagtgtgcttgccgaaagcggatttaagggcaagataagcataaccgccgtgaacggatttgtgccccacggctcgacgggagagctgctcggacggctttgcctcgataaggacggaattaaaaaaactgttatggatggtataaatggctgaaaaaatgagacttgacgcatatcttaccgaacacgggctttgcgaaagccgtgaaaaggccaaggcggtcattatggcgggctgcgtctttgttaacaatcaaaaatgcgacaaggcgggaacggccctcaagcccgatgacaaggtcgaggtcagaggcggggaaatgcctttcgtcagccgaggtggttataagcttgataaggctgtaaaatccttcggtcttgacctttcggaaaaaatctgtatcgacatcggcgcctccaccggcggatttaccgactgtatgctgcaaaacggcgcgaaaaaggtatatgccgtggatgtgggatacggtcagcttgcctggaaactgagaaacgacgagcgggttgtgaaacttgaacggtgcaatttccgccatgtcacgaaggagcagattgccgatgaggttgattttgcgtcggccgacgtggctttcatttcgctcaagcttatcctgcctcccttaagaccccttcttcgggacgggggagaggcggtttgccttataaagccccagtttgaggccgggaaggacaaggtcggcaaaaagggcgtggtaagagagctttccacccatgtagaggttatagaaaacaccgtcgcttttatgcttgaaagcggattttcggtgctgggacttgatttttcccccataaaggggccgcagggtaatatcgaatatcttgcatacataaaaaagagtgacgctcccgaaaacttctcgggcataagcccgcgggagcttgcagaaaaatctcatcaaacgcttgataaacaggggtgagtcaaatgaaagccgcgttgacggttaaaaagttcagtcaaacggccgagcaatgtgccgagcttgttaaaaaggagcttttgaaaaacggtatcgagccgatttctgccgacgaccttgagcaggcggatttttccatagtcatcggcggagacggaaccattatccacgccgcgaaaaaggccgccttttactcaaagccggtgctcggcataaattccggcagagttggatttatggcaggtgtggagaacggagagtatgacattctttcccgccttaaaacgggtgaatttgaaatagaaaaccgaatgcttctttcggtcatgtgcgagaggggagacaaggccattaaaacctactctctcaacgaggccgtggtgagccgcggaggactcgcgcgtataaccgacataaacgttacaataggcggccgttcgacgattgattatgcggccgacggattgattttcgcaacccccaccgggtcgacggcctattcgctttcggccggcggtcccgtgctcgacccgtccatcgagggaattgtcatgacgcccatttctccccattcccttaacagcagggcggtggttttttctcccgacgagaaatttaccgtcaccgcaaaggtcaggagcgagggagacgtttttgcctgtgtcgacggtgaaaaccccataaacataaccgacggcgccgtttatatcgaaaaggcaaaggatttaagcgtcaagcttataagaataaagaatgagcccttctacgaaaatttcaaaaataagctcattttaaataaataggagaaggaaaaatgaaaaagaaccgtcatgaaaaaataagagagcttataaacgacaacgttatcgagactcaggacgagctgctgagacttcttcgaaaggacggctttgacgtcactcaggccaccgtttcccgcgatataaaacagcttcgtgtaataaaggctctcgacagcaacgaggtttaccgctatatgattccgaaaggagaaagcgcaacgctcaaggcgaattactccgacgtttttaaatcggcggtcataaaggtggattatgccctcaacgacgtggttataaaatgccatacgggaatggccaacgccgcctgcatggcgcttgaccttatggatcattcgtcggttgtgggaacggttgcgggtgacgacaccattctcatcataacgcggaccgaggaccgcgcggccgagctttgcagagagctcagagagtatataaactgatttctttttttggagatagtcttatgcttgataccttgcgaattgaaaatatagccgttatcgaatttgcagacataaaattcgataagggcttttgcgctcttacgggggaaacgggagcgggaaaatccattctcatagattccctcggcgccgtgctcggcaacagaacgtcaagggatcttgtcaggcgcggatgcgaaagcgctcgggtgacggcggtctttaccgattgcaacaagagcgcggtaaaggcgctgaccgacgcgggatttgactgcgacgacggtaccgtgatgctcagccgtcaaataaccgccgacggaaaaagccgaagccgcataaacggccttcccgcgaccaccgcggtggtaaaggaaatttcaaagcaccttgtggccatacacggtcagcatgacagcatacttctcaccgatcccgggatacactaccgttttgtggacagaatggcgtcaaacggcaccgagcgcgaggaatataagctttgctatgataagctttgcgcccttataagggagtcaagagccgtgtcgacggattttgccgaaagacagcgcaggattgatatgcttgagtttcagataaaggagcttgagcaggccgacataactccgggcgagcttgaagagcttgagggcagacggaaggtcatgcaaaacagcgaaaacatagcaaggagcgtgtcggcagccctttccgccctttcgggagatgaaaatttttccggtgcggcgggacttgccgaaaacgccgccgaaagtcttgccgaatgctcggagttttccgaggacatatcggaaaatgcgtcgaggctttcggaaataggatttgagcttgaaaatataacctccgaaataagagaactttcggaaaatctcgatttcgacccggccgagcttgagcagaccgaggagcgcattgccgtcataagacgtcttatgaaaaaatacggaaacagcgaagaggaaatgctcggatttttggaaaatgccaaaaaggagcttgcttcgataaacacctccgagcagcgccaaattgagcttgaaaaggaaataaacgagcttaaggccgaggcggtcgaaaaggcggaaaagctgacaaacagccgaaaggcagcggcggaaaagcttcgaaacgccgtgctttgcgagcttagatttttaaatatgccgggagtcgattttgtcgtcgacataaagcaaacgggactgacctcaaaagggcgggacgagatcgaatttctcatttcggcaaaccccggagaggctcccaaatctctttcgaaaattgcgtcgggcggtgagctttcgaggacaatgcttgcgctgcttaccgtcataaacgataaaaacgacgcagacacgctgattttcgacgagatagatgcgggaataagcggacgtgccgccgacaaggtggggctgaggcttaaaaaaacagcgagagaaaatcaggttatttgcataactcacctggctcagattgccgcaaagtgcgacagccattttcttatagaaaaaaccaccgaagaaaaccgcaccaaaacaaaggtggaaaagcttgacgaaaagggcagaattgaggagctttcccgcattatcggcggaacagttatcaccgactccacccgtgcggcggcaagggaaatgcttgaaagcggggcggccgaatgaaaagagcaagcggagtgcttatgcacatttcctccctcccgggaagctacggctgcggcagtctcggaaaatcagcttacgattttgtcgatttgctgaaagattgcggcttttcctattggcagatgctgcccgtgggaatttgcgacgaatgtaattctccctataaatcaccgtcggcctttgcgggaaatccgttttttgtcgaccttgacgcccttgcaaaaaaggggctgataaccgaggacgagcttaaagccgccgagcagagcacgccctatgtttgcgaatatgacagattgagagcacagcggctgccgctgcttttaaaggcttcaaagcggacggccgaaaggcgggagatagaaagctttgccgccgcaaacagggaaatagacgagttttgcacctttgccgcacttaaggatgcgaacggcggcctgccccacaacgaatggaaaaccgacaggctcgacggcgacgttcttttcatgtggaaatttattcagtatgaatttttcggtcagtgggcggcgctgaaaaaatattcggagtcccgaggaataaagctgatcggcgatatgcccatttatgtggacgccgacagcagcgacttttattataacaattctctttttttaaccgacaaagagggaaacccggccggtgttgcgggcgtgcctcccgactatttttcggccgacgtcaaaatactcaattttcttattctttctcggtgcaaaaatagtgctatgt

SEQ ID NO: 304 - DNA, 2905 bp, Unknown
  16S sequences of unknown bacteria
agcgggcgaactgcggggtctccagccgctcgggcgccacgtagagcaagacgtacgcgccttgagcggccccttcgagggcggcgttctgctcggcggaggaaagggagctgttgacgaaggcggcgctgatgcccgcggcgttcaaggagcgcacctggtcggccatcagcgagatgaggggcgacaccaccaacgtgaaacccacctgcccctgggccttggcgcgctcggccaggcaaagggccggcacctggtagcacaccgatttgcccgcgcccgtgggcatcacggcgagcacgtcgcggccgtcgagcagggcatcgacgatctgctcctggttggggcggaaggaatcgtagccgaagcaccgcttgagaaccgcacggggctcaaaggcgtcggacgcgtcggaggcggttttcgcagccactagtcggtaacctcccccgcctcgttgtggacgaggccctgcattgcaagccgtccatcttcccgcgccatgctcaccggcccttcctttccagcaggggcctctcccctgccgtgctcctcgcagtcgatggactcattctacccgtcgtgggtgaggggtgcgcgctgtccgttttgcggcgagcatgacagaccggccaggtattggccatatacgtgccagaccggccaggtattggccatatacgtgacagaccggcgaggtattggccaataatggtcagcagctctccggtttgtcacgtatatggccagagcctcgccgatctgtcatggagctggaatccggggtgtccctttggaccaaaatgacacgatacccacggcccctcgtgccaggtgcgcctcattgagcttggcagctgggacagacgccctcgaagaccgtaaagtggcttttcacgtcgtagccggagcaggccgacaccctcgcgtcgagtcccttgtcgtaggggatgtccgcatccgccatggcgccgcacttcacgcacactacatggttgtgatcgtctgtgcggaaatcgtagtggttgccgcccggcgcctggactgcgcggatgatgcccgcttctgccagcaggttgaggttgcggtagaccgtgcccatgctcacatggtcatccttctcgtgcacatacgcatatacctggttggccgtgggatgacacttgaggcactgcacggcgtcgagcacgagctcgcgttgacggctgtttcttctctgaaccatacgagtacctttcgaacaacaacttcctgaaaaatcttcttgactatcataccataatgccgataatagtattcgttcctgttattaagaacttcgaaacacacaaagttaggagatagacatgtcgctcatcggaaaagaaatcaaggacttcacggtcaaggcctaccacgacggcgagatcgagaccgttaccaagcaagacgtgctcggcaaatggagcctgttcttcttctaccccgctgacttcacgttcgtctgcccgaccgagctcgaggacctcgcagacaactacgaggagttcaagaaggtcggcgccgaggtgtactccgtcagctgcgacaccgagttcgtccacaaggagtggcacgagacctccgagcgcatcgccaaggtgaagtacccgatgctcgccgacccggcgcacaagcttgccaagatgttcaaggtcctcatcaaggacgcgggccaggcagagcgcggcgccttcatcgtcgaccccgagggcaagatccaggtctaccaggtcaacgcaggcggcatcggccgcaacgcctccgagctgctgcgcctgctcaaggccgcccagttcgtcgccgagcacggcgaccaggtctgccccgccaagtggcaggcggccgggcgacgacacgctcgcaccgagcctcgacctcgtcggccagctctagacccaacgcggcagtcacgagctgcccacagcatgcataatccacacgcggggcgttcgaacacgagagtcgggcgccccgcctctcatgaaagactctcaaccgactcaaggaggttgaaatgaccgacacgaagaatctctacgacgccgtcatcatcggcggaggccccgccggcctcaccgcggcgctttacctcgggcgcgcccgctaccgcgtgctcgtgctcgagaaggaccgcttcggcgggcagattaccatcacgaacgaggtcgtcaactaccccggcgtcctggctgcctcgggcgaggagcttgcgggcacgatgcgccagcaggccgcgaactttggcgccgagttcaagatggccgaagtcaccggcctggagatggacggcgacgtgaagaccgtgcacacgaccaagggcgacgtccaggcgctgtcggtgctgctcgcaagcggcgcctccccgcgccacgtcggcttcgatggcgaggaggactaccagggccacggcgtcgcgtactgcgcgacctgcgatggcgagttcttcaccggcaaggaagtgctcgtggtgggcggcggctttgccgcggcggaggagtccgtattcctcaccaagtacgccaagcacgtcaccatccttgtgcgcggcgacgatttctcctgcgcgacctccactgccgagccggccaagaagcacccgaagatcacagtccgctacaacacgcgcatcgtgcgcgtctcgggagacacgggactgcgcagcgccgtactggagaacacgaagaccaaggagcgcgagacctggcgtcccgaggacgagggcgagaccttcggcatcttcgtgctctcgggctacgttcccgcaaccggtctcgtcgccgacatcgccgaagtcgacgagcgtggctacgtcgtgaccgacgagcacaacatgaccacctgcgaggggctgttcgccgcgggcgacgtctgccagaagccgctg

SEQ ID NO: 305 - DNA, 3834 bp, Unknown
  16S sequences of unknown bacteria
accgctgcagccggcatagccgcagccgccgcagttatagttcggcagcatctccgttactttctccacacgttcatcgacttccaccttcagatacttgtccgcgatgccaaggccgaatcccaggaccgcgccaagcacgatcatcatagcaattgccgctaccataattccttcctttctaccggtgataatccgggttgttcatgcagttgcgatcatgacagcctttgcatgaaggcttcagatcctcacaccccgccggtttgggcgtacgatgattcagataataggccagcgcgtagatgccgccgagaacggcgaagaacaccacggccagcacgacctgaacaccgctcatgccagaccggcaagaccgccgaacgcgagtgccatgatcccggcaacgacaagcgcgatcggattgcccttaaacggaagcggaacatcgctggcatccaggcgttcgcggatggtggaaaagatgtagagcaccagcgcaaagcccagcggtgtcgcgaaggaataaacgagcatatgcacgaagtcaaatccctgagagatgttctccaggcagacattcagcacgacgcagttggtcgtgatcagcggaaggtagacacccagcgatttgtacagcgccgggctcgtcttcttgatgaacatctcggtcagctgcacgagcgaagcgatgaccaggatgaacgtcagcagatccatgaactccaggtccagcggatcaaggacgagatagtacagtccataggtgacgatcgacgccgccacgatgacgaacacgaccgccacgcccatgccgatggcgctgctcgcctttttggatacgcccatgaacgggcacatgccaagaaactgattcaatacgacgttgttgatgaagacacacgtaatcagcaatgtaaacagttcacccataaattacttgtccccctttgcggctgcagcctgctttttcgcctgatgatccttgtatgcggcaagtgcggccgccaggcaggcaaaggtgcagaatgcgccaaatggctgtgaaaacagcgaaatgacataatcctccggaatcagccgcagttcaaagatcacctgcgctgcgtcaaacggattggtgaatgagatcatgccggtggcaaggacctcacggatcagcgacatgatcacgatggaacaagtgtagccaagtcccatgcccagaccatcgagcgccgaatccaggacgccgttcttggaagcaaacgcctctgcacggcccaggatgatgcagttgacgacgatcagcgggatgaatgtgcccagcgattcatcgagcgccggcgcatacgcctgaatgagcatctggatgaccttgaccagcgctgcgatgacgacgatatacaccgggatgcggatctcattgggcgtgatgttgcggatcagcgagatgatcacgttagacatgatcagcaccgcgatgaccgctacgcccataccgatggcgttgttcagcgtcgtagtgatcgccaatgtggagcaaagtccgagatacagggaaaataccgggttttcacgcaggaaaccggctgtaaagttcttttttcgatccatgttcgccgcctcctattctctcatggaagcagccacctgtgccgcttcattgatgccgtccacgacagccttgctggagatggtcgcaccggagatggtgtccagctcgccggaagcatcatgtccgatcaagccgttgatgaacgtctcatcatccaataccttgctacccagcccctttgtgtcgccgttgctcatgcctttatagttgacgaccatgccctgatcgtcgatcgcaaccagaaacgtcgtcccttcgctgtaaccgccgaccgacatgctgaatacgagcgcttcgtctttatactgatagatcttctggatcgtcgtggaatctccgctatagtctaccgcggtgaagtcagactcgcttgagcccgggaacagctggatcaggctttccttttccgctgcttccgcattcgcggtgatgatcggctgcgtgatctggttggcaaaggccagcgcgccgccggcaatggccgaaacgatggccaaaaagagcgtcagatgaatgatcttcttcatgatgcatcgcctcctgtcgcctcactgcttgcctctgatgtcgattctgaagtcgcagagctgatctcgttgaccggcgtgaccgtgcttgccgcaaggacggtcacggccagaccgatcgccgcaagtccagcgatggccttgcgcgcacgcgcacgcaccgccagctgcttgccatccatggcagactcgatcagcggcgtcagcatgttcatgagcaggatagaatacaagcatccctcaggcagattggccttgagccggatgagcatggtcaggatacctgcgcccatcgcgaagatcacgcgtccctgcgcactggtcgggctcgtgaccggatccgtcagcatgaacacggcgccgaagatcacgccgccgctgaacacatggacgagcggataccataaaaagccaggaacgccctgatagcttgccacgccgccgatcagcgcggacgctgccgcaaggacggcgatggtcagcagatagaccagcggaacacgccaatcgatgacctgacgccaggccaggatcgctccgacgatcaagatcaggatgccgcaggtctcaccgatggcgccgggatgccagcccgtcatcagcgtgcccaggccgccgacctgatcgagcatctgcgcagccacctcgctgctgcccggcatccagttgaacgtattggccatggtggtcaccggcgttgctgccgtagacacatcgctgactacggctcccatgaacgcattgaagacgatggcgcgtccaaatgcagccgggttgaagatgttctgcccgaatccgccaaacagcagcttgccgaagaagatgctgaagaacgtcgcgacgcccagcgcataaggagaaatatcgatcgtgcacatcatggtcaggatgatggcggtgatccagccgaaggatgagctcagatagctcttgacctctttcttcagcacgagcgcgaacacggtctccgtcaccagcgccacgcccacagaaacagccagcagcagcagcgcctgcagcgcataccgcatgccgtacgccgtataataataaaccagcgcaaacagatatactgccgccagaccaagcatcagctcgaacatgatgcgtttcgtgctctgtcgctgacgcaggttcggcgatacattaaaggtaaatttcatcttccggaccccctactttttcgcggccatcagagcacgcttggccttgcggacattctctgtcacatcgagccgcgaaggacagatatacgtgcacagaccgcattcgatgcagtccatcgcacagcgcttcttcatcgcatcgcggtcattgaccttcaccgcctgtgcgatgcgcaccggctgcagaccggccgggcaatggtcgctgcactttccgcagcgcaggcaggcgacgctgtcaaacggtctcgtctccagcaccgtcaccgcgttggtcgcgcggtcgatgacccatttgtcattgacgatcgtcttgcccatcatcggtcccccggcgatcagcttgacatcctgcgcggtatagccgccgcacgcctcgatgacctcgctgaccggtacgccgaccggcacacgcacattgacgggatccttcaccgcgtcgccggagaccgtcaccgtcttctcgatgatcgcttctccatcgcgcatcgcccgggcaaacgcaatggccgtcgtcgcgttgttcacgatcgctccggcctcg

SEQ ID NO: 306 - DNA, 4927 bp, Unknown
  16S sequences of unknown bacteria
tttttgagttgtcttttccattctgtcgttgttacttatctattgtaccataacaattttgtatttttgttattcttttttaagttgtttccgaaaaaggcgtagtgacagaaatattgaaaatgaataattataacagttatataattatatctttgtgtaaggattatattgacaaagtttgctaaaaataatataataacatggacttaaaattagaagttgttaaagaatatatattatgggtttcaatgataatttataacaattcgacgtgacctctttttgtgatagtatcggtttatttttattaactaaattatctgattaaagaggtttatatgtcagaaaatacaaagcccacgttccgccagaaagcagtggatctgtggaattattttaccacatacgaaaaagtgtggttcttcagcattcttattctttcgtttattttcgcttttattttcccggaggaagacgtcaacggtgtaaacggcaagataatcatggcgctctatctgctcgacacgttcctcaatattctctgtgagcttctcatctccaagcagagcaagtggaacttcatcgtttcgatattcgttgagctgtgtgagattgcgatatgccttatcctttcctaccgcttcgctacgatggcgtcaacgctcttcttctggcttcccatcgacattatcagcttcgtcaactggcacaagcatcccgataagcaggaagacgacctcacaaaagtccgtaagctcagcggatgggcggaagctgccgttatcgtcggtatcatagtgtggacagtcggcgtgggatatttcctcacaacgcttgaccttggtacagatttatttaacggaaacgagctgcttgaagttatagtctgctaccttgacgcgtgcgcatctgccgtaggtatcgcaaacggtgtgttcatccttctgagataccgcgaacagtggatagcatggattctctgctcgctccttgaagctgcgataaatattctctccggtcagtacgtccttctcgtattgaaggtcggctacctcacaaactccacatacggcttcatcaagtggaacaaatacataaagtcccataaggaagccgcagaggataaatcacttctgtaaataaaatatgagccgcatccggcaggtgaaaaagtcggtgtgcggctcattttttatttgtcaaaaccaatgtctgtgaggttcattaccttgtcagtgtcggctgaaatgtctcccgagcatatgtactcgccgtctccgcaggtgataacgattattcctgcgtcggtgagtgcgttcttctgctcgtcggagagatgcgcgctgaaatacggtattcttccggcgtcgaatattgctctctcaagccgttttccgtagtccgcgtcctcgaccgataccacaagaggcttctgaccgatgtagcggcttctctcggctgttgttacggcagtgtcggacacgtattccgctcctctgccatccttcagcgcctcctgaattattcctccgccggatatttcgtagtcgtcgacgataacgaatcttcctgtagcggggagcgcgggatctgcgtcaaatgcgatgttcttttcgcattctatggtgcagtccgctatgtcatgcttgttcgcctgagtgggagaggtgtttttcgcaagagatgaagcgtcaagaacactgtgcagctttgtcacgcggcatcttgttttcgcagtgcatgatttaatgatgtactcttttccgaccgtgagaggttctctgccgagccagaacatacttgcgcggaatgagtttgacacaagcggagctttttctcctaccttgcaggcgatctcaccgcggtggacgtatatctgtgtttcggtagtgaatccgcaggactttccctgggcgaataccttaggctctctttcgggggaggggtacatgaaccattcctcaaggtgctttacacgagtggtcttgccggaggggtagaaaattatgtcgtcccccgcgcggagagtaccggactcgcacattccagcaacgatacgtctgtcgtctccgccttcggtgaatttgtatacgtcctcaacaggcatacggaaaggcttgtcgtcgtcgcttgtaccgccattgaagcagtcgagctgttccagtacgtccgctcccttgtaccacggagttttttctgaatgtgacgctatattgtcgccgagcattgcggaaaccggtatgaacgcggctggctttattccgattgacgcgagaaattccgtgtagtccctcttgatactctcaaatacctcttcgctgtagtctacaaggtcgattttgtttacgagaaccgctatctgcgtgatccctagcatttcaagcatatatccgtgcctgcgcgagttttcgcatattccctcgagtgcgtctataaccagaagcgcggcgtctgctcttgatgctcccgtaatcatgtttttgaggaactcaatgtgtccgggcgcatcgattattatgtatttccgcttatccgtctcaaagaagcagcgtgcggtgtctatcgtgataccctgagcgcgttcgtccttcagtgcgtcgaggagaaacgcatattcaaacggcttgctgttctttctgcaaagctcgcgtatagcttctattttgccgtcgggcagggtgtgcgtgtcagcgagaagacgaccgataacggtgctttttccgtggtctacatgccccgcgactactatattcatgtgttgtttttcgttcattgttttatgccgtccttcgtgataagcagatttttacatatatccgccgcgtctcagctcttccagtccgccgccgtcttccttgtcctgctctcttccgcttctttcggctactctcgcgaatttgccggatttcagctcttctatgatttcgtcgaggtttgacgcttccgattctacaggcttagtgcatggccagcatccgagagagcggtatctctttccgtcgccttgattgaagtacagcgaaaccaccggcactccctcgcgctttatgtattcccagatgtctacctccgtccagtcgagcaggggatggattctcacgtgagttccgggagcgaagtccgtcttgtactgtccccagaattccggcggctgatcgtctgcgtcccagtcgttaagtctgtcgcgtgggctgaaatatctctccttggagcggcttccttcttcatctgcgcgaacgccgactattactcccgtgaaaggctctcggttttcgtctatgtcgtattttcccgttgtgtgatttagtctgtatctcggccagtctcccgcgagtgtgtgcgtcagagcttcggttttcagcctcttgcagcattcgattcttgtggcgtttccgtccgggaatgtagccttcgcgtcaagagcttcgcggttttcgccgtaaatcatgtcgaggttccattccattgcaaggcggtcgcggtattctatcatttctgggattttgtagtgcgtgtcaacgtgaacgagcgggaagggaacgtgtccgtagaacgcttttctcgcgagacataaaagaaccgtgctgtcctttccgatggaccacagcatacagaggttcttgaatgccgaatatgactcgcggagtatgtgtatgctgcgagattcaagcatatcgaggtgtgagtattgcataaaatgattcagtcctttgattttttaatttatatcatagcggagcttactttgttcagtatcataaatccgtgtcggttgtatgggtcttcacggttcgcgcgtatcggagtgaagtcgtgctcggcgaatactgctcccgcttcctcacagattatctgcatggcggcggtgtcccattccttcatgaaagcgccgtagcgataatgcacatccgccagtccctcggctatcatgcatcccttgagacagctgcctaccgagataaattcgcctatcctgtcgcggttcgcgtctacaagagcttcggtttccttgtcaaggtgggaacggcttgctaccataacgagcttttcacttctgtcggacacatgaagccgctttcccatgccgaaggtgaaattttccgcttcgtcaaacgaaattttgtacgctcccatgccctcgtaagcatagtagaacagtctttttgccggaacagctattactcctcctacgacgcgatgtgaatgagaaaagcctatcgacacgcagaattcgccgttgcggtttatgaattcctttgttccgtcgagagggtcgataatgaacactcccgcgttgttcgtcagccttgttttgtcgtcctctgattcttcggataggattgagtattcgggatatttttcacggaagaagtccatgagcacacggtttgatgcctcgtccgcgcttgttacgggagaattgtcgctctttagctcgacctcgtattccgctttttcgtatatccgcattatctcgtccgacgcaagcagtcccgcctttatcatgtcgcctgtgagcgcttcgggtgagtatatctcgtgcatagcgtcgccgacaaggatatccgcgcattcctcagctgattttaccgatgtgtcgagaacgatgtccgcgtttgtcggtatctcgtacggcgcgtcaactcccgtgaagttcttgatttcccccgagaacgcctttttgtacagtcccttggggtcgcgcttggcacacagctcaacgtccgcttttatgtagacctcacggaaggctgcacactgcgatatgatgtcccgcgcgttctgccttgtctcttccgtcggggatatcgcgcagactattactatttccgaggatgaagcgattatctttgcgcattccgcaatccgcctgaggttctcgagccgtccttcctccgaaaaaccgagtccgcggcagagtccc

SEQ ID NO: 307 - DNA, 32759 bp, Unknown
  16S sequences of unknown bacteria
ccgaggtgttgtcctccgaggtgttgtcctccgaggtgttgtcctccgaggtgttctattaataatgatagcaatattcctaccctatttcaaggagtttacattactttttacctgtaatttctctaccttaatcaccgtaatttccctaccagctcatacggtgtaataacaggtactctgctgcctgcaaaatctgatgtattccttgtaactacataatccgcccttattctctctgcacatatcatctgcagagcatcttcgtaatcacctgatttcattgctccggctttttttaatcagaggtcctcaaatccgccacattgaagataaggaaaagtgtatctataacctgttttgttttttcgggtgtcagctcctttcttaatatatatactatatcaggtacggacagcgcagatatatagcctttaattctgctaacctcacagtatttccagactatagatgaaaattttacaaagctttccctgctgcacagaacatcaagtattacattagtatcaatcagagctttcatatgcagatatcctttcttttgttatttcatcttcagcatagtccttttttaaaactcctgtcatagagtctgtaagaaacgatgcgctgctctcggctgatataagtcttgcagcttctctgccgtttttgagaataacgacctctcctccgttttgtacaatctgaagatacttgccgaaattgttctgaaactcagttgcattaacaatatacatataagaacatctcctttctgtttgaatatagaaaagacaccggggttaaccgatgtctttaaatatagcagttctattattaaacaagctctacaaatactacctcagcattgtccccctgtctaggtccaagctttaaaattctggtgtatccaccgtttctgtctgcgtatttaggagctatatcttcaaatagttttgttacagtgctttcatcaaatacatatgcaagtacctgtcttctggcatgtaaatctccacgctttgctaaagtaatcatcttttcagcgattcttcttgtttccttagctctgtcctgtgtagtctgaattcttccatacttgaaaaggtcagttactaagtttctaagcatagattttctatgagctgaaggtctgcccagtttcttatatcctggcatagcttttgttctcctttcttgtctatttcacgttattcttcgttaggctttagttcaagacctaattcttctagtttgtgttttacttcgtctaaggatttcttaccaaggtttctaaccttcatcatatcctcttctgaacgctgagtaagctcttctacagtgttgatagccgctctcttgaggcagttgaatgaacgaactgaaagttcaagttcttcgattgtcatttcaagagccttttctttctggctttcttccttttcaaccataatttccattgagtctgtatcgtctgtaagctcgataaacaggttcagatgctcctgcattatttttgctccgattgatacgccctcttcaggtctgattgatccgtcagtccagatttcaagtataagcttgtcatagtctgtaacctgacctactcttgtgttttcaactgtaaagtttacttttttaacaggcgtgaagattgagtcaacagggattaccgcaataggagtattctctgtcttgttctgctccgcaggaacatatcctctgcctcttgccagattaatttcgataacaagtgatgcaccctcttcaagtgttgcaatgtgcagatccggattgaagatttccatatcagcatcgccgatgatatcagcagctgttacttccttaggacctattgtattgattaacactctcttggtgttctcaccgtttaaccttacagcgagttttttaaggtttaagattatttcagtaacatcttccttcactcctggtatagttgagaattcgtgaagtattccgtcgattttaactgatgtaactgcagctccgggaagtgaacttaaaaatattcttctaaggctgttccctaaagtagttccgtaacctctttcaagaggttcaactatgaatttaccatagttgggatcttcatttgaatatatacattcaattgttggtttttcgatttctatcattaaaaaccctccctttcatccaagatttctaactacttaaatcagattacttggagtataattcgacgattagatgttctgcaacaggtgtatcgatctgatctcttgtaggaagcgctaaaatcttaccttcaagcttttcagtatcaacactcatccaagcaggaactgttataatcatatctttgatttccttgaacttaggtgagcttgcgctcttatctttaaccttaactacatctccagcctttaattccattgaaggaattgtagctttctttccgtttactgtgaaatgaccgtgagttacaagctgtcttgcttcttttcttgatgaagcaaggccaagtctgaatactacgttgtctaatcttgtttcaagaagaattaacaggttttcaccggtaattccagatttctttgcagccttgtcaaacagatttctgaactgagtttcctgaagtccgtaaaatctctttgtcttctgcttttctcttaactggttaccgtagtctgactgcttctttctgatctgtccgtgctgaccaggagcgtaatttcttctttcaagtgcacatttgctgctatagcatctttcaccttttaagaacagtttctgtccttctcttctgcataatttgcagttagcgtctgtatatcttgccatctgaattactcctcctttcctagactcttcttctctttggtggtctgcatccgttatgtggtataggtgtgatatctctaatcatagtgatatcaagaccggcagtctgaagagctctgattgcagcttctcttccggatcccggacccttaacgtatacttcaactgtctttaaaccgtgttccattgcagcctttgcagcaacctcagcagcctgctgtgcagcgaatggtgttgatttttttgaacccttgaagccaagtgaaccagcacttgaccatgataatgcgttaccgctcatatctgtaagagttacaagagtgttattaaaggtagcctgaatatgagcctggcctttttcaacgttcttgcgctcttttttcttttttcttactgctttttttacagctttagccatatcaatctacctccttacttcttctttcttcctacagttttcttaggacccttacgagttcttgcattagtcttagtcttctgacctcttacaggaagtcctcttctgtgtctgatgcctctgtagcatccgatttccattaatctcttaatgttcagtgatacttctcttctgagatcaccctctaccaggtattcttcatcgataatctttctgattttaccggcttcttcttctgttaaatccttaactcttgtatcaggattgattccggctttttctaagattaatgttgctgttggtctgccgattccatagatgtaagtcagaccgatttctactcttttctctctgggtaagtctacaccagcaatacgagccatacttttctccttcccccatcttccgtcgccttatcagggtggcaatatagacgggatcacataatataagtggtgactttcatggcagcagccctgaacctgctgccgtcacataaaaactgattaaccctgtttctgcttgtgcttaggattttcacagataaccattacttttccttttcttttgataactttgcacttttcgcagataggttttacggaagctctaactttcattgttttattcctcctgatctacttatccctccaagtaattctgcctcttgacaggtcgtaaggtgaaagctcaaccttaactctgtctcccggaagaattcttatgaagttcattctaatttttcctgaaacgtgtgcaagcacttcgaaaccgttgtccagcttaacaacaaacattgcgttaggctgcgcgtcaacaacagtaccttctgcttcgatgacgtctgtcttcgccatattctacactccttttccagcttgtatttatcaagctataatgtaagcagctgtggctcaccatcagttataacgacagtattctcataatgagctgccaatttgccgtcagcggtaacaaccgtccagttgtttaagagggtttcaacctcatatgtgccctcgcatatcatcggttcgatggcaaataccattcctgccgcaagtcgcggacctctgcccggcttgccgtagttaggtatctgagggtcctcatgcattgcccggcctacaccgtgtccgacaaaatcccttattaccgaaaatccctctccttcagctttcatctgaatagcattggatatatctgaaagtctgtatccgactttgcagtattcaaggcctgcaaagaagcttgcctttgccgcctctatgattttctgagcaacagggcttatctgaccgattccgtaagttctggctgcatcgcttacataacccttgtgggttgaacccacatcaacgctgactatgtcgccttcctgtataatccgttttttgtccggtattccgtggaccacctcttcattgattgaaacacaggcgctggcgggaaaaccgccatagcctttaaacgtaggaatcatattgtgattcctgattgtgctttcaacaaatctgtccacgtcctttgttgacattcccggcttgataaagttttcaagttcttcgagaatgtactttgtgaccttgccggattctctcattaattctatctcttccggtgatttaatgataatcattttattctcctaaagctcttacgatatcagcaaatacattttcaagacctgttgcgccgtcaatatttgctatgcatccggcctttgtataataatctacaagaggttttgtctgggagtcgtatactgcaattctgttttccgcagtttctacagtatcgtcatctctctggaaaagctcgcctccgcagaagtcacacacgccctcttttttaggaggtatgtttgtaacatggaatgaagctccgcactttttgcatactcttcttcctgtaagtcttgcaataagctctgctttttcaacctcgagattaataacagtatctattttagtgccgtgtgctgacagaaattcatcaagcttttcggcctgaaatactgttcttggaaatccgtcaagcagaaatccgtttttacagtcgtccttaagaagcctgtctgtagcaatctcaacagatcggaagtccggaacgagctcacctctgttcatatattcctgggctttttttccgagctctgttccgttcttgatattttccctgaatatatcgcctgtcgaaatgtgaggtatatgatatttatcgacgatgtttaccgcctgtgttcccttacctgcacccggaggccctaatagtataagattcattttattctcctattttaaaaatccctgatagtttctcataaccatctgattttcaagctgtttcattgtgtcaagagcaacaccgactgcgataagaagtgatgttcctccgaatttaaagtctatagctgtaaagttgcctatgattaacggcattactgctattactgccaggaaaatagctcctgtgaaagtaattctgttcattaccttctgtaagtattcaacagtcggtctgccaggtctgattcccggtacaaatcctccgtttgccttcatattgtctgcaacctccatcggattgaaagtaactgcagtatagaagtacgtgaagaatataatcagtatcgcatagaatatactgtaaaaatatactcccggagtaccgtttgtcgatagccatttagtcataaactctgagaatcctgtgtttggccagaagtaaaccagtgtctgcggcagttgtaataatgacataccgaagattacaggaataactcccgcctggttaacctttagaggaatatgtgttgactgtccgccgtacatcttccttcctacaactctcttggcatactgtacaggaattcttctctgaccctgctgtatctcgataataactatgattaccagaatagcaaatgcaaggaagaggaagataccaacaagtgaaatagcgcctgacttataattcgagtaagctgccataactgcacttggtactcttgcaactatgccgccgaagattataagtgagataccgttgcctattccgtgttcgttgataagttcacccagccacatcaggaatgcagttcctgctgaaagcacgaatactacaactgtgatatggaagaaatcagtattaagcaggtactgcttgaagataccaagtgtcattcctattgcctgtacaaatgccagcgcaactgtcagatatcttgtgtatcttgcgattttctttcttccctcaacgccttccttggccagtctttccagagccggtatcgcgattgtaagcagctgcagtacaatcgatgcggtaatataaggtgtaatacttaaagcaaatattgtaaggttactgaaagcaccacctgagaacaggtcgaataattcaaacagtcctgaatcaccgttgaatgcctgatccagaatgtctctgttaattcccggtacaggaatgtttgatccgattctgaacactaccagcatcagcaaagtgaagatcatcttctttcttatgtcaggaattttccaggccttgccaatagtctttaatgattccatattagattacctctacctttcctccggcagattctattttttcaactgctgtttttgtgaatttgtgagcctgaactgttaagttcttttcaagcttaccatcgccaagaatcttaataccatcctttacctgtttaaccagtcctgcttctttgagcatttcaggtgtaacaactgttcctgcttcaaatttatttaaagcatcaacattgagaactgtgtattcagttccccagatgttagtgaagcctctctttggaagtcttctgtacagcggcatctgtccaccttcgaatccaagtcttactccgccgccgcttcttgacttctgaccgttcatacctctacctgcagttgtaccattgcctgtacctgtaccacggccttttctcttagggttctttgttgaaccgccagcagcctttaactcatgaagtttcatatcttttgcacctccattcctacagttcttctacagtaacaagatgcgatactttattaacagcgccgcgagttacagggctgtcaatcaattcaactgatgcgtgcatcttttttagtcctaatgcttctacaacttttttctgctttggggaagcaccaatagtactctttgttaaagtaactttaatcatctttgccattgttcttcctccttatcctaaaatttcttcaggtgttttacctcttaatcttgcaacgtcttctgcagttacaagtgacttaaggccttctaatgttgcataagccatgttacctgtgttgtttgagcctattgattttgctcttacatctttaattcctgcagcttcgagtactgttcttactgatgaacctgcgattactccggtaccctgtgcagccggcatcagtaatactctgcctgctccgaatacgccaagctgtctgtgtggaatagttgttcctactgtaggaacgctgattaaatttttctttgcatcttctgtagcttttcttacagcttcaggtatttctatagccttaccaagaccaacgcctacgtgaccttcgccgtctccaacaactacagtaacgctgaatctcatgtttctaccgcccttaactgtctttgcaacacgtctgatgttaacgatagtttctgttaagtccagcctggatgcatctattgtatttctcatctgatacctcctagaattttagtccgccttcacgtgcgccgtcagctaattccttaactcttccgtgataaaggaatccgcctctgtcaaaagctacaacttctataccctttgcaagagctctcttagctaaagcttcgcctacttttttagcagcttctttgtttccgccgtaaccgatttcggactttaattccttgtcgattgatgaagctgatactaaagtgtgacctgccacgtcgtcaattatctgagctgaaatgttcttgttgcttctgaacactacaagtcttggcttctcaggagttcctgtcaaattttttctaactcttttgtgtcttttaacacgtctgtcgtttctgcttacatttgccatttaccattcactcctttcctactgtgctccagcttttccttctttacgacggataacttcgtcagcgtacttgatacccttgcccttgtaaggttcaggctgtctccatttgcggatgtttgccgcgtagttaccgactaaagctttatctatacctttaacgataatttcattagcacttggaacttcagtagtaattccttcagggtcttccatttctaccggatgggaatagccaagctgcataacaagagtcttgccttttttctctgccttgtatcctacaccgttgatctgaagcttcttttcaaacccttctgtaactcctattaccatgttgtttataagagttcttccaagaccgtgctgtgatctgtgctctttggcatctgagcttcttgaaacgattacttctgttccgtttacttcaatttttaacagtttgctaacctgttcctgtaattcgcctttaggtcctttgacagtaacaacattgttatcatcaactttaacctctacaccggcaggcaggttaacaggctttatacctattcttgacatatcttacctcctaccaaacataacaaattacttcgccgccgataccgagcgctcttgcttttttgtcgcttataacgccttttgaagttgatatgatagcaactccaagtccgccgagaactcttgggatatcgtctgctttagcataaacttttaagccgggctttgaaatctttttgattcctttgattactctttctttatcagctgcatatttcatctgcactctgataatcccctgcttaccatcttctataacatcaaaaccattaatgtagccttcttctaatagaatttctgcaattgcttttttcatctttgatgcaggaatatctacagtagggtggcatacagtattggcgtttctgattctagtgagcatatctgctaccggatctgtcattgtcattacagtattctccttccttcgtgtggttctggatcatctccagccttcacaattctttaactacttattttaccagcttgcttttcttacgcctggtatttcacccttgtatgcaagttctctgaagcatatacggcagattccgtacttttttaatactgagtgcggtcttccgcagattctgcatcttgtgtacgctcttgttgaatacttaggttttctctgctgtttaacttttaaagatgttttagccataatttccctcctacttttcgaacggcattcccagtaactgaagcagcgccatagcctcttcgtctgatttagccgtagttgtgaatactatgtccatacccttaatagtttctacctggtcatagttgatttcagggaatattaactgttctttgatacccattgcgtagtttcctcttccgtcaaatgagtttttgctaacacccttgaagtctcttactctaggaagagcgatattgaagaatttatcagcaaattcatacatattgtcgcctcttaaagtaactttaactcctacaggcataccctctctaaccttgaagttagcgatggattttcttgcttttgtaataacaggctgctgtcctgatataagggcaagctctttaactgcagattcgataatctttgcgttgtctttaccttcgccaagacccatattaatagttatcttttcaagtttaggaatctccataacgtttttgtactggaatttttcctgtaacgcgccaaaaactgtgtttttgtacatttctctcattctagctgccaaaatcgtctcctcctttcttaatcaatttcctgtcctgtttttcttgaaaaacgaacttttttatctccaaccatcttgtatccgacttttgtcggagcctttgccttgctgtcgtagtacattacgtttgaagcatctataggaccttcctgatgcttgatttcagcagcagaggttcttgtctgcttagcatgcttggtctggatattaacgccttctacgattactctgttttctttcggcatagccttaagaacttttccggtcttgcctttatctttaccggcaattaccattaccatgtcgtcttttttgatacgcatccttaaacacctcctataatacttccggtgccagtgacacaatcttcataaagcctttttctctaagttctcttgctacaggtccgaaaatacgagttcctgtcggagtcttatcttcctttatgataactgctgcgttctgatcaaatttaacatagcttccgtctgttcttcttgctccgtgctttgatcttacaactacagctctcactacatcaccttttttaacaacgccacccggtgttgcttcctttacagcgcacacgattacgtcaccgatgtttgcatactgacggcttgttccgcctagaatacggatacaaagtaattcttttgcgcctgaattgtcagcaactcttaatcttgtttcagtctgaatcatttccagttgcctcctttacttaactttttcaacgatgtttacaagtctccatctcttgtccttggacagaggtcttgtttccataattctaactttatcgccaatctgacattcattgttttcgtcgtgagccttgatcttcttagttctctttacggcttttccataaagggaatgtcttacgaagtcttcaactgttactactatagttttgtccatcttgtctgatgtcactatacccacgatagtctttcttctgtttctatcaactgccataatacatcctcctttctgttagccctgaacctttgcaagctctttttctctgattacagttttaactcttgcaatatctctttttgtttctctaagcttaaccggattttcaagctgtccagttacgtgctggaatcttaagttgaataattctttcttcatgttatcaagttcagcattaagttcaacttctgtcatttctctcattttctttaattccattatgcttcaccaccctttacttcctggcctttgatggcaaactttgatttgataggaagcttatgtgacgcaagtctgatagcttctcttgcctgttcttcagtaacgccttcgatttcaaacattactctgcccggcttaactactgctacccagtattcaggcacacctttacctgaacccatacgaacgcctgcaggcttcttacttacaggtttatgtgggaatatcttgatatatactttaccacctcttttaatagatcttgtcatggcaactctggctgcctcgatctgatttgaagtgatccatccgcattctgtagcaacaagaccgaaatcaccgtatgtgattgtattgcccttagttgctttgcccttcattcttcctctgtggactcttctacgtttaacgcgctttggcattaacatattgtgttcctcctttctttatatctatgcttctgtttctgcagtttctgctgctgcttctactgcttcaacctgtggttcttcaacttgtggttctaccttcggagtttttcttactctagggtttactgccttaggagcctgaggagcgtcatctcttctgtctcttctttctcttctgtcaggtctgccttctcctcttctgccgtttctgtcgtttcttcttctgtcgcccttcttgcctcttctttcctgcttttcttcaggaactgagccaacaagacccttgtcaagaacttcaccgtggtttatccaaaccttaacgcctattttaccataagttgtatcagcttcagcaaaaccgtagtcaatgttagctcttaaagtgtgtagaggaacatttccttcgctgtatttttcgcttcttgcgatttcagctccgccaagtcttcctgatgtagtaaccttgataccctttgctccggctttcattgttctgccgatagcctgcttcatagctcttctgaatgaaactcttctttcaagagcctgagcgattgattcagctgtaagctgtgcatcaagttctgctctcttgatttcctcgatgctgatagtaacttccttgccagtcattttggcaactgcgtttttgatctcatcgatgccatcgcctgctctgccgattaccattcccggtcttgcagttaatacgataaccttgattttattttctgcggctctttcaattaaaacctttgaaatgccagctgcgtataactttttcttaacaaatgttctaacctgattgtcttctgcgaggcaatccgcgaagttagctttgtctgcataccacttggaatcccagtctttgattacgccaactctcaaaccatgtggatttactttctgacccattgatgaacctccttacttaatttctctctcttaaagttacgccaacgtgactgcttctctttaagatgattgatgctctgccctgtgatccggctctccatctcttcattgtcggaccctggttagcataaacttcagcgacatataagttgtctggattcatcttgtgattctcttcagcgttagctgctgctgatttaacaaccttttctactatttcagcacccttgccaggtgtgaattttaaaatgttaagtgcctcttgtaagtcttttcctcttactaagtcagtaacaggcttaagcttgataggagacattcttacatactttgcaattgcttttgcttccatttttctatctccttttctttatttagtctttttgtcagccgcatgacctctgtaagttctggttggagcaaattctccaagtctgtgacctaccatatcttctgtaatgtatacaggcacatgtttccttccgtcatgaacagcgattgtgtgtcctaccatctgtggaaagattgttgatggtcttgaccatgttttaacaactttcttatcgttagctgcattcatatcgtcgatagccttcagcagctttgcatctacgaaaggaccttttttcagtgatctactcattatttatgctccttcctacttttcatttcttctctttacgatatacttgttggattccttgttcttctttcttgtcttatatccaagagcaggcttaccccaaggagtaacaggacccttacgtccgataggcgctctgccttcaccaccgccgtgagggtgatcgttagggttcataacagaacctcttactgtaggtctgatacccatgtgtcttttacgtcctgccttaccgatctggatgttgccgtgatcgatgtttccaacttcgccgatagtggctctgcattcgattcttacttttctaacttcgccggaaggaagtcttacctgagcgtagtcaccttccttagccataagctgtgcgccgttgcctgctgatcttacaagctgtccgcccttgccaggcttaagttcgatattgtgaatgattgtacctacaggaatgtttgcaagcggtaatgcgttacctgttttgatatctgcgtcaggtcctgcaaagataacatcgcctaccataagcttgttaggagctatgatgtatctcttttcgccgtctgcatatacgattaaagctatgttagctgttctgttcggatcgtattcaatcgctgcaacttttcctggtactccgtcttttgttctcttgaagtcgataattctgtacttaggtcttgttccgccgcccttatgtcttacagttatcttacctctgttgtttcttcctgaatgtttctttaatgttactgtcaaagatttctcaggagttgtttttgtaatttcctcaaaagtggaaactgtcattcctctcagaccaggagtagtcggattatattttttaattcccattgtttactacctcctatattatagtccctggaagaattcgatttccttactgccttcagtaagtgtaactattgcttttcttgaagcagcagtcttgccttcgtatcttcccattctcttagttttacctttaacattcataatgtttacttttgctacttcaacaccgaagatttcttcaactgccagcttaacctgagtcttgttggcgtctactgcaaccttgaatgtgtattttttgttctgcgcatcgtccatactcttttcagagatgacaggcttaatgattacgtcgtatgggctcttcattatgcgtacacctcctcaatcttcttgattgcttcttcagtaacgatgaagtttgtgtgattgataatctcgtaaacgttcattgttcctactagagcagttcttactccaggaatgttagcagctgacttgataacattttcgtctttttctgccataacgattaaagctttcttgcctgctttaacgtttgctaacatcttaatcatttcctttgtcttaggttcgtcaaatttgatttcgtttaaaacgatcatttcattgtctgcaacctttgctgataaaactgacttcattgcaagtctttttacctttttgttaactctgtatctgtaatctcttggctttggtgcaaatacaactccgccgcctacctgtgtagggtcagttgagcttccctgtctgtgacgacctgttcccttctgtctgaaaggttttcttccgccgcctctaacttctgctcttgtctttgctgactgagttccctgtctctggcaagccagatagttctttactacttcgtgaacagcgtattcgtttggagtgattgcgaagatttcatcatttaatttgatttcaccagcttcagctcctgccatgtttagcatttttaatgtagccatttcttatgtcctcctttccaaatactctatttctgaccttttaccgcatactggatacggaggagtccgcccttgttaccgggaacagcgcccttaaccagcataaggtttctatcttcaataacttttactaattcaacgttctgtacagtaacagtttctctacccattctaccagggcctttgtttcccttgaatactcttgatggataagtacctgccgctaatgctccggccagtctcttgtgctttgaaccgtgagtcataggtcctctgtggtgtccatgtctcttgatgttaccctgagttcccttaccttttgaagttcctgtaatgtcaagcttcttgccaacttcgaattctgcaacagttattacctgtccgatttcgtagctttcgccttcttcagttctgaattcagccagatgcttcttaacaggaatgtcattctttgcgaaatgacctgtcataggtttgttaactctctgtggtttctgatcttcaaaaccaacctgtactgcgttgtatccgtcagtctcaaccgtcttgatctgagttacaacttccggacctgcctcgattacagttacaggaacaacgtctcctgcttctgtgaagatctgagtcattccgacttttttgcctagaatcatcttcatgtttatttttcctcctaaattcttacagcggattgctccttgtcgatttgagcaatcatactaaggggagttcccttactataatttgatttcgatgcttacgcctgcaggtaaatccaacttagtcagtgcatcagttgtctttggtgtagcatttgtgatgtcgatcagtctcttgtgagttctctgttcgaactgttctcttgagtccttgtacttgtgtaccgctcttaaaatagttacaacttctttttctgtcggcagcggaataggtcctgaaacatctgcgccagttttcttagctgtttcaacaatctttgctgctgactggtctaataacgcgtggtcataggccttaagcttaattctgattttctgtaattcgctcatttttgtcctcctagaattttttgtacagttttcgctatgcttgtacaaggggttcaaacgccttgttttcaatgtgtacagggtttgtgcttacttagtacacagtcccgtgtgtttcctgcaaaaccacacagataaaaaacaggcgaatccctacgccaccgtctggcggtgacaattgctcagtggaaattcccatatagcactgcaacttcccacttcatcgcctaaagcaagcctttgtagtatataacaaacgagaaaatattgcaacccctttttaaaaagttttttgggtttttttaaggctgcatttcagtgttttcaaccgcttcagccgtcatacatatcacacgcttccttgcgtttccatttagccgaaaaacaagaacgaatacattaaattaattttttcatcagcgctgttccgtcattatatttttaaattacacctgatattcgcacaaaaatacaataaacatatttatttcaggatatatctatagtatacttttagtatacctataacaatatgaggagataccgagatgaaacagtcagattatgataatttaggtcctaaaataaaaaagctgcgtgttgaaatggatttcacgcaggcacaggtcgcagaggcgcttgatgtgactcccggatatatcagcaatgtggaaaacaaccgtacagccatgtcgctgagaattttaatctattatgcgcagttaatggggatttctctggattccctggtaggccgcattgattccgactatcaggccaccgctttggataatgagatatgcgatattattcatcagatgagtacggataagaaggagaagctgctccggacattaaagatatggaataaggaactgtaaatgtgggagctgccacattgtttaatctttttcttaatgttttaaccaaacggcgattgtctctccagactaaaacagcagtgcaagtcacacttctgtgaatcgcactgctttatattgttataaacaagacaattatagcttctctatctcctctacagacaggcccgaagtttcagctataatctcaatatcaacacctttatctttaagagccttagctatttcgcgcttttctgccgctttaccgtcttcaaacccctctttcttcataaccattccgtattcctctactgttattcccgtaagcataccttcgacctccgttgcatacttattaagaaaatccacaagaataccctcttcttttgccctttttaccgaagatgccactgcttcctcaaggctcatttccctatcaagatattcattcacaaatgatatgaacatactgtattctctaagggtcttgcttcttttcagtattttgttatcttcagaataacatatattatatacgtttaccactaattccattgaatttttcggcggtttttctgtatagtgtttcgaaagcggctctacctgcagctccggtgtatctttatctccgaagataagaacaaagaaagagggcggagccatcatcagtttccttgttccgtatatttcagaaccaaacatcatatctaaagtcttgccaaaatacgatgacagtctaagcgccatatttcccgatctggttgactgctgttcacaaaagaacagggagacttgacccagcgaagtatgagctgctggtaagtcctctgtcaagagtgcaacgctttagcgtgtggcactctacggctagacttgccgtcaattaaaaaagcaaggtcattcctgctgccgatgtagagtggcgtttcaattgtaagtgtttcaatatcatctatagcctcctttcccatttgctcatcacttaccgcattgtagagctctaacattttttctttgtcgttaaacagagtcctgaacataccgtctttaaattctctgtttacttttgccttttttgcttccatttgtttgtcctcctatttaattttttagaaagcaaaaaacgcacagtaaaaaccgcttaagttgaaacttaattcaacctaaacggcctatctgtgcgttttcataaattgtctatgctaccattttactacacctcgtttttaccgtcaattctttttttaaaattacgttgcgccttgaaattttaatagctgcagggaaacaatcagaggtgattttcgttaaaagttttttgtataagtttcgagaaatataggcacagctataattctaccttacatatcctgatatatattgctgtatggaatgatatatcgttcttctgccagtctgtatattacagcactctttattgaaaagcagcaaaaaagacatacctctgcgatatgcctttttgatattctttatcttgtgtctgtcgctatgcgttaagcggatatttagctgtaagctctgcaactatctgctttgctttctctctgctgtccgcatctttgattacaagtgagattgcctctgccagtttgtccatatcctctgtattcatgcctcttgaggttacggctgcagttccaagtctgacaccgcttgtaacgttaggtgactgagggtcatttggaatagtattcttgttgcatgtgatgtttgcctcttcaagcagagcctccatctccttgcctgtaatacctgtattaacaaggtcaaccagcatcagatgtgtgtcagttcctccggatactattgatatgcctcttttgataagaccatcgcttagcgcctttgcgttggcaacgatattctgctgatataccttgaactcaggctgcagcgcttccttgaagcataccgcctttgcagctataacgtgcataagaggaccgccctgtattcccgggaacaccgctttgtttaatttaagctcatcggcaacagcctgactgctcatgatcataccgcctctcggtcctctgagagtcttgtgagtagtggttgtagttatatgtgcatattctatcgggctctggtgaagtcctgctgcaaccagtcctgctatatgcgcaatatcagccatcagataagctccaacctcgtctgcaatctctctgagtcttttgaagtcaatagctctgcagtatgcgcttgctccgcaaactatcatcttaggcttgcattcaagtgcaatctgacgcacctgatcataatctataaatccgttctcatcaacaccgtatgcaaccgggttgaaatatttacctgacatattaaccttgcttccgtgtgaaaggtgtccgccgtctgaaaggttcatacccatgaaagtatctcccggctttaataccgcaaagaatacagccatatttgcctgcgctcccgaatgaggctgcacattgacatattcacagccaaagagcttctttgctctctctatagccagattttcggccacatcaacgcactcgcaaccaccgtaatatcttttgcccggataaccttcggcatatttgtttgtaaacggtgaacccattgctgccataacagccttgcttacccagttttctgaggcaataagctcaatatgggaattctgtcttgcaacctcggcttctatagcttctgctatttcactgtctgtttttcttatttcttcgattgaatacatattctacctgcacagcctgtgcgctgtgttacctttctttgtcttttgcttatggctctaataaattaaattataaattactgttatatttttttcaagccgttaaatcatataatttcatctttgtcagcctgctctgcctcgtctattttaattacagacacctcatatgctgtatgtaccgtcacatttccctcgctgtcctttttgttgtactgccttgactggatacggccctctatgcagattttttctccgacctccatggcagccgcataggaagcgtttctgccccatgcgatgcagggtatgtaatcggatttgttgtacattctgttgacagccagcataatgtcgcatatttccctgcccagcggcgaggttctcttaatcggcggtttgcagatatagccttcaagatatatttcattctggtaatactctatatcctcaagcacctcaagttctcttgcaaatacaacaacgttgagcctgttttttccgtttaccgctgtattgtaggttctcacctgcccgtttatatgaagcatatcgcctttgtttaaagtcttgtcaaaaagcagcctgtctgaaatcattatattaattgcatctctgtagccgcttcttctgtcaatggacaattccagctggtaaaaggtttcaccatatgtcttatgactcaatatgagttctcccgtaacctcgcctgtcagaacggcaatatttgtttccagcctctccattaaaaaatcctccccaataaaagtgtatgttacattttattagaaaggatctgttttattcatactatttaatatcaagcctcataacctctggccggcactctgtaccgtactggggacaggtaaagcattcaaagaactgaggggcttcatctctctcaatggtgacaaagccggattttctgaaaaagcccggcgctcttgcaacaagaaatatgctgctgccgcctctctttagtgtttcatctgtaatgcagtccagaagctgtgctccggctcctgttttacggtaaggctcgtttacagctattccgtcaacgataaactctccctcgcgcagagcaagcaccgctccgccctgcaggtttcctgcctcatctgtaagctgccagcacttgactatatctgtgggcacaggctcatcttcgctgaactcaagcctgtttgctataaacatgggcacaagcctgtcataatctttagtttccgctatttttaaatctttcatagtagtcacgctccgctttggttacaaatactctgattttgtcgtgcagtacagagaagtcgagaggaagcttttcgccgtgctctccgtcaacatctgtcggtatgtccacatctgactctatcagaagtctgtctgtcttgaaggtaagaactctgtggtcgtcaagatgcactccctgaagcactttaattcccagaggaaccatttcaagtataggcatcttgcggaacagtattacatttaacagtccgtcatttatctcgctgtccggtgaaacatttttaaagccgcctgccgaagtgccgttcattactatcataaagaacatttcctcttcatagatattctcaggcgttgtcagcttcacatctataggcttaagctctgtaacctcggatgcgcccttgagatagtatgcaaatcttcccaaagtgtttttgagcaccgggtctgttttctggctcacgtcaaccatattgcccatagcggcaacatttatgaaatacttgccgtttactatgcccacgtcaaccggtacctgataatcacccagcgccacatctatcatggcatctatgctttcaggcatttcaaagtatgatgcaaagtcattggctgtccccgacggaaatattgcgataggcaggtctataccgtttttgagaagcgcgttgacacatatattgatagtgccgtcaccgcctgcaacaataacctgtctgtactcctcctggttaacctcgggcaaaagctcatttaatattttgcctttttctgctcttaccggtattacaagatagccctctttctgatacctctctataatatggtccagattgtttttaaacattccgtttcccgaaaacggattataaaacagaagtacctttttttgtttcattccgctcattgccgataatcctccttatttccccaatcagatataacgatcccgcatataaaaccgcatcgtagtcacctttcatactctctgctaaagccaccgcctcttccggtgaggctgccactgtgcagtcacataagcgcttctgtatttttgcctgcaggctgcccgcatcaagcttcctgtcgcttacaggctcgcaggcaataaagtttgaagctatgcgtgtaaagttgtcaagaattccgtctgcatccttgtcggcaagtataccgcagaccataagcactctgcttctgccgaagtatttcgtcatagtgtctgccagcgccctggctcctgcttcgttgtgcgctccgtcaagtattatgtacggtttctctgatattatctcaaagcgtcctatctgtacggcttttttgaggcctctgtacaggtcgctgcggtttatcttaattattctctgcttcctcaaaagctctatggccgcaagagccgctgtaagattgcttatctgatgctcccccgtcatagaaatctcaactccgctgtagtctgtccccattatctcaagatcaacggcagaacctcccaaatgctccgacatatatttaggctttatcccggatgcatccgtaaacaggcagccctgtctgtatgcctctcctgctataaccttcgctgccgcaggatccgacacatttgatataaccggaacttccggtttgattatgcctgccttttcggcagctatctgctctattgtatctcccagtctgtctgtatgatcaagcgatattgaggttatgatgctgacaagaggcttcttaattatattggttgaatcgcctctgcctccaagtcccacctcaagcactgcaaagtctgcacccgcttccttgaagtatacaaatgcaactgctgttatgacttcaaactctgtaggagaatcatatcccatttctatcattttttcaacagtttcaaggacaattgctgtatatttttcaagctccgcatcggatatatagctgccgtcaagctgtattctctcattgaacacctctataaacggtgaggtgtaaagccctgccctgtatccgtttgccagaagggcttcatatatatatctgcagcatgagcccttgccgttagtccctgcaacatgaatacacttaagagcttcctgggggttcccaagaagctccataagcacgctcattctttcaagtcccaatatactgccgaatttattaaattcttctattctgtctattgcgctcattataatttcttttctaccatagcaagtctttcggttacctttgcaagcatatcctcatacataacctttttctctttttcagctgcgattactttttcaggagccttgcttacaaagccctcatttgaaagcttgcctgtaactcttgccacttcgccctcaagttttttcttttcttttgtgagtctttcaaactctgccttgtagtcaagcagatcgtctgacggaatatatatttcagccgccgcaattaccgctgacattacatcttcgggaacctctgatttatctgtgataaattctatctctgtgatgtttgccattcccttgatatatctttcagctgatttaacaaaatccatatctgccgcatctgcatatattacagctctgagcttctttgacggcgctgcgtccgcttcagctctgatgtttctgattgctctgatagcttccattgcaagctcaagtcttgctgtttcggcttcaaaagtaagagcctcatcataaaccggccagcttgatttaatcaggaagttttcaggattgtccgcctttatttctccctgaggcaggtagctccagatttcctcggttataaacggcataaacgggtgaagcagtgaaagcatatcctttaatgctcttacgagtacaaatcttgcgacttttttgtccgcctcatcgtcaccgtacagtctgcctttaacgatttcgatataccagtcacagtattcattccagattacatcgtatactttctgtcccgcaagggcaaggtcaaatctgtccattgccgccgtaacgtatttaacagcttcatttactcttgagagcatccacttgtcctcatcttttaaggccatctgtgaaatatctccgtcagctatatccttaaagctgccgtcttcgttctgcaggttcataataacaaatcttgaggcgttccacagcttgtttgcaaagtttcttgaggactcaagcttgtcagtcttgaatctcatatcgttacccggtgtgatacctgttgtaagcataaatctgagggcatcagcgccgtactggtcgattatttcaagcgggtctatgccgtttccgagggatttactcattttgcggccctcggcatctcttacaagaccgtgaacatatacatatttgaaaggtacttcgcccatagtttcaagcgccgagaataccattcttactacccagaagaatattatgtcatatcctgttacgagtacatctgtaggatagaagtagtcaagatcctctgtcttgtccggccagcccagtgttgagaacggccacagtgcagatgagaaccatgtgtctagcacgtcctcgtcctgcttaaggttggtgctgccgcatttagtgcacttgtgaggctcgtcaaggcataccattagctcgccgcagtcctggcagtagtatgcaggaattctgtgtccccaccaaagctgtcttgaaatacaccagtctctgatttcctcaagccagtgaagatatattttttcaaatctttcaggcacgtgctttaagtcgccttttttagctgcttcaatagcaggctttgcaagctcttccattgcaacaaaccactggtctgacagcattgactcaactgtagtatgacatctgtagcattctcccatagggattactttttcttctgtctttactaaaaatcctgccttgtcaagatcttcaacccacgccttacggcattcgtatctgtccataccctcgtatttgcccgcaagctcattcattgtggcatcaaggttgatgcagcaaggcatatcgaggttgtgtctctgtcctacctcaaagtcgttagggtcatgtgcaggagttatttttactgctcctgttcctttttcgggatctggataagggtcagctatgataggaatttctgttcccaccagcggaagtattacttttttgcctaccatatccttgtatctttcgtcatcagggtgtactgctatagccacatcgccgaacattgtttcaggtcttgatgttgcgactaccataggctctccgccttcttctgccgcatcgtatctgaaataccagtacttgccgtttttgtcctcatgctctacctcggcatcagataatgatgtgccgcactgaggacaccagtttataaggcggtttcctctgtatataaggcctttttcgtaaagctgtacaaacagagttcttactgcgcggttgcagccctcgtccattgtaaagcgttctctttcccagtcgcaggagtcgcccagcttacggcactgttttgtaattcttccgccgtattcttctttccatgcccatgctctcttgagaaattcttctctgcccagatcttctttttcgaggccttcctctgctctgattttgtctacaaccttaacctctgtagctatgcttgcgtggtctgatcccggaagccacagcgcgctgtagccctgcattctcttccatcttgtcagaacgtcctgcagtgtctgatcaagtgcatgtcccatatgaagctggcctgtaatgtttggaggcggcattacgatagtgtacggtttcttattcttgtccacctctgctctgaaagcgcctttctgctcccacatctcataaattctgtcttcaaaatccttaggattatatgtttttgccaagtttttttccattcgatatatctccttgttaaaatagtgtgttctgcctttctgcagatacaagaacgccctctgcagaccggctgcaaaggacgaaatatttccgcggtaccacctttgttcctgcatatcatatatgcagacactcatttatcgcaaaactcagaagcaaccttcgtaatacacattcctgcgaagctctcagcctgtagactccactctctgtaaggcgcccttattactactcctcttcatcaccgtttttattaatttaataaggtgagaagcaactcacctatagtattagtctatattatttttgttaaaagtcaagcacaaatcactgtttcacacctatgttatcacaaaaattcagaggaagcgcatcgctccctctggatactgttcatactatctgaaattaactctacaggtcataatacttctcatactctgccgatgacggaattgaattgatatagtcagcttctttctgcttgttttctctccatatcttaatcagttcaacaggaaatactccgcctgctgtaaggtaatcgtggtcctcgtcaagtgctgcaagcgcttcatcaagagtctttggaagtccctgtatctttgccttttcctcgtctgtcagattataaaggttgaagtcatacggtccccagccctctttgacagggtcgattttattcctgataccgtcaatacccgccataagtattgccgcataggcataatacggattgcatgtgccgtcagggtttctaagctcaaatctcttgttttcaggagatttggcatatgccggtatccttataaccgagcttctgttggctgtggcaaatcctattgtcacaggagcctcaaatcccggaacaagtcttttgtatgaatttgttgacgggtctgtgaatgcgcacagagaagccgcgtgcttgagaagtcctcctataaagtacatggccgtatcgctaagctgcgagtaaccgttcttatcatagaataaaggcttgccttttttgaaaagatgcatatgcacatgcatgccggagccagcctcgttatatataggctttggcataagcgttgctgttttgcctgcctgcgcagcggcattcttgattacatactttgcaatcattgtcttgtctgccatatcaagcataggtccaagctcaacctcgatttcaacctgtcccggtccgcctacctcgtgatggtgatatttgactccaacgccccagtcctctaaaagcatacatatatggcttctgagtccgtaggttgtatcgtgaggaatgtcaacatgatatccgccctttacaggtacctgataccccatattgttgtcatactcgcctgaattccattccgcatatcttgtatcaacctcaaaacccgcagtctgcgtcttggtttcatagcttactctgtcaaacagatagaattcaaattcaggtccgataatcatctcgtctgctatgccttcagatctcatatactcctgcgctgcagccgcaacgtttctcggatactggtcaaaaggtctgttttcgggcagatctataatcattacatcgcccatcattgtaattgtcggtatatccataaacggatcaataaccgctgtcgaaaggtccggtataaataccatatcggatttctcaactgccgcatatccgtaattggagccgtcaaagcctataccgtatttcattgtgtcctcagtaagtcgtttccacgggaatgcaagatgacgccatcttccgttgatgtcaatcattttaaaatcgatcatttcgattttgtttttttcgcagtatgctcttacatcttttacgcttttaaacatttttccacctttttttctttaatttatttcattgcttctgcaattttaaacggaattgctgcgcatctttcttctgatatagatgcaaccgacactctcaggccctttgcaagaggaactatgaaaataccctctttttcaagctttctgctgatttcatcaggattagggcaaggtattgatgcgaagaaacccgagtcaaaaggcacgatttcaagacctgcctcctttgctgatttttcaaaggctctgcctcttgcaaccagcatatctctgtactgttttctttcttcgtttaccctggcaagcagcttctcatcctcatatatgttagctataactttctgggctgctcttgtgctgtttgaccatgtagctcttgcagagaattcgcatacctgtttgaattcagccgcaatttccgctgtctttgccatacatatcatagctccgcatctcattccgtaaagtgtgaaagtctttgatgcgctgtagccaagtacaggaagcacgtttgcaggaagctcctcaagcttaggcaggaattgtctgtattcctcttcatcacctgcaaaatctatatatgcaatatcaacaaacagagttatttttttgtcgctgcctgctgatgaaagtgtttcgattactttgtcccagtcggaaagtgtaagcgagtatcctgtagggttgtgagccggtgtgttgagcagtataacaagagagtcctgctttgcaagaagtccgtttaccttggcgtcaaacgcctctttgttgaagcctccctctttgtttaaaagctcataggtttcaagagttctgccctgctcctgcgctatgctgttgtaaggcgcccagaaccagtctgccgtaagtactgcatctcccggctttgaatagtttgatactgtgtttctgattgaacctgtgccgcccggtgttgcaacagcttctgtaaagcactttggaacaaagcttccgaaagctgctttctgaattgcttttttgaattcaggaattccgcctataggcgcatattccgcaaaatccgtagggtttaattttttgagttcctcaacaactgatgacattacgattaaatctcccctgtcatcaagaagcgcacctattgtagcgttaactacgttttccttgcccttctctgctatcattgcctttgctcttgtgcttattccgaatattttatcctcttttggaatttttcttccgtttgcctgtgccattatatattctgccatctcaattctcctttcatatgtgtaaattgctgtaagcctcgatttttaatgcttgtatctgggtacagttactatttattatattcgaaacctcaatttattacaagcattgtcagtattaaatttgtatatggtggcgataatattaacggaggtgaaagcaatgagacaaaaggtcagaaaaaaagataagactgccatagcacttgttctgtgtttctgtgtaatcgctttagcttcggtgtttacgctcaaggccaatataaataaggtgcaggcgcctgcaggtgaagaggtcgatacctcaaagcgcgttgaggaaacagccaaggcaaaaccggaagaaagcgctgcatcatcacaaattcccatagtggaaagcggtcaggcccaaaagagtacatcacagtcagaagctgcgtatatcgcccctgctgagggaaatatacttaaagggtattccggcaaaggattagtttactcaaaaacactggatcagtatatggttcataaaggcatagacatcggcggcaagcttgacgctcaggtaaaggcagtcgcagacggcacggttacaaaggtctttaccgatgacacaatgggaataaccatagttatcgaccacggaaacgatatatgtacggtctattccaacctttcaaccgacagtatggttgaaaccggcgacacggtaaagcagggacaggttatatcgggcataggcgatacggcgctgtttgaatgcagtgatgaggctcatctgcattttgaggttttaaaaaacggcagaaatataaatccggaaaagcttgtaaaattatagggtttgcgcaggcagggcttttgaaaatatcagacgccctgtttttttgcatttaaagtctgtttgtgctatcatattgttattattttaaaccacgaggtgctttatgcagatatcaagcagatttacaattgcagttcatatactcatatgtatagaaacattcaaagaggattacaagattacaagcgatttcctcgcttcaagcgtaaacgtcaatcccgtagtaatacgcaggctgctccagcagctcaaaaaagcgggcattataaatgttaaaagaggcagcggaggcgcatatatagaaaagcctcttgatgagattaccctgcttgatgtctacaatgcagtcgaatgtatagacaacggaaatctgtttcattttcatgaaaatccaaacagcagatgccctgtcggcagaaatatccactctgttttagacaggcggcttgacagtatccagcaggcaatggagcgtgaaatgagctcggtgacattacaggatattgcagacgatacggacagacttataaatatgtagctttagcccgcatactgacagaacacagtatgcggaaattttttcaaatttttgttgtaactattgacattacaacgggacgggtatatactcgttgtatcgattaaagttacaacaaattttcaggaggtatatattatggctaacttcaataagacaaacgttgcagacggcgcaagaacagagcttcacgatattcttaatctgacaggagctgaaatcagcatcaacaatctgccggcaggcgcaggagttccttttgttcactcacacaaggaaaatgaggaaatatatgcggtactttcaggcagaggcaaggcagttatagacggtgaaacagtagagcttgccgcaggcgactggcttcgcatctcccctgcctgcaaaagacagttttccgccacagatgactcggctataagctttgcatgtattcaggtcaaggaaaactcccttggcggctataccgcagatgatgccgtaatacacgaatagtctgtgtcaggcagtcgcataacagacagcttcgtctaaacgccccggcagcccgggtttttttaattattccgatatgatataatcggcatataacaatgcaaaggaacgaaattttatgacacgtatcggaataatagaagatgacaggctgcttaacgaggctctgtgtacataccttgaaacactgggatacattaccgacagcgctttttcttttgaagagggtatggctcttgcagataaacaccccgatctgctgctggcagacatagggcttgcagacggcagcggcattgaaatatgccgcatggtgcgcggtaagactcctgttatatttcttaccgcaaaggacggcgaggaggatatgctcagggctttcggctgcggcgcagatgattatcttgtaaaaccgtttcccatgcctgtgcttgcggctcacattcaggcagtgctgcgaagaaccggcggtagcaggaatgaactgcactacctggatatgtatatcgactatgataaaaaacaggtacagcttgcaggaagccctgtaaaactcacaccgcgggaatatcagcttctggagctgctttcgcaaaaccgcggcagagtcgtaacaaaagatatgattttagaaaaggtatgggactcccgcggcgtttttgtagacgacaatacagtaaacgtcacccttaacagactcaaaaagaaaatagagcctgacccttctcacccgctctacatcagaaatatattcggtctgggatacacctttggagaatagccatgaaaaacagcagaaaagaaatgaagaatatatctcttgctcttgaaaagatactaaacggagaagttcttgaacctcctgcggaatacacagacaccctgccctcaaaaatcactcaccagcttttccggcttgatgaaatgctcagggcaagagaaaagcaggctgctcttgagcacagtcagataaaagaacttatcgcagaaatagctcaccagatgagaatgcctcttgccaatctcgaaagctatacggaacttctgtcgggcgctcttgaaaatgatgcgcagcgtcactatcttgaagctgtctgcaaatcggagcagcagcttaaattcctgacagaaagctttataaaaacggcgcggcttgaaaacagaattatacagataaaaaaagaaagcgtttctcttagagatacaattctaaaaagcattcttacggcaagcagagccgcagaggcaaagcatatagacataaggctggaggctctgcctgaaatatccgcgcctcacgatgcaggctggctcggagaggccatatataaccttattgacaacagcattaaatattcaccggaaaattccgcaataactatcaaagccgccgcagatgagatgtatgtcagaatagtcgtatcggactttggcgcaggaatatccgaagatgaggagagccgtattttcaaaaggttttacagagggaaaaacacaagcggccagcccggctttggcctgggcctgtatatatcaagacagattgtgatgctgcacggcggttttatgaaagcgcgccgaaaagaaaacggacttgatatgtatatttttcttcctgtttcttaaaatgtaagcagattgtaataactccctgctagaattttattcaaaacagaaatcatcagaaaagggagtaaattattatgaatatattaacaacagaaaatctcaaaaaaatatataaaactccatcaggcaaagtctatgctcttgacggagtttctgtttctgtatcagaaggtgaatttatagctgttgtcggctcctccggcagcggcaagacaacctttctcaatatgataggcggacttgaccggcctacagcaggt

SEQ ID NO: 308 - DNA, 3935 bp, Unknown
  16S sequences of unknown bacteria
tatcacgctggatttttccgccaacaccaaccccctgggtacgcctcccggcgtactggaggcggtgtgccgggctctgccccggctgcaccgctaccccgacccctactgccgccggctggtgcaggctatcgcgggccatgagcaggtgccggcgtcctatattctctgcggaaacggtgcggcagacctgatctacacatactgcgccgccctgcggccccggacggcggtagagctggcccccacctttggggaatatggggcgggactggcgcaggtgggttgccgcgtagagcggtatttcctgcatcaggcgcagaatttcgatttggacgagaggtttctgtccttcttagaggggaaaaaaacggaggtggtattcctctgtaaccccaacaaccccaccgggcggctgatcccgctccctctcctggagcagatcctgcaatactgcgcggcacaaggggcgcggctgtttctggatgagtgctttctcgatctcacggagaacggcgtcagcgccaagtcccttctggcagcgcacccggagctgctgatcctgaaggcctttaccaagagctacggcatggcgggcatccggctgggatactgcctgtgcgccgacaatgcgctgctgtgccgcatggcggccgcgtccccgccgtggaacgtatcctcgctggcgcagagtgccggtgtggcggcgctggcggagcgggactttctgcaaaggacgctgtcccttgtccgcacggagcggcggtggctcacggataacctgacggcgctgggcttctgggtatgcccgtcccacgccaattacctgctgttccgcgggccgttggggctgcgggagggtctgctgcggcagggtatcgccatccgtggctgtgggaattacagcgggctgggcgacgggtggtatcgcattgcggtgcggcctcacggggaaaatgaagcattgataacggccatccggcaattctgcaaggagaaatcactatggcaatgaatattatgatacagggaaccatgtccaatgcgggaaagagcctgctggcggcgggactctgccgcgttctgaagcaggacggctaccgcgtggcaccgttcaagagccagaatatggcgctaaactccttcatcaccagggacggcggtgagatgggccgggcgcaggtggtgcaggcagaggccgccgggatcgagccggatacccgcatgaatcccatcctgctcaagcccaccaccgacgtgggcagtcaggtcatcgtcaacggacaggtgcggggcaatatgaaggccatggagtatttccgccgcaagcgggactacatccccgccgtgctggaggcctacaacagtctggcagcagagtatgacgtgatcgtcattgagggggcaggcagccccgcggagatcaacctcaagcaggatgatatcgtcaatatgggccttgccaagctggtggacgcgccggtgctgctggtaggcgacatcgaccggggcggcgtgttcgcccagctctacggcacggtggcgctgctggaggaggacgagcgccgccgcatcaagggcgtggtggtcaacaaattccggggcgaccgggccattttggagccgggactgaagacgctggagcagctgtgcggcatcccggtggcgggggtcatcccctacactcatgtagatatcgacgatgaagacagcctgactgagcggtttgaccgctccaaagagcgaaagctcctggatatcgcggtaatccgtgtgccgcgcatctccaatttcacggatttcagccccttcgagcattacgaaaacgtgtcgctgcgctatgtggatcaggtgagcgacctgcaccagccggacatgattctgctgccgggtaccaagagcaccattgccgacctgcggtggctgcggcagtccggtctggaggcggccgttttgaaggcggctgacgccggcacgctggttttcggcatctgcggcggctatcagatgctggggcgcaccgtgtccgacccggagcaggtggaggccgccggtgtcacggaaatcaacggtttgggtctgctggagatggacaccgaatttcggggtgaaaaggtgcagacccagacgcgaggcgtctttcacggtgtggagggaatgctctccggcctgaacggactcgtctacgaggggtacgagatccacatgggacgcagtcagcagcagatgcccgccctcaccggcagcagaaacgtatacggcagctatgtccacggcatttttgacgcgccgggcatcacggatacgatcctgaaagcactgtgcgccagaaagggcgtgtcttttgacgcgctggcaacctttgacgcctgcggctacaaggaacggcagtacgacctgctggcggacgtggtacgcggcggactggatatgtcctttgtctaccgggtgctgcgccgggaagtataacgaaacaagttccgatggaaaaggggggaaagacttgagcaggatattatgcgtgattgacggcatgacggatccccactttcaggtggagcgatatggccatctggcgtccatgggttcgatgcggtatgtggatacctgcggcggcttcccaccggaaacactgcactgcgtactgcgcctgttgggggtaacggatctgccggtacatctccgaggctatgtagaggcgctggggggccggaatccccgtccggcccgatgacctgctactgcgggggcagctgctacacgctggatggggagggctgctgtaccatgcctttgaaagactgctgacgaaagaacgatgtatgcttctgtgggggcagtctgttccggtagcactgccgccatttccccagaagagcgccgtaatctgcggcaaggcttaaaatcaaaacctcaggcttatccgtaatctcattaagataagcaataatccagaccgccgatagggcggtctggattttttttgcaaaaaaaatcaaaaaaacacttgacaatttgaaaaaaatcggaagcttcgccttgagaggaatttcaaggaaaccacgccgatgagaaactacccgaacaccctgaaaagaaagcttctggataccatatccggaaaacaagaagctgtatagcgaattgtatcctgatgaagccaagcagatggaaggatacaccgaaaacattggagcccttctaaagcgggaactcggaatagacagtataacaaccattgatagaaacactgaaaatgcgagaaactacaaccttgatgtagtgggtatgactgactacatcgaaaacaaatgtggttggcgtcgcaacgtgatatattatgacgcagaaattatcaaccaaatcaatattctgaggaaaagatattaagggattgaaggttcttccttgatatgaatgggtacaccataaaagcatccacagctttttggtaaggatgaggtcgactgcccaccgcattttctaagctaaaggcttcggtaccactccgcgcggccacaaaatttagccttatttttagccttatagcttcaaaatccgataatacaacttggcagcatttaacagcatgatttcctgcaagccctgtatttccaacacttccgggcatcggtcaacacgacgcaaaatcgccccacggtggttcaaatccgggtgtcacctccagatgaaaacctcgtaaccatgccggttgcgaggtttttcttgtgctctaaatttcagttttcctcatttccccctttagcggtgaaatacctctgcggtaccggatcgccgccggtctgtgtcccccctgccgatcaaggcagactgtaggactacaatacatcttggacaagtgaataaaaagatatgagggacatggtctcaagggttatagttaagttaccacaccaaaccagcccgaaaggaga

SEQ ID NO: 309 - DNA, 9838 bp, Unknown
  16S sequences of unknown bacteria
gaaggctgctgccacagctagacggcgacgttcacacgcccgtacgctcctaggcgaagctctcgaggtgctcgcaaaggaagctgcgggcgcgtgccatatcctgctcgtcgggatgcttctgcgactcttccagacgccgcacccccgcatcgtccagatggtgcgggtcgtctgccggcagctgccggcgcttttccacgttcttcatcgacaccttgccctggctcaagaacacgcccaggcactcgttatgctcgctgacgtcgcctatcacattgcggcggaccttgtctgcgtacgcgctgtccgggtatccgccgaaggtgccgaacacgaggatcttcttgccggaaagctccgcgaggaggttctggttgcgcacgtcgaagcgcgacttgaagcaccagaagcagatgatgacgttttgactctcgatcggctcgcccgcctcgcgcacgtggtacccgacgcccagctcgtcgagctgcgcgcacacggcatcggcgatcttttgggtgttgcctgtgcgggaagagattgcaatcgtgatgtcgtcggtcatgagggctcctcgctgtgctcgtggcaaatcgccgaaattatccttcggcgatttgcccgcagtctgttgtatccccaacggccgcgtcgcggaatcggcgagtgcgccctctagccggcgattgcgtactcggcgttctcgacgatgccgaagcgcctgatctggccgagcgtcgcgccgtcgagcctgaggttttccgccccgttgcgcacgcggtcgaggtattcggggcgaaacgtcgcgttgccgaacggcgggcggtcggaaaggtagatgagcgagacgcccgcggcgctgcgctcctggtagccgtagatgacgtcatcttggtcgtgcttgcccacgaagtcgaccgtgatgtcctctttgtggtagcagccggtctcgacgccctcgaaaccgtcgagcttggcctcgtcgcagcggtcgaggttccacagcgcgccttggacatgggcgcccggctgggcgacgaccgtcgcgtatcctgcggagtcgagcttgaggacatggtctttgagcgtcgcgatgccaacgtattcggcgttggggcagcgcgctgccatctggtcgaaatccagattcgaaccgtatgcgaagtaaagcctcgatgacatgtctacctccttgacgttggcgtggaccgaaaaacgacaaggagaattgaaccgcaaacagattgcgcgttcaagatgctggcataacataaatgcaatgctattcaatatattttattaatagttgaagaatacggagcgcgcagtatacgtaccgtcgcggcaagcgcaggcgcagatataaccgtccgatggcaggccattgcaaataagcatacttttgccgtaggtgtatcctcccgcacatcagtagaatccgaaaccagatgtcaaacgcgcgccgggcgcccgggacaacccgagtactcgggccgcgaacaagagattgggcagcccacttgagaagctacgtaaccgagaaccgcgaacgattcgtccgctacctttctgacggaatcaagcagccgggcggccccaccctgctcggggtcgaggtcgagcacttcgtcgtgttcgatgacggcaggccggtctcctacgagcggcacgacagcgccctcggcatccgggaggtgctcgagtatctgagcgcgttctaccccgaaagggcctacggcacgcggggcgacctcatcggcctttcgggcagcgacggcgccgtctcgctcgagcccgccgcgcagctggagttcagctgtgccccctgcacgacggccctcgaggtccaggcggcgtaccggcgcttccgcgatgccgtcgacccgtttctccaaacgcacggcgcgcatatcgtctcgcgcggctaccatcccacgcgaaaggcgctcgacctcgagctcatccccaaacagcgctaccggttcatggacgagtacttcgcgcgcatcggcacgcacggcgagcgtatgatgcgcagctcgtgcgccacccaggtctcagtcgactactacagcgaacaagacgccgtgcgcaagattcgggtcgcgtcggcgatcgctcccgtgctcgcggccatcgccgacaactcccccgtcttcgagggtgccgagaaccacaccccgctgcggcgtatgcagctgtggcgcgaggtcgacaaccttcgctgcggcgccatccccggcgttttcgatgcgggattcgggttcgaacgctatgcggactggattatgcgcacgccgcccatcttcgtcacgcgcccagctgcggcaacccccgcaggtccggcacttcgtgcggtatttgagcaggcggcagacaaggcctaccaagacgctcccctggaagatgccgacatcgagcacgtcatctcgatgttctggcccgacgtgcgcctcaagcacttcgtcgaggtgcgtccggcggactgcctgcccgcggactgcgcaatcgggtacacggcgctcgtcaagggcatcttctattcggaggagtcacttgccgctatcgagcgcgagcttggggtcgaaggcgacgtctggccaatccgcgtcgcggacctcaacaacgcaatcgtctcagtgcaggcgttcgggatgcagggcaaggtgtacggcaagacgctcgaaagctgggagaagctgctgttcgagctggcagaaggggctcttgaggcggacgaggcggcctgcctgggtccgctgcgggcattcgcgcacgacaagaactggtgggcagtcgagactgcgcgcgaagtgtagcggagcgcttcggcgcttcgggacggggagctcctgccgcgagatgcggcaaaggtgacactttttgccgtgggacgctgtaaaggcgacgcttttggccccgaatccgtctcccttgcgtggtcttgcggcacgcgttcgcacagtttgccatgggacacctcaagggagacacttcctgccacgaccgtgcccaagggggacatccacgggcttgagcctgtctccctcgcagggtttcgcgacagcccgggggtgccgtgccgtggggatggccgagggtgacgctttctgccgcgggacgctgtaagggcgacgcttttcatagcaaatccgtccccctcgcaaggtttcgcggcacgcgtccgtgcaggctgccccgggagaagccgagggtgacgcgttctgccacgaagttgcctgaaggagacgttccccaccgcatcttcgtccccctcaccagtcctcgtgacagtcagataagcaatcagacagggttgtgcgaagcgtactcggcattcgccgtgttgaacaggcgcttgacgacctcgatggtgcgacggcaccgtgcgttggggcgcgcgtccttccggtacaagaagcccacgcggagctgcgcctcgggtgtcgcgagtggcgtgaagcggactccctccatggggatgtccggatcgcggaccgcgacatggtagccataggaatcgaagagcgaggcgaactgcttgtgggcaaactcgacgagcagccgtatgctcgacgtcttgagctgcacgttctcgagtggcgcctcggcaaagagcgcctctgcgtaacgcctcatgtcctgatgcgagttataggcaatcggaacgtcgcgcaactcgaagcggtgtatggtctcgtgatcggcgagttcgaacccctgcgtccagataaccccggtccgtgtgctgagaatcggctcgaacgaaatattacccatctccccgacttgctgctgcagcagcggatacagctcggtcaaaaacagttcgtcgacgcctccgccttccacaagctttagcagctcgggaatcgtctcctcctgcagcgtgaaagtcccaagcgtgctacccgccagattaagaccggagaacacgctcgtcgcatagctgctggcagtaattttgaggggcttttcccgcgaatcttgagcactcgacagtgcggcgatgtcatcgacgatggctccaatctccgacacgataacgacggcatgctgatagaagaccttgccctccggggtcagcacgataccgtgccgattgcgctcgacgagctttgagccaaactcacgctcaatcgtgccgatcgccttgttgagcccctgcggggagatgaacaggttccgtgcagcggcactgaacgagccggcattcgcaagctccacgaagtaacgcatgctctcgatatgcacgtctccccctcctcatgtgacaacctttcgttgtcattctagggaattcttcgagtattgccagaacacgcggtgcttcagatagatgttgattgatttggaatgcagtaagggcgacgttttccgggctgattccgtctccctcggcgagtttcgcggcatcccgggcaacccgtgccgcgggatgcgccgagggtgacgctttctgccgcggaatgctgcaaaggcgacgttttcaggggtgatttcgtctccctcgcgggatttcacgacaggccggcgtgcttgagccgcgagaagggcagagggcgacaggcccctactcgatgacccgcggctcgatgtcgatgacctcggacgagacctcgaactcgtctgttgcctggggcaggcccgcaaagtagcggcgcatgacctctgcgcccgaggtgaacatcgagaaggtgagccccgccgacatcgccccgcctagcatggggaccaccttgctcgccacgcgcggcagcatgacgcgggacaacgcccccgcaacgcccgtgcgcgcggcattgaagccgaccttggcgaccgtattgcccacatcgccgattcccgatgcaaacccgatgatgagcgccagatgatactgtggatcgtcttcctgatcgggatcatcgtccaggaacgagtgccacccgtagagatacgcgagcttctgctcgatgcgcaggacgtgcacgaagtactgcgtgaggtcgagcgggatggtcgccgccattgccagaccgccgggcataccggcgagaaacgaaagcccgctcgaacgcagcgcctccgtgcgaatctcggcgagcgcgatcttgtcgatgacctccggcgcgatgcccgcctgcgcgggcgacagctgaacggccgcctcgatatccgcttgcgggcagtacttgcccagcacgcggcgcagatatgtgctgctctcgatgaaaacgcccttcgtcgaagcggcggcttcgagtgcagcaagcaggcgctcgacaagatctgggtcgatgggaagggcctcgaggtcgatttcatccagcaaactcggcatgctcgctcccttggcacgaaaaaaagatgaattggtgtccccaggaggattcgaatctccgttactagcctgagaagctagggtccttggccactagacgatggggacaaacggtaagtatagcgtattgacaagccggggagcctctcgcttgaagtcgctgcggcgagcgacacagcagcggcaaacgcctgcaaccagcgccctgccgcatctcgccctcagcggtaacaacttgataccaaattgtgataatgcatagcatttatctcgagaagaaacgatactgggaaaagtgtaataagtgttcgcttacctgacgcagcaacatgtatgcgcctgagaacaagcaattgaatacgtgtcgagcagttgtcgtcgtttccaaaaggagggcagcagcatggacgttattggaattgccctgagcgtattgtcggcgatgcttctctacgccagccttggcatacttgcaccgcctgtcttccgcaagatctgcacgcaggcagcctctctcccccaccccattgatgcgcatgagcgtgtgcgcatcgtcgaagacaaccgcgaggcgcttgtcgtgaggttgcagatgatcggcgccgccaagcgcgacatcgtcctctccacgttcaaatggctcgatggcccggcgagcgacggcgtgaccgccgcacttgcctgcgccgcagagcgcggcgtgcgtatccgcattgtcatcgacgattttggcatgaacaaatgcctcaaacgccgcacggccttccgcctgctcgcttcctatccaaacgtcgaggtcaaacgctacaactgcgcaagcctgttgctgccctggcgctacaactaccggctgcatgacaagtatctgatcgtcgacggcagctattacctgcttggcgggcgcaacatctccgatcgctcgctcgggtctgccgcgaagcactacgacatcgaccgtgacgtgctcgttgtgaacgagaagggcatgggaggctcgcttcagatgctcgaggcgtatttcgaggaggtctggtctcagcgcgtgagccgcagcttccgcccacggcgcgtgcgcaggcgcaagcagacgcttgaggcatgtcgggttcttctcgacgccctcgcacacgagtatccgcagctggaagaggcattcgacccttccgagggcacactcgagaccaagcgcgtacacctgctgcacaactcgtgccggccgacgaacaaggcgccgcaggtctggaacatgctccacgaactcgcgcgtgaaggacgcgacatcaagattcagtcgccctacatcatcgtcgactggagcatgatcaaaccgcgcgcgcatgttgacggcgcgcatcgcgtccagctcatgaccaacgcgccggaacagggcgcgaacccgttcggctgcggcgagtacatcgggcatcgacgcgcgattgtccgcgcgggagtttcggtgctcgagtggatgggcgggcaatcgatgcacacgaagacgatgctcatcgacggctccacaagcgtcgtcggctcctacaacctcgacttgcgaagcacctacctcgacaccgagctcatgctggtcatcgactcgactgaggtcaacgaacagctgcgcgaccatttcgagcagatggcacgcgcgagccgcctcatccagggcgcctgcgtgcgtgagcccgtcgaggacgggctgctcttcgagcagcccgcggtgagcaagcacctcagctcttcggcccggctgcagaacctggcgcagcgcgcaaagggagcatgcaagcgcgggtttgcccgcgtgaccggggtcgtcttctggccactgcgctacctgatgtagcttcgagctgccgcgaggacgtggggacgtccaagggggacacttttgccgctaatccttcgcccttgcgtggttccgtggcacgcgcttgtgcttgctgtcgtggggcaagctaagggagacgctttttgccacgagggtgaccaagggggacgctttcggccgctaatccttcgcccttgagagctttcgtggcacgtgtgtaggcggaccggcacggaacgatgcgagggagacgctttcggcgcgaagcgacccaagggggaatatcctgggcccgtgcccttcaccctcgcaggctctcgcggcacgtgcgcaggcggaccgccacgaaacgatgcaagggagacgctttttgccgcgagagctgccgagggagacgcttttggccgcaaatccttcgccctcgcaagctctcgcggcacgcgagggcgcgatgccccgcatccccctattcgaacatcatcgcatcgatgtagtgagcgttgaacgccgcgtcacccgaaagctccacgtagtcgcagacctcgacaatgcgcgcaagttcctcgcgcgccgcactcgaaagcagcaccgcactcgcgccctcgatgctcgtgttgccgacgcttgccgccttgtcgagcagctcttccggaaacagcccgatgcgtgcggcgttgcgcagatcgaggtactgcccgaagcctccggcaatctggagctttgccacatcgaaggcatcgatgccccggcgctccatgagcgtctcgatgccgcccatcaccgcagccttggcaagctgcaggttgcggatatcctcctgcgtgattgcgatctctcctgccagcctgaacgcaggacgcccgtcaagctcgaacacgcggccagccaggtcctcgtcgtcgacctcgtcggccgcctcgtcatcatcgagcatgcggcccgtctcatcgacgatgccgagctcgagtagcacagccaccgcgtcgatcagccccgtgccgcagatgccgaccggctcctccccgccgatgacctccaactcgagcctgccatccgcaaggcgcacgctcgaaatcgcgcccggatacgctggcatgccaaagcgcacgttagatccctcgaagacgggtcccgcagccgtcgcgcacgtgatgatgcccgacctgtcgccgagcgccatctcgccgttggtgcccaaatccaaaaacagcaccggctcgtcttcggagcgcacgtcgatggcgagcaggccgcacgtgatgtcgccgcccacatagcccgcgacgcacggtgcgaagaatgcctgctcccccaaaaactccacctggctgccaaacaacgtgacgggctcgaatggcgcgatgccgatgccatgcggatcgagccccgcggcgatgtgctccatggtagtgtttcccgccagcgcgatcgagaccacctcctcgcgtcgcactcccgtcttcttgcagagcgtggcgataagcgaggcgacctcgtcgcagatcagccggcgcatctcctccagatgtccgtcgtcggcagctttgatgcgcgtgatgacgtctgccccgaagacgatctgcgcgttggagttgcccgcgcttgacaggagcttgcccgacgccagttcgtacagacggcacacgacggtggtcgtgcccacgtcaacggagacgccaaagccgcccttgcgccagtcgggactccactgtcttgccatgcctgcggtggtgacctccatggggcggtctttctggagcgtgacctccatgtgctcgtgcacttttgtttggcaggcaagccgatacgacacgccctcgtcatcgcgcacgagcacgcggcatttcttgcaggtgccgtttccgccacacggggcctcgaccgtcgcccccgctccacgcagtgcctcgagcagcgtcatgcccttagaagattccactacgcgcttctcgccgtcttgtcgaacgatgatctccacgccgtcagaccccttcccgtgactttcctacagcagcacggcgctcgtgtaggcgatggtgagcggaccgtggttgtagggaacgtccgcgacctcgcacacctggtagaccatgaggcctgccgcctccatagagacgagccggttctcgggatggcggcacggctcatcggggtaggtgcacttctcgcagatggtgcacgtgcccgccgcgagcgtgagcgcgtcgatgccctccgcggcaaggcgcttggagagcttgagcacgcgggctttctgctcgcgctcggcatccatcatcgtctcgccgtcgaactcgtcttcaagctcgcgcaccgtctgcacgacaaagcaggtctggcgcgcgtcgatgagcttttggtattcctcgatgccgccgattgccggcgggcatgcccagttgtgcccgtacatgtggcacttgcccgaagcgcacatgccgcgcacgtccgcgcgcaccgcaaggtccgaagcggggcagacgccataatcctcgaacccgatctctgcaatcagctccttgagcttctcttctgcattcatctcagcgaacctttcccagatgctcccgctccgatgcggtggcgacgacgctcgtgccaaggtagatactagtcccatctgtagtgtatgactgtgataccttcgaggaatcctcgaagacgagctcgcctaccgccccgcggcggcg

SEQ ID NO: 310 - DNA, 32759 bp, Unknown
  16S sequences of unknown bacteria
taatattgaaaaatgtaggaggcgtggggaaaatgcaaatgacaaaacaaactaaaaatgtacgcaggaagccttttttaatctgtatactcttgggaatttttatttttagcgcgctgctggggggaatacttttttctattcccgagaaaaaggcggagaacgatttatgcgatgtatatatcaatgacgttgacttttgttcttgggatacgaaaaacatggcgttttgttcgtataataaaggattgaaaaataaaagtttgcgcaatgaaatatcgactacgggagaatcgacaacagaagaatatgcgggatttgtcatgcaatatggcgcaagcgtgcgattaaataaagtgacggggcttcgttttaaggcggatataccgaatgccttagcggaaaaggtggctttgttcgacgagaaaagctttggtttcgtgatcgcacctgcttattattttgagaaagcaatggagatagacgatcagacggactctaaccgcgattatgtgaacgatttggcgcatttgacagaagtttacggggcaaagcctgctttacaattggtttgcgaaccggtagaagaaaacggtaagttgatcattcaggcttcggtcgctaatattttatataataataccaatctgacatataccgctgccgcttatgtaaaaacggaaagcaacagcggggaaatatcttacacctatgcggcgtatcctcaaacggactgtttgggaattgcgcgttcggtttcctatgtcgcaacggcggcgctcaacgatgaaagcgctaattattccgaggaaaatcgagcggtgttgcgggagtttgtaatacacggtatagatttggcggccacttttacagaggaggagtcgccgttgtatacggagcgaaatatagaattaaccttggaaacgcctttgtcgagtttggcggtcggtgaatctttgactttatcgcctttgataacggttgcatacccgcaagcggaacaaacggggaaaagaaaaattctttttccgttgtattggcgcagttctgcccccgaaattatttccgttaccccttccggtaccgtgagtgcgcacggagaaggctccgcggatatttacgcttacatcggggaaacaaaggaatgctggactctttgttgcgaggacgttgccgtttatgactgcaatgtaataaatgaaagcggctatgatttattaacaattgctatggattcacaaaagataagagagggggacaattttacggcgactctttccgtgaaggagtatgcgagttacggagaactttctttctggattgacggaactttatatacgacagaaaacggtgtggcgaatttttcgcaaacgatctcggcagatacggtctttaaaatagaaaatttatcttcttccttaaactattttacatttaaaacgagcacatccgtttctcttggaaccactaaaattctgcgtaaagagttgccggtaaaaataattttacccgtgctttcaaaagagaaaaaaacattaacgacaatcgcaacggatgcttttacaggcagtaaagaggcggatagatgtactaacttgatagagttaacgatttcggaaaattatactactttgccttcggacgcatttcaatattgttcgggattggaaataatttgcttaaagaatactaaattgaaggataaatcgttgcttggaccaaattggtcggggtgcgatgctttgaaaaaaatatatattcctatcggaactttagaggggtattcaaagaataacttttggaaaataaaggcttcttgcctggaagaaagagcgttctgagcgaaaagaacagaaataaatacctgaatagatatggggaatgtaaataagcgcgattgaagaatcaaagggaaaaagcgctgaggtatgttaaaaattttctcggcgcttatgagcggagaaaggagaatccccaaaacaatttttgaaatagttaaaaactatttgaaacagaataatgccgagggcagggctgcggtgaattaaaaaatctcgtttttaaagaaaaaaagatgaaaataataagctctctttttccgtaacaaaagagagaggacggcggggaaaaatcatggtatactcataagcgaaaagacgaggtacagacatggattggctgaaaggcttaaacgaagcgatgaaatatatcgaagagaatttggaaggtgcaatagacctcgatacggcggcaaaacgagcttattgttcgtcgttttggtttcagaggatgttctcctatttaaccgaccttcctctttccgagtatatccgcaggcgccgtatgacaaaagccgcgctggatatccgcagcggtgaaaaagtcatcgacgtggcgttaaagtatggctacaattctccgacggcgttcaatcgcgcgttccgcagcgtccacggaatcgcgccgagcgaagcgaaaagagaaggcgtatcgctgatcgcctgtcccccgctcgtcttttcgattacggtcaaaggagaagaagcaatgaattacagaatcgaacatcattccgcattcagaattttaggacaaaaaactcattttacaaacggaatagaagagtcttttcaaaaagtaccttctatctggaaggaagagaaggaaaaaggaattattccccgcctttgcgaattaatggacggagtgcccgatgggatattaggcgtttgtacgtctgcgcccgaaaaggaatttgactactatatcgccgtcgcaagtacaaagccctgccctcatggattatccgacctcctcgttcccgaatcggattgggcgatattcgaatgtacgggtcctataccgcaggcgatccagaatatgcagaaacggattgtgagcgaatggttgccgacatcgggatatcaatatgccgaatgtccggatttggaaagatattttgcggaagaagatcacgcggaaatatggattcctgtcgtcagaaaataacatcaaaattaaatagcaaacggataaaaaggacgcatagatccgttaaaaaagccgattcgcctataagacgagccggtttttgtctattttcaagagagaaagcggaaatcccacgccatagataatagaataaaaggatgcaaaagaaatgtcagagggcgggacacgttataggaacagtgaaaaaatttcccctcctcttgtggctttgcgaaaagatcggcaagggacgcaaagacagaaggcggagcaattgcatatttccgacaaaggtatacaaagaggagcgcagaaaaacgctcctcgatatagccttcgcgtccgagatttatgccctttataagatgaccgcccatgaattcctgcatgagaaattggaatccgacggcaaagcggaaaaaagtaaaacagcttttctcacaagacggtcgaactcatttctacgcagaaagaactttttaaacaaagccgtataaaagacagtacgaaacgcggcaaagcgtaaatatagcgtttattctcctttcaacagattgattttcgtctgaatgatctcggcgcgccgcctgtaacgatctttctcagcgttttttcgcttcgtttttaggcgcgctcggctttcagtgtttctttatctgccgccggaaaaaagtattgagggaatcgccttttccccgaaggaataataataagacgaaatatcttttttacttctaaaaaattgcggtattaaaaaatttttctgtattttcacataaaacgattgacattttcttgtcggatacagtaaaatagtaataagtatttcaaaaggagattgaacgtggacgcagacggcagtagtaggccatattcgctttttacttctgttttaatttcgaatagatacccgatttgagcataacttgtacgttttacgtacgagttatgcctttttgtattttcaaattaaaatttcaggaaatttattcggagttaaatagttatgattggagcaattattctacaagtagtacttatatttctcaacgcggtatttgccagcgccgagatcgcggtcatttccgccaatgaaacaaaaatgcaaaaaatggcggaaaagggcgacaaacgcgcgtcgcgcttggtaaaactcacctctcagcccgcaaaatttttatccaccatacaggtggcgatcacattggcaggctttttgggcagcgcctttgccgccgacaatttcgccaagcctttggtgaaaattttgatgaatgcgggaataagcattcccgagagcgtcgtcaattccgtctgcgttgttctcatcacgttgatattggcatatttcaatatcgttttcggcgagcttatccccaaacggatcgccatgaaaaaagcggagaaaatggcgctcggattgtcggggattttgagattcgtttcggtgctctttgcacccatcgtctggctgcttaccgtttccacaaacggcattctgcgcctctgcggcatcaatcccaacgaggaagaggaagaagtcacgggcgaagaaatcatgatgatggcggaagcgggcagtgaaaagggctcgatagacaccgaagagaacgaattgattaaaaatatattcgaatttaaggaattgacggtcggagaagtctgtacgcaccgaaaagatacggatattttgttcatgcctaagacggattcggattggaaaacgttgattcacgcgacccgccatacttattatcccgtgtgcggcaaggacatagacgacgtacagggtgtgctttgcaccaaggattatttccgtctggaagataaatcgcgcgaaaacgtgatgaaaaaggcggtgacgcccgccgtgttcgtcgcggaaaatacacccgccaatacgcttttttataagatgaagatgacgcgggagtactttgccgtggtcgtggacgaatacggcggaatgagcggtatcgtcactctgcacgatctcctcgaacaactggtgggggaactgacggaaaaggacgacaaagccgaatacgaaatcaagcggctcggcgacggggaatgggaaatcacgggacttgcgcccatcgataaagtggaagaaatgctcggcgtcaagctcccggaagaagaaagcggggaatttgaaacgttcggcggctacgtatgcggcatgatggggacgttgcccgaagacggctcgacgtttgaattgagtacggaacaaatgaatatccgcgtgctctcggtcgcggaacgttgtatcaaaaaagttatcgtcacgctcttaacccccaagaccctcgaagcggctggcgaataatcataaaagacattgtttctttaaaagcaaaaaagccgaacgccaatcgttcggcttttttcataaatcgaaataagaaaagagaagagccgccttttgcatggcgggagaaatgtgaatatttgataggtaagggataagaaaaagttttttgaattactcttccagataggggagcatcatattcatcgtgtcaaagacgcggatattgcacccgaaatactcgtactcgggcggtcctcccgtaatttccgagattcttccgtccaggcaaaagccctgcccgaaaacgagcaccaatttttttgccaaagtttcttccagatagccgagaatgcgattgagttcgatgctgtatacatagacgttaaacggaaattcgtccagcgcaatatggaccaattgtaactcatccccgctccgactctgcgcaagggcgccctgacgctcccgttttcccactccgtgtgccttgcagcagacgggaaattccagaccgtattttttgcatttggaacggcggatccactttttaaagaaactttgtatgcttgtccgtatgttcatatatcaagtttaacatattttatggaaaaagtaaatagtctgatagaaaaaaattatcactaaatgtcagaacggaaacgtttgataatctcttgactcgaaggataaatcgtgatataataagtcggaaaatataggaaggagatattttaaatatcgagtatttcgaaagcgaacggctttgcgcttctcctcgaaggggagaacgagcatacggcgaaagtgttttccatagtgaagaagacggcgcggagaaaagacaaaccccatacataggctggataagccgaaaagaaagggaggagtacggcaaatgacttacgaaaagacgaagacatttttaaacgaaaaggggcaggaacagcttttgcgtttctatgacgaattggaggaaacgggaaagaagcggttgttgtcggaaatagagaagatcgattggagctttgaggaggtactcaacaatcccgaggatctgagcggcaaaaatcgccgtatcgagccgatagagggacttcgcctcgaagagatagaactgcgcaagggggaatttcggaaggcgggactgcgcgcgcttcaagagggcaaggttgccgccgtacttttggcgggcggacagggaacgcggctgggcgtggacggtcccaaaggcgcttacgatatcggcattacgcatccgctgtatattttcgaacagcagatgaaaaacctcttggaagtcgtaaaggaatgcggaacgtatattccgctttatatcatgaccagcgaaaagaacgacgcagaaacaaaatcgttctggaaggagcaaggctatttcggatatcccgaaaaggaagttcatttttttgtgcaggacatggcgcccgcggtggatttcgaaggcaaaatctttctcgaagaaaaggacaagcccgcgctttctcccaacggaaacggcggttggttttcttccctgcaccgtgcgggactctgtaaggatctgcataaacgtggagtggaatggataaatatttatgccgtcgataacgtgttgcagcggattgcggacccggtttttgtgggcgccactctcctcgcaggcgtaaattgcggcgcaaaagtcgtgtgtaaagcttgtcccgaggaacgggtgggggtgctttgcaaagaggacgggcaacccgctatcatcgaatattacgagctgacaaaggaaatggcggacagccgggaggcagacggcagcctctcctatctttacggcgtcattttaaactatcttttttcactgaaaaagttggaagagattgccggtagccgcatacctgtccatattgtaaaaaagaaaatcgaatatgtggacgacgatggcaagctcgtaaagcccgaaagggaaaacggaaggaaattcgaaacgctggcggtggatctcatcaaacccatggggagcgtgctgccgtttgaggtggacagggagaaggaatttgcgcccatcaaaaataagacaggcgtagacagcgtggatacggcgagagaactgctcagaaaaaacggcgtgattttataaaggagattacctggcgatggcaaccgatttggtcggaaacgaaaaactgcaaagatttatacaattattaagcgatttaaaccatgaaacggcggaagtcttttccacgggcaaaacagatatttttcataaaatgaacgataccattttagagatgtattccattcagcacacgggagaagaggaggcgtatacggcgatagaagaggattgccagatcatctatcagaacttcaacgccatcatcgccatgctcaaaagcaacgagagtatttttatcgacaacgccaccaatactgcggtgaaaaaatttctgcaaaatattttcgacgccgacatcaacattctcaccgcctacggtttggtgtaaaatcatcgaaagaatatgcctcaaaaggcgaaaaggcttccgtttaagcgacggaggcctttgtttttggtaaaaatttaacatagttttcgcttttcccaagttgctttttaggcgcgtttatgatataatagattcatatcttataacggatatttttcattgaatattttgacaaaagacgggggcaactgcaagcgtcttttgtatctctgccagggaatgaatttttacgagaaagaggttgtcgatggcaaaattaatgggcattgacgtgggatccaccaccgtaaaggtaacggtcatagatcccgcgacaaacgagattttatataaaagctacgaaaggcatttttcgcgcgttaaggaatgcgtcttgaacgaattgaaaaaagtcaacggcttattcgaaggcgagcgctttcaagccgccgtcacgggcagcgcagggttgggacttgcggaaaagagcggtatctccttcgtacaggaagtgcaggcggcgtttatcgccatccgcaaatattatcccgacgcggacgtcgcggtggagttgggaggcgaggacgccaaaatcatctttatcacgggcggcacggaacagcgcatgaacggcagctgcgcgggcggtacgggcgcctttatcgaccagatggccacgctcctcaatatcaccgtgcaggagatggacgagcttgctttgcaggcggaaaaaacgtatcccatcgcctcccgctgcggcgtatttgcaaagtcggatattcagcctttgttaaatcaaggcgcggcaaagtcggacatttccgcgtctattttccaagccgtcgtcgaccagacggtggcagggcttgcgcaggggcgcagaatcaagggcaaggtgctctttttgggcggccccctctattttttgaaggcgctccgccgcgcgtttacggaaacattgaaactggacggggaacacgcgatttttcccgaaaacgctccctgctttatgtctttaggcgccgcgctgtacgcggaaaacgcggacgaggcacccatgtccgagatcatcgggaaaatcgagaacagcagaaacagcgacgacatcgtgacgggagagcctctctttaaaagtcggggggaatacgacgcgtttattgcgcgccataagcgcagcgacctgtcgtttgcggacattcacgcctatcgcggcgacgcttacctcggaatagacagcggctcgactaccacgaagatgatcctcattacggaggattatcggattctgtattcccattatcaatccaataacgggcagcctctcgatatcgtggtggaaaagctcaaagagatctatactcttgccgaagaccgcatcaatattcgcgcgagcgcggtgacggggtacggcgaggatctcatcaaagccgcgatgaaagcggatttcggcatcgtggaaacggtggcgcatttcaaagcggcgctccatttcaatcccaaggcggatttcatcatcgacatcggcggtcaggacatcaaatgctttaaggtaaagaatcacgccatcgattccatcatgctcaacgaggcgtgctcttcgggctgcggttccttcattcagacgtttgccaaggcgatggatatggacatcgaagagttttcccggctggggcttttcgcgaaaaatcccgtcgagctgggctcccgctgtacggtgtttatgaacagctcggtcaagcaggcgcagaaagagggcgcgagcgtcgaggacatctcggcggggctttcctcgtctatcgtcaagaatgccatttataaggtcattcgagctaaaacgcccgaagaactgggggaaaatatcgtcgtgcagggcggaacgtttatgaacgacgcggttctgcgttctttcgaaaaagaaacgggaaaagaggttatccgtcctgccatcgcggggctgatgggcgcgttcggcgcggcgctgtacgcgatggaggcgcagcccgcctatgtcccgacgagttccctcgcttccgcgcccgagcttgccgatttcacgtatgcctcccgctgcgcaaactgccgcggctgtacgtccaagtgcaatatcaatatcatcactttcgcggacggcaggaaatatatctcgggcaacaaatgcgagcgcggggcgggcaaaaaagtccgttcggacgaactcgatattttcgcctataagtacaggcggcttcaagaaagtgtgacggcgtcgcagggcgtttcggacggcgtgaaaaagggcagagtagggcttccctttcaattggtcatgttcgagcagcttcccctttggacgggatttttcgaaaaactcggctttgaggtcgttttgagcgacaaaagctcgcgcgaactctattttaagggacagcacacggtcgccagcgatacggcgtgttatcccgcgaagctcatgcacgggcacatcgaaagcctgctggataagggcgtggactttattttttatccctgcgaaagctacaatctcgacgaacacgattccaccaatcattataactgccctgtggtcgcctattatcccgaacttttgaaagcgaataacgagcgcctcacttcggaaaattttatcatgccctatctcgatccgaatatgcgggagagtacggtgcgcaatctgcgcagtgcgctgggaaaatataaattcacgaaaaaacagatagaacaagctctggacgagggattttcgaggctgaacgcctatcacgccgacgtgcgggcgaagggcgaagagatcatttcgaaagcgcgtgccgaggggcggcagatcatcgtgctcgcgggaaggccgtatcacgcggaccccgagatcaatcacggcatcggcaagcttttgacgtctttggaactcgccgtcttatccgaagacagcgtctttgaatccgcgcctctcgtcaaggtcaacgtactcaatcaatggacgtatcacgccaggctctaccgagcggcggaatacgtgtcgcacaatgaagatatgaatctcgtgcagctcgtttccttcggctgcggcatcgacgctgtcacgacggacgaaatgcgctccattctcgaaaagaacggcaaactgtatacgcagatcaagatagacgaaatcaacaatctcggcgtggtgaagatccggcttcgcagtatgctggcggcgatagaggagcaaaaggcggcgcgcgaggcggaagaatcggaaaacgccgacgtctaccaggaagccgcggcggcggacgcctcgaatttttcgggcgtgagcggggtttgacacggaggagtctatgcaggaaagagaaacgataaaaacggtggactacaccgaagaatacccgaaatttacccaggacatgaaggaaacgtacaccattctcgttcccgatatgctcccttatcacttcgatattatctgccacgtagtggaaaaacgcggctaccatatggaagtgctgaaaaacgactcccgcgcggtgatagacgagggactcaaacacgtgcataacgatacctgctatcccgcgctttgcgtcatcggtcaatatatcgacgccttaaagagcggaaaatacgacgtcgaccgcacggcggtgatgatcacgcagtcgggcggctgccgcgcctccaattatatcccgctgatccgcaaggctttgaaagcggaatttccgcaggtgccggtcatgtccttaaactttgcggggcttgaaaagggaaacggcgtggaaatgacgctgtccctgcttttagaactcgcgttcggcattttttacggggacagcctgatgactctctataatcaatgcaagccttacgaagtacacgaaggggataccgaaaaggctcgcgcggaatgtttcgacgtcatcaaaaaggcgttcgatacgaaagcgtacaggcattataaaaaacttacgcggctgatgttggagcgctttaaaaagatcgaacgcagggcggaaaagaaggtaaaggtgggcatcgtgggggagatttacgtcaagtattccccgctcggcaactctcatctggaagagtttttgctgtccgagggctgcgaacccgtcgtgcctgcactgatggatttcgtgctatattgtatcgtcaataacgtcaatgatacaaggctttacggccgcaccaaaaagatgggatttatctattctctcgtctataaagtcgcgtaccatattcagaaacaaatcatcaagatctataaaaaagacggcacgttcgagccgccgcacgatttcgagcatctgcgccgctgtgcggacaaagtcatcaatcagggcgtcaagatgggcgagggatggctgatccccgcggagatggcggctctcgccgaaacgggaacggacaatatcgtctgcgcccaacccttcggctgcctccccaatcatatcgcgggaaaaggcgccgtgcgcgccgtaaagacgctttatccttacgagaacgtcgtgcctatcgattacgacccgtctgcgactcgggtcaatcaggaaaatcggatcaagctgatgcttgccaccgcacgggaaaatctgaaaaatcgtcaggaaaatgaagacaagagattataagcaagaaaaggtgactaaaaagacgtttcatataaagggacgtcttttttttgcggaataaataaagttaatttcgcaatggatatgagagaaataaaaatttttgaaaaattttaaattttttcgaaagagattgacaaatttttgggtttatgttatagtgatattgctacacaaattcataatactctaaggcggcagtacaatgcgaattttgtacttccttttttccgcgttagaggaatttgtgtagcagcaagtggaggtgcattttcggggtgtatctcacttgttgagatacactttttttcaaggagaattaaggaatgtttaataaaaatgacaagttattacttaaaatcaaagtaggcgccgcgattttgacagtggttttggaactacttttttttgtgggggttataatagcttttgtggagggaacagtcaccacaatcgtgtcttgtgttgtcatgatgatttttactgcgattatgtatgctgtgtatcaattgatcttttctttttactgtgatatcaaattaatcagaaataagttgtatggagcgagcaatgataatctttctgaatttattggaaacgacgacatagagataacagaggatatacagtcggggccttcccgtgaaatgaaaagtatcgacaatattactcaaacactagtaagccttaaaaaacttttagacgagggtgtgataacggaagaggaatttactgcagaaaagaaaaaagttctttcctcttaagaaatattttacaaggcgcaattttctcttacttatgaataagtgcccgaaaagaggaaagcatggaaaaaagaatattgcatggaaaagcgtccctaaaagggacgctttgttaaaagatgttttcaaaactgaaagagtaggacttggggattttttccgccatttcgataagaacctctatcttcggcagcgcgtcgtcgtactttttttcgtaaagatagccgagcgcttcgttgagctgatagtccacgttttcgatgctggtatgaggaatccagacgtgcagcgtacgttttttatccttccagtaggtgcgcacagccacgccgtcttcataggtggcggtttggtcctccgctttgttgtagagggaaacgagcgcttcggaaaaagttttgaacgtagtccccacgctgtaaatttcataggcggagatgccgagaaggagcgcaaacgaaaccaaaatactcacaatcgttcttaccatattttttcctcccatttgagttcgaatactgtatagcgttcgccttttttctgtaaatataccttgccgtcgccgtccacggtcatgatgagaatctgtttttcatttttgcagccgtgttcttttaaaacgtcgagaaaataggatttgctttttttggtaagtccgatgtttttttcgtcgaatttgccttcgtctatcaaaatgacgggcaacgaactctgcatatccgcgtattccgctttgggcagcgcggaaaaggacccgtttgcctcatacagggcgtaatccacggcgtccagcgaaaagtagcccgctccccgcagactttccacgaggtcggatacgtcgagattgttctttttcagctgcgtatcgtctatgccgttcttgttgagaacgatgctgggcgaaccgctcaaaagtgccttcatcggttttgcgccgaggtcgagaaggcatacgatctgatgcagaaaatagatggtcagaatggcgacgatcccatagagcaaaggaatggaagtgtccgccatgggaatgcacgcaagctctgcgatgagaagggtgattaccaactcaaaaggctgcatttccccgatctgccgtttgcccatcagacgcatgatgataagtaaagtgatgaaaacgatgattgttctgatgaaaattaaacccatacagagagtatctcctaaaattttgcaatttatgtatttttccttcgtcaaacgcttgcaaaatcgacggcgaaggattataataaggagcaaagatcaagagtagcctccggcgcgtaaagtgtcatcgaacgggacgttgtcgatgaacgaaagaaaagcaaatttatttcggcttttctgcggtgccgtggcgcgtccgctaaaccaaagggaactcattttcacgtatccggagcgagaaaacgccttcccgcactttttgcggacctctctttcatttgggaggtttttattttatgcaaaacacacaaaacacgttgctcaaaagaacttttttttcggatttgattctttcgaagacgattgcgcaaagaatcgcttacatcgccgtaatgacggctttttccgtggtcacgaatatgtttttggaatttcggatgttcgacattcaattttccatcaccatcgtcgtttccgccctttcggggatactgctcggtccgctttgcggttttgccgcctgctggatcggcgatctcgtaggatatttatataattcctgggggcttttgtatatgccctgggtagggctttccacgggcgtgatcgctttgctctcgggcctgatcttcaacggcatccattttaaattccgcggctcggtttacgtaaagttgttttttgtctgtctgatttccttttttgtctgcaccgtcggcatcaacagcaccggcttctatctctataataaaacaatgggattttcgacgaaagtcatcgaattcgtggataaaaaattcggcacgggagtcacctattggggatatgtcatctatcgactgttcggcggacagatatggaactgcctgctcaattacgctctgttgtttgccgtcgttcctttgctgaactccatcaaacctttgaggctcgatattcgttaaaaaacgcgggaatttatagaatttttaaattgtaacaacttccggaaacttaaaaaaatcgtcgggcaagccttgacgatttttttttgatgtggtataatgaaagaaatcggttcgaacaaaaaggagatggctttatgctcaatgctcttttgcaataccaacaacccggcatcaggatcgggacgttcacgatttacgcctatgcgatcatcatcgtctgcggcatgatcgcggcgtttttcctcatttccctgttattccgccgcagaaatatgtccaaggatctgttcctgacttatttttgcgtcacgctgcccatagcgctctttaccacccgcctcttttactgcatcacggacagagtgcctttcgagtattggttctcctttaccgacgaagtgaacggtatccgcggcggcggtctttccatcatcggggggattttgggcggaacgctcggcgtcgttttggtcagctattttaaaaaagctaactttttccgcgcggcggactgtatcgtcgtcgggcttttgctcgctcagacgataggcagatggggcaattttgccaatcaggaagtatacggggcgaaagtcaccaacgaggcgctgcaattttttccgtttgcggtctatatcaataaaacggacggcgggaactgtttgcagagcatcacgctgacttttcaaaaaatgttcggcatggaaagcagcattacggggggcacctggcattatgctttcttcttttacgaaagcatcctcaacctgatcgcggcgcttttgatgttccttcgcgcctggaaaaatcccaaaaaacccaacggcatcaatgtggcgtggtattttatccattacggactcgtgcggtccatcatggaaccgctgcgcgatccttcctatattttaaacggcgggtcggacggcagcggcattcaatggtcgttcgtgttttcgcttttgatgctgataggcggcgcggtgcttctctttctgctcctttggtttaacaggaaaaaggagggaacgtatatcggttcggtaaacggcgatccttacggtattaccgcgtatgtcaaggacaataaaaaggaaatcgcttatttggataagataaatatgatgtgcaagatttttcccgaaaactatgtcaagcccgctcccgaatccgagagagagggcggcgggaaaactcccgacgacgcgaaaaacgaaaaagacgcgccgatttcggaatcttcgggcggcgcggacgagggggcggaaggtaagccgcagggagaggataagtccgactcggaagcagaaaccgcggacaaaaatcaagacgacggaaaggaggattcgagaaaatgagaaatttgacgcttcttaccgatttgtacgaaattacgatggcatacggcttttataaacatcgtaagcacgaagaggaagccgtattcgacatttttttccgtcagaataaactaatcacctattctttggcggcgggcctgcaacaagccatggattatcttctccactggcgtttttccgaggacgacatggcatacctgcgctcgctgaatctttttgaagaggactttttgagctatctcgaaaagatgcgatttacgggggacgtgtatgcggtgaaggagggagagcctgtttttcccggcgagccgattctgacgatcaaagcgcctctcattcaggcgcagtttgcggaaaccgcactcctcaatatcatcaatcatcagacgctgatcgccaccaaggcttctaaaatttgccgcgaagcgggcaaaggggcggtaatggagttcggattaaggcgcgcgcagggtcccgacgcgggtatttacggcgcgcgggcggcagtcatcggcggctgttcctcgacctccaacgtcatcgcgggacagatgttcgacattcccgtcgcgggaacgatggcgcacagttgggtaatggatttcgacagcgaatacgaagcttttaaggcgtacgcggattcctatcccgataactgtctgctgctcgtggacacttacgacactcttcgcagcggcgttcccaacgccatcaaagtgtttaaggaattgaaagcggcgggacataaacccaagggcatccgcctcgacagcggcgactttgcctatctttccaaaaaagcccgcaaaatgctcgacgaggcgggtttccccgaagctatcatctgcgcgtcgggcgatctcgacgaatattctatgtcctctctgcgccaacagggggcgaaaatcgatctgtggggcgtgggtacgaaactcatcacgtccgaagaaatgcccgcgctcggcggcgtctataagcttgctgcggtcataaaggaggacggaaaggtcgttccgaagataaagctttcggacaacgcggcgaaaatcaccaatccctcttttaaaaacctctatcgactgtacgataaagcggacggaatggcgattgccgacctcatcaccatgcgggaagaaaccatcgacgagagcaagcccttgacgatttttcaccccttagaaacctggaagcggatcacggtaaaaaatttccgcgcggaacctttgctccacaccatcgtggagaagggaaaactcgtttacgaatttccccggctgatggagatacaggcgttttcgaagagagagcttgccaaattctgggaagaatacctgcgcctcgatatgccggaactctataaagtggacctttcggaaagactgcacgccttaaagagcaaaatgctcgacgaaatacgcggcgggcaaagtccggacggagcgcgcggctgatgtccaggctgtatacgcagcggcggcacgaacaggcgctcggagaattgaaggcggaatacgacggacgtttgaaggagcttcaagcggcgctcgccgagttaaaggaagaaaaccgcagcttgtccgcggagatttccctgctgaccgcgcagaaacagtccatttcggacgcgatgatcgccgcgggggaaaagcgggaagaaatgcaggcgcagctcgccgtattcattgaatcggaaaaggcgatcgcggtgcaggcggcggaaaaggcgcaggctcttttggaggacgtgcgcgcggcttatcccgacgaagcggcgtccaggagattttcagattttgaaaggcgtttgaaaacgcttctctctccgccctcgcagggagaatcggaggaagacgaagcggaaaattcgctttccgaagaggagttctttccccgtgaactacatagctgccttgcgttttcagcgtcggaaacgtcggaaaaagcgggcgaggagtgggaattgaaagaagtgctggaaacgctgggactttgcgacgattgaaagaacggggatatttttaaaggaatcgtaagatgccgcaaggagaatctctatcaaaaaataggcgcggacgtttgcggggattgtatttcgcagcctcacgaaggtctgcttcggccccacagcgggcacaaataaggatatatccatgatggaagaaaacaagacgacacaaaaaggggaaagggcgaaaagcctgaaaggttcgtgcctttggggaattttgctctttgccgttctcattttcatagaccagctcaccaaagcgctggcagccgcctatctcgatccgacggattccattcccatcgtcaagggatggctggaaatccggatcgtgtataaccgcggcatttcctacggtttgggcgacgacgcgaagccgtgggtaaagatcgcggttatcgccgctacggcgatcatgatggcagccctcgccattctgtattttaaagtgaataaaaaccgtagactcgtgcgtacggcgctcgcgtttatcgtcgcgggaggagtgggaaatctcatcgaccgggtatattataaggtctgggaaccgggcgggcttttgggggtgcgcgatatggtggacgtcagtcgtttcggattcgcggtctgtaattttgcggactttttcatcacggcgggtgccgtcatgatcgtcctttccttcctctttttcgataaggacgcgcttcttcccgtcggaaaatacagagaacagcatctaaaagaaaaggaaaaggcgcaagccgccgtatccgaggaaaaataggagatggacaatcgcttttttgtggcggaggaaaactgtaaacggctggacgtttttttgagcgaacagatggaggacttcacccgctcccatataaaaaagctgatcgacgggggcagggttgcggtgaacggcagttttgccaaggcgggcgccgatatcaaaacgggtgacgagatttccgtcgagattcccgacgccgcggaatattccgtcaaacccgagaatattcccatcgagatcgtctatcaggacaaagattttgccgtcgtcaacaagccgcagggcatgacggtgcatatcggcaacggaaatacgcaagggacgctggtcaacgcgctgttgtacgcattggacagtcttagcgggatcggcggggtattgcgtcccggcatcgtgcatagaatagacaaggacacgtcggggcttttggtcgtcgcgaaaaacgatcgcgcacacgcttctttggcaaagcagatcgcggagaaatcctgtcacagaatctatttcgctttgctcgaaggcagcgtcaaagcggattcggggcgcatcgttacggagataggccgcagtccgtccgatcgcctgaaaatggcggttctgcccgaaggcaaggggaaaacggcaatcaccgattacgaagtcgaggcgaggtacggcggggagtataccctctgccgatttactctgcaaacggggcgcacgcaccagataagagtccacgccaaatacatgggcaatcccgtcgtaggcgatcctctctatgggattcgccggcagaaattcaagttgaacggtcagctcctgcacgcttataaactgatattgacgcatccttcgacgggagagcgcatggagttcaccgccccgcttcccggatattttcaggaaattttgcataaactcggcagacagtacgacgcggggataaagatggaggaaaggagatagacggatgaaagaaattctcgacgccgcgggattggaacgcgccttgaaacgcctttcgcacgagattgcggaaaaaaacgacggtctggacggagtcgcgttgataggcatccgcacgcgcggcgtgatcgtggcggagcgcatccgccgctatatcgaggaggcggagggcgtttctttgcctttgggaatcctcgacatcacgctgtatcgggacgatattttgagctgcgatgcggtggtaaagggcacggagatcgatttcgacatcacgggcaagaccatcgttctctgcgacgacgtgctgtatacggggcgcacggtccgcgcggcgatttccgcgctcgtttcattgagcggcaagatggggcgggcaaagaagatacagcttctcgaagtagtggacaggggacaccgtgaacttcccttccgcgccgatttcataggtaaaaatattccgaccgctctgacggaaaaagttttcgtgcgctttcgggaaacggacggggaagacggcgtatatctcgcggacggcgaaagggaataaattaagcttgtaactcttttcctcgcggaaaagggaacgcataaaaatcttttaaggaggttatacatacaatggcgacaaagaaaacaacgacgacaacgaccgcgaaaaggacttcgggcaaaagttggttgattcgggcgtgcagctattttgcgctcgtgatagcggcttttctcttcttattgggcggcattctcaacaacagcattacgaatgtgctcaacctgatcggtcaattgcttatggttgtaggcatcggctttcccgcgtacgactatacgcgcggcaagcataaggcttggaaaatcgtttattgggtggcgctcgcggtttatatcttcggctgtatcttcggcgttatccgtggattaaagtaaaagccgtaaaagataaagagcgggattctttcgggaatgccgctttttttctttacaaaacgtgtaaaaaacggtataatgatttcgtatatttaaatcgtccgcgctttgtgtgcgcggcgcaaggagaaagagcagatatggcaaatcctttgattgcgctcgtggggcgtcccaatgtgggaaagagcacgtttttcaataaagtggcggggcggaaaatttccattacggaagatcgtcccggcgttacgcgggacaggctctatgcggacggggaatggcggggcaagcatttcaccatggtggacacgggcggcatcgagttgaagtcggacgacatcatgtggaaggagattgccaaacaggcggatgtcgccatcgatacggcagacgtcattctattcttcaccgacggcagggaggggctgactccttccgattacgacgtcgcggatctccttcggcgcagtaaaaagcccgtgattttggtagtcaataaaatagacgactattctcccgataagattttcgagttttactcgctgggactgggggagccttatgcggtttccgcggaacattcccaaggcatcggggacgttctggacgaggcggtgagccttttccccgagaacgattcggaggtggttccctctttgaaaattgcggtcgtcggcaagccgaatgcgggaaaatcgagccttgtcaataagcttttgggcgcggagcgcagcatcgtcacgccgatcgcgggcaccacccgcgacgccatcgatacgctgttggaacgcggcggcaaaatgtatacgcttatcgatacggcggggatccgcaagaaaaagaacgtggacgacgacgtggaatattacagcaatatgcgcgcgttcgacgcggtgcgccgcagcgacgtgtgtctgctggtcgtagacagcgtcgaagggcttaccgaacaggacgtgaagatcatcggttacgtgcacgaacaagggaagccctccgttattctcatgaataagtgggatctcgtcgagaaggatgcgtacaccgtcaataaattcgaggagaaactcaaacaggatctgaaatttatggattactacaaatccatttatatttcggcaaagacagggcagcgggtggacaaaattttcgcggctgcggaagaggcatatgcgcacgcgtctttccgtatccctacgggcgcgttgaacgatctgatcggagatgccgtcaggctcaacgaaccgccttcctatctcggtcgccgcatgaaagtatatttttcctcgcaggtcggcgtgtgtcctcccgtgttcgtcctctttgtcaacgacgaggggctgatgcatttctcttacgaaaggtatctggaaaataccattcgtgccgcttatgatttttcgggaactccgattaagatcttcgctcgggaaaaaaagaacgacgattgatttttaatccctgcccattatgtccttttaatggggggataaagaaaaggaaaggggcaggtaagcgcttacggaaaaatctgcgcctttgaaaaaggatagacgaggagaaataatgaaagaattggcgctttctcaacactggtatcagtttgttctgatgggagtggtctgttacatcatcggctgtttcaatttcgccaaactgatcgcgcgtttcaagcataaggacattacgaaaatcggcagcgggaatccgggtaccatgaatatgagccgggaattcggtctgaaagtggggatcatcacctttttctgcgacgcattcaagggggggattcctgcgctcatcagctattttgtatatcgcggctatgtattcgcgggcagcgatgtcatcgtcgcggacttcacccgttatttttgcggcgtgtgcgtcattatcgggcatatttaccccgtcacgatgaagttcaggggcggaaaggggatcgcttctacgttgggactattttggataaatctcggctgcgagaatccgtggtttcttctcgtcggatttgcggcgttttggttgatcgctttttacatcgtgggaacggaatggggatcgatgggatcgctgatcggggtttcgggtttcggagtttggcaggcgattctcttttggtttcgctatcgggtggaaccgtcgaatatatacgtcgttcttttgtttttgctgatttttctcatcgactttttgacgtggtttgcgcatagaaaaaatatcatgcgccttctggccggggaggaacaccgcacttccgtcaagaaaatggtgtctaagaagaaaaaagcctgaaaagcagtttactttttcagaaaaaacgtgtataatagaagtacggaatcgagagagtctgtcggtttcgatacgggggtgcaccggattcgattgccggtgagcgaaaagataagcatactgcggacggagtgcccgcatcaacaacattccgctaaatttaaatgcagataacaatgcaaattacgctcttgcagcgtaaactcgttattttataacgatcgtcgcgcccggtttatccgtcggtcgggggtgcggcgtcaaacagacggaaaaatcttatccgaatcgggaagtgttcggagagattatttagcttcctgcgatgcgcaaagcgtgtttacccgcgttgcagcgtttaagaaaaaaagataaactaagtatgtagaaagttttttggcagccgagtaagacgtgagttcgactctcaccacctccaccatattaggaagacaaaaaagattttttgtcgtgaaaccccgctgccagcggggtttcagccttctcaaggggctggaaattcatgttgattttcgtagatataaaataggcattttcccttactgatgtgactcgaactcacacacaactaaacaaccgcaaaatttatacgcatagagcagaaacactctatgcgttttttgttattcaaaacccgacaggaggaagaatataggatgagaaaagaaaccgatttagaggaagtaaaaaggatcgcctctttgtttttatggctgcccccgcacgaaactgaattttcacccgtgattgtaaaacacccgttcacggattgcgggatcgtcatttttcataactcccagcaagaaactgaaacggcaaacatcttagaaagtgagtcggcgcttaactgttggcgggaagaaatgggaaagtggatcaagcaagccgagtctgtccaagagatctatccgttggtgaccaagtcgtacacctttgcctttttgaaagatactgcggaatacttatcccaaaaagacctatccgaaatcctttccatagcgtgggtaagtacggagtgtccgaacctggatcaaaacttcaaccaacgccaaaagctggcgttatttaaggcggcggatccgatatatctgatggacgcaagcgagcgagagaagttagagagtttagaagaagaggtaacgatctatcgcggggtgacgtcgtacaccgcgaaaaatatccgggcgttgtcgtggacgctggattatgaaacggcggactggtttgcgcatagatacggaagaaatgcaagagcggaagcaagaattataaactatacaaaacaacaaatcaaaccggcatcgcaaaacgcggtgccggtttcgttgggagaaaacagcatgaatagagcaagcaaacgacagaacaagaaaagcgcggcgtcggtgcaggcgcttatcgggatcaaggcgttcacggactacgggcttttgacgaacagcggggagctgttgttttatctcgttacgccgacgaatttgtcggtattgtcgtcgtcgagcatcgagagcaagatccaccgactgacgctggcgctgtccgcagtcccggaactggagatcgcgtgcacggactcggcggaatgtttcgaaaacaacaaggcgtatctttcggagcgtatgaacgcggaagcaaacgggaaggtaaaaagcctgttaaaacaggacataggctttttagacgagattcagttagagctatctacggcgcggcagttcctgttcgtgttccgctgcctgggcctgaacccgtctcaggtattcgcccaggcgaataatatccaaaaaatactctcggaacagggctttgacggcaggcgcatgaaaaaggaagagatcaagcgtctgatcgcgttatatttcgacgcgtcgctgttcggggaacagatcccggacgtggatggagaacaatattttgatataaatatgaactcaaagaatatatgaagcgtcaggagcgtagagaaaaaacaatcgaaataatataaggtggagcttttgtgccgaaggctaacaaaaaagcgtaaaagttctcgttgtcttcttcgtataagtattagtgcttataatcctataaatgtttccaaaaatatcaaaaacgttattgaaatataaaagtagctatgctataatatagaaaagataccttagaatagcaataggggaggaaaaaatggaacgagctttatggaaaaatagagagtattatgccagtgacgttgttgagaaatttgaaatagaagaagcgatcagaaaggcgagcaataaagaattattctgtaccgatccggattgtgaaaaccctcttttgcgttattgtcacggcgagaagaaaagagcctattttgctcatataacgaattcgaattgcgactatgcggattttgagcgaaaaaatcaattcattcaaaaaatacgatacaaactgtttgatttatttagaagtaaaggatatgatatacggatggagcccaagcttttaccaaagcattacagcggttggggcggcttggaagaagatcttcgagaagtgaaagaggcattgaactatttagaaaccaggccctcgctcgaagaactgttggaagaggaggaagacctgacggaagataccgcttcttccgccgagccgacgttgaaacaataaagacgggaaaaggagaaagagaatgaaaacacagtttcaaagaaaacaggaaaatctaagtgcggaggcgttctcgattgaaaccgtgatcgaacttccctatgccgaatacgagtcgttcagcaaaaatctattgcaggattatgaatttttagaaccccacaagaatgaatcttaccgggaacatggtcttgccaaatgcctgttggtgcttgggcagggtcacgaggacgggattttggtactcacggaaggctattcctacgcgcgttacagcgcgccgctgcccagcgcgagggggatattgacacaaacccgatatcctttgcttttcaaacaaatcacagcgttgcagccgctcgtggaaaaatgcgtccgcgacgctatagaattccaaatagacggggaatacgaaatcgcttgcgacgaagtctatgatacggataataggggcgaggacgagaaattaaagcacctgctgtttgaacagctgatttccgaacgcccggagatagaagaggtacacacggattatatgaattattatttcactatcgcacaggcgtaacggactaaggaagcagactcgcttttgaagcaaccgacagacaaagaaatcgaactcatgtacgcgaaacatcttctttggctgcaagaagccggcggggaacaggcggacttttcaaactgtctgctgcgggaattggatctgtcgcatcgaaattgggaaaacacggttttcgaaaacgcgaaactcgtgggggtgaacttacaggaaacggatctgagttattcggtatgtaacggcgcgatgttttatcattgcgacggaaccgggcttcgggcagaagccagcgaaatgaaaggcgccaagttttatagctgtgagctgagcagcgctcttttcctgcacagcaatctcactaaagcaaatttcactcattgttctgccgtggacgtaatctttcgcagctgctgtatagaaggaatggtcttaggtcatatcgaacaggaacaaatttaccaggcaaactgcagcgaggatgaggaagattggcttgcagtggagcagggcgtaggtcaggaagtaaaaataaactaacgaacagaaaaaaggagggtaaaagacgatgaaaaagacaacactcacaatttcttttgacgaggaaaagctctcggcaatgaaaatgtacctggagcaaaaacaacagacggtagaaggggaacttgaaaaatccctggatgcgttatacgcgaaaacagtccccgcagacgtgcgggaatttttagatttgcgcgcggggatagccgtgcctatgcagctaaagccgcgaaaatcgaaacagtctcccctttctgttgtgggcgacgcgatgccggagaaaaaagagaatgaacgatgaaaaaattcaaggatatatgaatccgcgtaaactcgacgcgatcaaaatcgcattgcatcgtaaaggacagactttggaaacggcgctggatagagccttagaaaagttttacaaggaaatcgtgccaagaaaagaccgcgaggaaatagaagcccggattttggctgaggaggcttcggaacagacagagaatgaagccgaacggttttgcgtgatccacttccacgacaaggacgacgacttttattttaccgcttcgggcagtgagaacttctacacggccgcaagcgtttataaagagtcgcttaaagaggacgtcgaaaaatataccctggacagtttagccaccaattttatataccggggaaacttcgacaaactgacgtatgcggtgttatgtaaggcgcagccaaacgacgaacggatcgcgcgggtcatagaatttgattttgaaaacgaaggattttctataaaggaaaacaccgatccggcttggcgatgttatcgtctgacggatctggaaacggcggcagaaaccgcggaggaagtcccggggatcagcgacgctacgcggcagaacatttttgaaaaagctttggcagggaaagaactgtcatgttcaagtaccgctgaaccggtgaacgcggaggaagactctacgctaaaaataggagggatatgagggcgcgaacagaacgataataaactccctttcctgttcttgaactcagtcgtagatttaccgaacgcgtaaaaagtgaataaaaaatcgaatttaaccctaaaatgtatttaaccccgtttgacaaatagggctaaaattgatgtaataggggtaaagtaaacaggaggcgggtatatgacagaacaagagatgcttgctaaaatctaagaaatcgagaaagaaggtcaagatcacacgcatcaaatgtaaacgaaacaaatcaaataaacaccgaaaggtcgcgttgcaataagcaatgcggcctttttctattggagactaacatggaaaaaataaggcagtatttaggaatacaacgccagaacagacaattgtgcgaggaacaggcaacagacgttgtgaccaaggcaaccagtccggaaggaagagcaacggcagaaaaagaagagtcgcttgaaacaatcctgaaccgccatccgtcgcttacaaagtacgtaagggagctgtcgtgcttagcggagaagtttgcccaaaaggcggtagaaatgcaatgggagggcaagagccgaatccgggctgaaactatagaaatcgcatgccatcgggaagtttttgacaagaaagggtttcaggaattgatgctcgaacggccggagatagagaaaatagactgcatagacgaggacgcaaatgattactattacgagataaagatatcggaagcgtatgttcatcgaaacgaggcgccgctgaaaaaactcaacaagtcggaaatcgaagagatgtgtgtgaagcatctgctgtggttactcgaagccggcggggaacaggctgatttttcgaacagtctgctgcaggaccagtcgctgtgcggcaaaaatctgatgaatgcgatattcgacggagcgaagcttgtgaatgtaaatatgcataacgcggaattatgtttttcgacgtttacggaaacggggttttacgactgtgatctgacggaagcggtagcggaagaatgcgaatgcagaggcgcaggattttacaatacggatttagaaggaacaatattcacgcacagcaatctgacgaacgcgcgattcatagactgttcggggtcgggaggaagcctgcaaaactgttgcgtggagaatgtggaatttgatagtctgaatctgaaatttgtggatcagagcaatacgtacaaaagcgaagcggaatggcaggcggaatatagcggtcggggaatcgagctgtgaacggctgtttcgttctgtgtcgaggctttcgagataaggtcgggtaagggaaccgacgcacaccgaaacggtcatcaaaggcgacaaaaaagatatcgtcccgaatagccttgatttttcaaggctgtttcgctttttaagggcgaaatttttatgttcgattttgtagatgaacaatgggtattttccgatactgaatagacttgaactcccgtgagaacaaaaacgccccaaacacacagcacagagaaagaaaagctctgtactttttttatgcccaaaataaggagatacaatgaaacctacaacggatatagagcaagtgaaatcggtggctcgtgccctgttgatgacggaggtaaataagacaccttactcccccgatagtggtacagcacccattcacctcgtccggctttgtggcaacaacgaaggacggagtgatgcagcttttagacataaccgagagcgaagaaaatctgcaggcgtggcaagtctttatgcgaaagcaaataaatatcaccgataacgcctacgagatttatatgatgacgaacaagccctacagcttgaccttcctaaaatacgcctctccatatttatgaaaagcagatttttcaaaaatccttgccgatgcgtgaatcagatcggaaaacccgaattgcgataccaacgtaagcaaaagcaaattaatatcaatgttcaagcaagccgatcccaacgagcttatggaatacggcaatatttaggcatacagtactccatgtcggaagaacgtaaaaccgaattgctccgcaatttcgtgggatggtttctcgaccatcaaacgagcgacgagggcttattccgtgaccttcacgtggaaattggtatgacaaaaaaggaactgcacgattacggcattgatatcgacaagcagtttgaacaggcagaaaaagaacacgaaaaagaggtcgacgaagccaccgatatgattaccgcagaggacatcgtggaacaagcggtatatgcggcgaacgcccccgaatgctgtgcagataagcacgccgagtatatactctccatgctcggcgcaaacatcgtggacgaggatatgtaccacgacgaggatgaatgcccgaatataaggcaagccgtcatcgaaagcgtaaaaacggaatatgacttatacgaaggagagcttatgaaaggaacgcccgaaacggtatacgcgcatagtcacgaaacgaccgtcaaatcctatttacgggatacgatctgcgaggactgcgagcttgacggcgaggcctaccgagctttgtatgaggacaagggcaatatccttcgggatctgcatgaggattatataagtgagccggaggcaagtatggcaacgcttgacgaccgagtggaatttattgaggattactgccacagataccacgcagagattatgctcggcaataccgaaagcacgcagactatgaattgaatacccctgtccgcatatcgctttggcaagcaaaaaacgctatctgaagtaaaaataaccccataaaatgctgtaacccaatttttgaaacagggttattctgccgctgaaaagttcttcaaagccggaaaacaacgaaaatttacacttttaacccataaaatcttgtaaccctgcttgacataaaggttaaaataggttaaaataggttataataggttatggtaggttaaaacaaacgggaggcgtatggatatggatagtatttacgaattagaaaacgagatcgctttgttgcccaagggttatatctccaataaaaagattggcggcaaggtacggcattatctgcaatggtcggaaaacggaaaaaccaaaagtcagtatattccggacgacgaatacgaagcaataaaggaagggatagccaaacggaaagagcttgaaaagagattaaaggctcttaagagagaggctttgatctatccgaagaaacaagcgaactatgaaatgaacgtcgttgtcgggcaagagctgaaaagaatggttgcctatgcaaagcaatgggataagagagattgctattcttctctgctgcgttatttatataaggacgaaacaccgagagtatgctcgatatacggtttgagaagaacgggcaaaaccacgatgctgtatcaggcgataggcgagatgagcgacgagcatttcaggcaagcggcatatatcaaagctcgaaaaggacagtccatgtctatgcttgacagggatttaaacaagctaatgcaaaacgggtataactatatattcatcgacgaagtaacctttttagaggatttcgtagatacggcatccgtcctgtccgacatttatgctgctatgggaataagaatcgtattatcgggaacggactccctgggtttttggcttgcaatgcacgaggagctgtatgacaggacgtatatgatacacaccacgtggatttcgtatggcgaacacgcaaggctgttggggatagacgatatagacgaatatatccgatacggcggtacgcttcgtgtaggcgaaacggatttcgagaatgaggaattaaaaagtgaggaggtctcattcagagatgacgagtccacgagaaggtatatcgacacggcgatctgcggaaacattcagcacagcctaaaatgctaccaaagcggtaggcatttcaggcatttggaggatctctacgataaaaacgaactgacgaatgccatcaatcgagtcatagaggacattaaccataggtttgtattaagtgtattggaggaagatttttcctcgaacgatctatcgcttgcaaagagaaatcttacacaaagcaaaaatgcgcggcagcacggatatattttagacgatatagacgtacaagcggtaaccgaacgcttgatggggatcttaaatatacgcaacagatcaagcctaaccgttgagattaccgaagcgcacgcctatgagattgaggaatatctgaaagcattggagcttatcgaatactgccccgttaagacgatggctccgggcaagccggaggatgacaagcaaaacattttgtttctccaacccggtatgagatactgccaagcgcaagctctggtgtattcattgggaaaggacgaaatcttctcaagccttgatgaatcggggcgca

SEQ ID NO: 311 - DNA, 9978 bp, Unknown
  16S sequences of unknown bacteria
tgaccgccgagataatctatatcgtatatcagaaaaagggaaaacggcaatcatctatcggcaaaatggttttgccgtctctgtttgtctgctatatgactgggcttttatgtctcaccctttttcaatccatcatcagcgatatctattattatcttttttaccaccggccaagcggaaacgaactatattggttcacttttgaatatgattttattccagatttttactaccattttaacagcgaaaatatcgcaaatattttcctgttctttccttttggaattctttatccaatctttcgcagaagcagtacagggaaacaaaccatcgctgccggaatagctgtttcgattttgattgaattgctgcaaccgatttttggacgtagttttgatgcaaatgatatcattttaaatggattgggtgtcgccgtgtccactgcattcttttgtcttttccaggcagtttggaaacagaaacggtgatttccattgtcttcctttcaccgagcaaagcattttgggccacacacctttctatgcaccaacagcccacctattcttttgcagcagccgactctttttcttccggcgccatcagggaatctttcatcaaatggctcaattttttgtagaccataaaggtcaaagcggaaataatcagccctttgatcaggttaaacggcattgcgccgaacaggatatacccgtcaatgctgtcaatcatagggttcaccgcattacaggcagaaacgattgcgtcgatgggcatgagcttggaataaaagggaatgattaagaatcgattggtcaaagcacctacaacggtgacagccgccgtcccgctcagacatgccaaaagcgcaccttttttgctcttatgataccgatacaaaaatccggcgcttagagaaaacgcggtataaatcaaaaagtcggacaattcgcctacgccgccggtctgactggacaacaaatggatcagatcttttaccagagagataaaaatacctgccgcagggccgaacataaaggtaccaatcaaagtcggcacgccgctgatatccagtttcaagaaaggcggcataaacaaaaacgtcagcggcagttccagatacatcagcgcagtggcaacggctgccagcaggccgatatagaccagttttttggtgttcattctttttttcatgaaaaaagctcccttcattttgtctgttttggcaaacaaaaacgcccccaaccaaagctggggacgcaaaaggtgcaaatatcaaatttgcgccgtttctttcatccggactataccgtcggttccggaatcgcaccggatcaactgctttcacaggtcgcggactcgtggcttggcacccatcaccgccggtggggaatctaaccccgccccgaaacagactttatatttcgttgcatatcatacacgcaaataaggtatttgtcaatcccttcacaaaaattttcttcggttgaacacgtcctttatctatcctgatttgtccattttattccgtgacccctttacagggcttacaggaggtaaaaaaccattcaattggcagcggctctttttgaaagtagcccagcttgtccaaacgatccctcatttgaccttccagcgcggaaaagtccgcctcagcagcaccagataaagaaccatggttcaaagttgcccgcaccagaccatccagcaaaaacggatcgtcacagcaaaccgccaacattctcatggactgttccagacgaaacaggcagtatcctgccaaatctccccgctctgaaatgccaaacgccccacatccctcctggaagggaacattttccttttcaaacagctctaaaattagatttttattttgaaccggtttcatttccagcatgcttactttcttcctttcccgtccaagtcccgacctcgctgcattgccgactgcaatgcggacaattccggttgtgtcagcatccgccattttcccggcggtagcatacccagacgcaccggaccgatggaaatccttttcagtcgtgccacttccaacccaaccgcttcacacatgcgccgaatttggcgattgcgcccttcggtaatcacaatctgtacgactacgcgccccggctctttggaaagcactgtcacttgggcgggagcggtgcgctgaccgtccagttccaccccttccgccagccgcatcgcctgttcatcgctgatatcgggccgcaccgttacccggtagcatttgggaatgtgatagcgggggtgcatgatctggttggcaaaatccccgtcgttggtcagcagcaaaaggccttctgaattgcggtccaagcgcccgatgggataaacccgtccgggtgcgtcttgaaccaactgcgccacgcaacgacggtccatctcatcgctcattgtcgttacatagccccggggcttatgcagcgccaaataaatctttttctgatgctgtcgagtgtccacccgtaccccttccacagcaatgatatcccgaacaggatctattttctggccgattacggcttttcggccgttcaccgttacctttcctttttcgatgtaatcttccgcttttcgccgggacataactcctgattcggaaagtattttctgaattctcaccggttcgtttttcttctgcatgatctgctccattccgcctcacggcgttctttttgaaaagaaagcctctgttttactggccaaaccagctcttcacctgattccaaaagctttccttttccgctattttttcttccactgcacgtttgggatacaaatcccagctatccagtctttgctcacccaaataaaactgcacttctccaattttttgctccggcaggatcggggcatagtaaaacggttcgatataaacttgcgccgtgattttcctttcttctccctgcaataccgctgtaaccgtgtcgccggataactgtgcgcccaccgaatccaaaacacctccgaccaccgggagagaaatttcgggaaggtaatcggccaagtctatctgctgcacacaggaaaaaccatagtcaaacaattttttatgcacattccagtcgtctccagccgataaggtaacgcaaatcagtgtaatgccatctcgctttactgccgacaccaggcatctccccgcttttttggtgaatcctgtttttacgccaatgcagccatcgtattcttccaacaaacgattatggtttttcagccaacggtcatagggtggattgccgaaagcaatctgtgtttttaccgtcgagcaaatctcaagaaaatcctcattggacaatgcgtttttcgccaaaaccgccatatcataagcgctggaatagtggtcatccgcatccaaaccggacggtgtggcaaaatgtgtgtcggcaagccccatttcagctgcccgctcgttcatcattgccacaaagccctctgtgctgcccccaactttcactgctgcagcgtccgcgctgtcgttcccggagtgcagcaacattccaactgcaagaccccgcagtgtcacttggtcaccgggcagcagccccatagaggaaccttccaccaaaattgctttggcatctactgtaaaataggtgtccaaatccggctgttctaatgtcagcagtgccgtcataattttggtcgtgctggccatcgccaacctttcatggatatcctgaccagccagtactcgcccggtctccatttccatcagaatataagcccctgctgaaatatcaaaaggggccggcaggtgatctgctgtatcctgaaattcttctgctggtaaagccgccgctttcagcggtgaaaaaaacagaagaaaaatcgaaaaaacagtgacagccagacacttcattttcatccccccgtacaatctatgccagggaggcctttcttatacaaaaaaggaaatttttctattgctcactcttttcctttttccctttggaaaaaatatcggcaaatttatcgatcaaatcaggaacaattcctactgcccggtctgccgtattatcataattctgcatttgaagtagccgtacatttccttcctgaatcaccaaaaaggctaacggctgaatagaaacacccgcaccagagccgccgccaaacagatccttcggcttgtccccgccaaaatcgctgccgccggagccatagccaaacgccacttttgacaccggtacgataatcgttccatctggggcagtgattggctctccgatgatggtattcacatcaaccaatccttttagcttttccaacgaacaattcagcaaaccctctaaatttccttgactcatatcttttactccttttctgtttgattcttccgtcccctattctggacagctattttactttttatcactcttactcttctttgcctgcaacggaaaaagaaccatctgcaaatcatttatttttcaaaactttccataaaaaacgaaagaaaaactggatgactgccatcaacagaaacaaaacccgcagtgtcaattcaaaagataccttgagccgatcctgctgcgataaataatccccctgaaccaagatacggccctttttcatccggacaaactggctgatagcggcataagcgccgtgaacccagccgttcatcctgccataagcgatggcggtttgggctgcatcctctctggaaacgatcagctgaaaatccagccggcgtacccacaaatgacagtacaaaagctttagtggctgctttgcagcctttagcagttccaatacctgctctactgtggctcttagcgtacgggactcttgatctgccggataagaatcccctttcttccttttctcgctctgctgcacaggagaaattttttttgctggacagacatttcctttgcctgttttttcgtctccagctatctgagaagactgttttttttcatccgagctttggttttccttctctgtcccctcctcgcgaacaagccctatttgggaggagggcgcgtttttttcttctttttgtttgttctcgcgctttttcttctttctgcgcctttcaggctccggcagaatctgataccgtacaactaaccatcgagcctgtaaaaaaatatctccgttgtcgtatcggaaaaacaaccgaacattggagaaaaggaaaagcagaatcagcgccagaaccacgcctaaaatgatccagcctgtcatgatatcacatcaatttccaaattaagattgggtttcttcgattcggacctgtccttccagttctgcctcttcctctccgctttgaggaaccaagggcagttctcctacggaagccagcccaaaactgcgcaaaaaatgaggcgttgttccataggaaacaggacgtccgggaaggtctagtcggcctttttcctccaacagtcctctttctaccagagtattgaccgtactagacgagtccacaccgcgaatctgctctacaaaggacttggttaccggctggttatacgctacaatggcaagcacctccatcgccgcctgagataaaggctgactttttttgatctccagtgctttttttaccggctcctgaaactcttcccgcgttgccatttgatattggtcatccagccgaagcacctgcagcgggctttccaattcgtcaaaataatcctttatgcggcgcatcatccagtgagccgccgcatcgtcacaatcaaacacctgtgccagcctggaaaccagaattggttctccactggcaaataatacggccactgccgctttttccgttttggtcagcctcattggtcctcctcctcgtcttgtgcagctgccggcatcggcgtccgattctgcccgaaaccgatctgtccgctttcatccaccacaatccgttttgattttaccagttccagcactgccaaaaaggtcgcaaccatttccgaacggtcctccgatcggacaaacaggcttttataatcaatgtttttctgccggtataatgtgtgcaaaatggttagaatccgtgactggacggatacaactcttcgttttacaatgcctgaaaacgcttctttgggcggcggcatttttcgtttgaccttccccagcaccaaaagataagcgcctaaaatttctgccggttcgtgttgatgccggtacagcatatccggttccagcaccgtagcagtgcggcaaaacagcttgtccccccgccatttttccgccaacatggatgctgcttcccgacaagcctggtattccaacagctgcccggtcaattcccgtttgagattttcaccttcgtcttcatacttgggcagtaacatagctgatttcatatataccaggcgcgacgccatctccaaaaaatcgctggcggcctccagatccgcaaaagggatctgctccatttgttccagatactgctccaacaaaaggtcaatggggatatcatataaattcagtttgtgcttggcaatcagatatagtagcaaatccaaagggccttcaaactgatcgagcttaaatgtgagtttttccatttcagccccctatcatctgtaacagcaaatccactggagccgttgcccaatttaatccactgaatagaagattccccataaaattgagtgggatctgcaaaaaaccaaggtataaaagcaaaatcagcgccacataaaaatatttttcgtatttgtgcatcttcatttgaaaagaaagcggcagaactgcatctaaaatctttgcgccatccagcggcggcaccggcagcagattaaaaactgccaaagtcaaattcgtccaaagaatcgtgtaaataatctgcccaaacatcagacccgccgtgctgttaatgttgccataaagcatatacactttgaaaatggccatgagaaccagagccagcaagatattggaaagcggacctgccaaagcggtcaacgccatatcgcgcttcggttttttaaaacggctcggattgatcggaaccggctttgcccagccaaatccaaacagcagcaacgcaagagttccaaataaatccagatgtgcaaacggatttagagtcagccttccctggtccttcgccgtatggtctcccaaccaattcgccgtcagcccatgggccagttcatgaacaggcaatgacgttaccactaccacagccattgtcagatatcggatcacggtttcagtgttcaatccagtctctccgtttcttttcacacatttctgtcttattatactaaaaactggtcgttaacacaaggtttcaccgtttttgtaaaaataaatcgtctctttttgcaaaacgtccaaatttattgaaaaaaaagcttgatttcattttcaaaatctgatagtatatcaatgttgactttttatgggcattaaaggaggtgcagacctatggcaaaatgcgacatctgcggaaaaggtgtcactttcggaattaaggtttcccattctcatagacgttctaacagaacttggaaaccgaatgtaaagcgtgtaaaggcaatcgttgacggatctcctcgccacatttatgcctgcacccgttgcttgcgttcgaataaagtgacccgcgcaatctaatctgtttggttactgaaaaggactgccaaaaggcagtccttttttgtttgcccttccatcgtcttcctgtttgttcacggtactttccatcatcgtcctatactcgacctagttattttaatgcagataaaaaacagaaaaaggagcactcttttttctgtttactttcataagtaaaaccttacagcgaattttgccgttatcataaccaaaatcgccgccagcaatttccatatgataattcataaatggaaccgacgaaaacggcctgcttgtcagccgggcaaaatttgattggttaaagattttgatattttcgataaattttgccatacataacgatcagcaccggaattcctcccagcgtgtaaaggaaaacgaaaactgccgctgctgcaactgacccaaaagagagaaatccaatgaaagccatacctacaccgaataaggtccacatccttccgtttgcccggttgtatcggcggacatcccggattttcgtcgcactgactgtactgcctgaccaaaaatgcatcggtatctttcggcacagcgcccaaattccgatgacaatgaaaatggccgcacaaagccaaacacagatagcaaacagcaggacgcctgtttcattttgcaacggctcacctccccagcagccaaatgacctctgattcatgccgttttggtcgggtcatcaaatcttgcagcgcctttgctggcggtttttcctcatacaacaccgcataagcctgctcgacaataggcatttccacccgtagtttccggctgagctcataagcagttttcgtacagggatagccttctaccgtacccactgcctggaccgcctcctcagcattttttccttgtccaatcaaaataccggctctccggttgcgagaatgcatactggtgcaggtcacgatcagatcaccgattccggaaagccctgcaaatgtttccgtcttcgctcccatggctacacccaaccgcgcaatctcggtgattccacgggtcattagcgcagctttcgcattatcccccagctgcaggccatcagcaattcccgccgccaaagcaatgacgtttttcaaagcgcctcccaattccacgccggtcacatcgtcgtttacatacagtcttaaagtcggattcatcagcagatcctggacttcttccgcagccgtccgctcccgcgaagcaactgtaatggtcgttggcgccccacggccgacctcctccgcatgggaagggcctgacattgccacaatcttctgctgtggcaattcttcttccagcacctgtgagagacgcttatagctgccatcctccagtccttttgctacgttgactacaatggtgtttgcacgcagataaggggctgcccgccgcgctgtctgacgtaccgcaaaggagggaaccgccataatgcacaattcacagtctgccagacaggagatgtcgctggtcagtaccattcgctctggcaccgacacgccgggcagaagttttttctgctctccgtcccgccggatttcttccagttcctgcggaaatagggaccacaatgtgacctgatggccacagctgtcagccatcaccgccagcgcagtgccaaaaccacagcccaataccgcaatcttcgccatctctattttttctcctcactacttgttttttttgctgccaaaccgattttctgttccgtttaacagtcttttgatgttcgcccgatgcatccagatgaccaacagggcaatgactgctgaaaaagaaaaatccagccaacttacgctgccctgaaaaaaatccaccaacagcgttaaaagcggatagcaaacggcgcctgccaaagaaccgatcgaaacaatctttgtccaaaagatcagtggcagtccgatgatcaaaagccccaggaacaccaatggattgattactgcaataatgccgatggaggtcaatatcccctttccgccgcggaacccgaaatatacaggatacagatgacccaaaatcgcaaataggccgcctacgtaggcgccatcaaagagtgtcacacccatggccgcaaaaatcaggcgaccgatgagcactgccgcaacacctttgagaaagtctcccgctagcgttaaagcagcagcttttttcccatatgtacgcaggatgttggtcatcccggcgtttccgctgccaaactggcgcacatcctgatgatacagccctttggaaaccaccacagcaaaactgacgctgcccaaaagatatgccgcagccgcagccagaataactgccaaaactgtctgcattacaactcgcctcccgaaaaaacaaactaaattgcttatttctctccccgttcccgtacaatctgtctct

SEQ ID NO: 312 - DNA, 5772 bp, Unknown
  16S sequences of unknown bacteria
cgtaaatggaagactgtattgaacgggcagagcatgaggaatttgccaagcggatcgacgcggaaaacacccgccagaaccggcgcattgaagcgttggagcagagtgttgaccggtttggccggattgcgtcctcggtggaacggctggccaccaacatggagggaatgctcaaggagcaggaacggcagggggaacggctggacaagctggaaggcaagcccggcgaaaactggaacgttacggtaaagagcatactggccgccatcggttctgccatcggcggggggctggttgtgaccattgctacgatgttgatcaaataaggaggaatacatatgaaccgtattaactggaaagtcagaattgcaaataaaaccttttggctgagcctgatcccggcaacccttttgctggtgcaggtggtagcgtcggtgtttggatttacacggagagctggggaacaagctgctggaagtggtcaacgccctgtttgcggcactggcgattctcggagtagttaccgacccgaccaccgcaggtgtggcagattcccaaagggctatgacctacaaggaaccctatcgggatggtgagtaaaatggatgtttggcttgccgaactggatttaaaatgctataatggcgttcaaggtggtgatggacaagatggaacaggaaattcttcagcagattttaagtaagctggcaacaatggaagcgaatcaaaaggcaacgaatgatcggctgaccgcaatggaagcgaatcaaaaggcaacgaatgatcggctgacaaaaatagaggatgatatagccgagttaaaagaatcttcgcagatcacgcgtcattccgtaaatctccttttgaattgggcggaaaaatccgaccgaattcagaatatcggtctttatgagaaagcagaataatgcctacaataatatggcacggccggcataaaactggctgtgcttttttgcatcaaaaaacagggagtgaaaaagatgagccagagattaatacttccgatggacaagtgcaatgtcaacgccggatataaaatggcggcatacgtgaaagagtgaggctttgctcattatggcattgactggggaacccggacaaacaacggaccatttacagcccgggggacggaacggtgatcgcctgcggcatggacggggcgacagcggcgcagcgcatgggaaacgccattgtgctggtgttcccggatgtggagcgaaacgacgggaacaccaccccgctggcctgccgcatgttccatctggattctatcgcggtgaaagccggacagacggtcaagcggggcgatgtgctgggagtatacggaaataccggggccaatacgagcggcccgcacctgcatgtagagtttgacacggatgtgcagtatccgcagtacgcggttggcatcaaggccagcgggaacattatcaaaaagggaaccaaggatactacggcagacccgtcaaaagtgtggtatgtgggccgggacaggcgctgcatgacggatggggcggcagcggcgtatcctccggctggatcgcacagaatgacctggatgtgccgaagctgccggaagaagcggcttcggcgggctacaaggccttgtatgaaacagaggttcagaaagtagaagccctgaaagccgagatgcgggagatcatcggaagaatgcagaacatagtaaaatagaaaaggcccgtcggatatggtatccggcgggctattttttgtgcgaaaaaataacacacttttaagcattagtaggctttttcggggcgcgacatcttaaaaaaagcatggggaaaccgcataaatacagcgcttacatgaacagcgaaaatattgacttactattttattgggttcgattcccacatgctcccgccaaaaaaaagccttgaggaaacgaatatcctcaggcttttttatttttaccgcgatgcggtgatacgatattatttcataatgccttttgagaacctctcccaagcggactcccattaccgttgccacaggcggcggggacgttcgatggccacggttgcttcatatttcttgccatccgcgtttgtcacttggtagagaaatgcaaacggctccccggcttccagcaatgcctcagcttctggcggcagatagccgagttctctcccggaccgggccatgacagcgaattgctgttcctgcggtttccactgaaaaaagaccttttcccattggctcgatatcgagaggttcttctgaatctgctcgccttccagacggcgcagacggaaaaaccggaatccgcttttgcgtggttcatgataaaagcagatctctaacgcagcagtcccttcctgcacagatgcgcgggccatcaccggcaaatcccggtccaaataggaattgaccagctctcgtatggggccgggcggcagaatgccgattctttctcctgcctgataaacagaaacggtatccggatcaaaggtattttccggttcctgatcgaacaggacttcttcaaacggatgcggaaaaatcggttttccttctaaaaccgcaggcagaaacgggataccttcataaaaataagacggtactttttcccccactgtcagtggaaatatcagatgctccgtcgttttgcggcgctgtccagcatgacggcccacgccggtttccactgcccagaccgcagctacggcgttttccagtgccgactgcccgggcttttgtgctgccggcaggggcgctttccccgcagcccgttccaagccgagcgtcaacgctttttcatactccgctgtgctggaacggaaaaaaggaacctgagggcgcatttcttccaaaatgcggattatttccaaagactgcttgatctgcggggtcagctgttccagcatctggcggtccggagcctgccgggtgcaggtgacggttttttgcacctgagccagcaaacctttgattttttcgcgaatttcatgatcacaatctttgcaaaacccataacggttgaccgtcagcatccatccgctttttttgcaccatttacattttgccataccagcctccagccagaatatttctgttctatcccggtatcactcggacagatacgccgccgtagggcatacccgcccaacgattgcagcacacggggttactccgacgagacgttctgccagccgacgggcgctggattcctcaggctgaccagcaggccgattgaggtctgagcatccggcaacagatcttgcaccagcaattgcactgcggggtcaaagaccacattgtcctgctgatattccagattggcatatgcgccgccaggaataatacccatgtttgcaaaatctctggcgtcggccaaaatctgctctgccacatccaagccaagacagttgggtacgcacaacagattcatggccactgcaggtgatgcccaaaggtgtaaatatctctcatggcgttggcagcggcaatcagtccaaatacgtacggatcatccaccatcggcgggaaaaagcccactgtttgcagcatagccatgccgttttgcagccggtatacacaggcgtcgtcactggtatcgaacccaaccagcagattcgggtcctcaaaccggggaagacgcgtcaaaatatcgtttagggcaccccgtcccaatttcgctgctcagccggcgctgctggtcatctgggtcagccactgtttttctgccatagcaaacaccttctttttttattctaccgcaatcgccaacctgatgcaagacgaaagcgactgaaaagcaaaagcggccgtacggccgcttttatacttacaaaagtgattccttttcttccatgcggtcaaccgccacggaaaaagaaccgtcgtgcatatgataaaccttttccacttcttcgttcagaaaacgctgcggattttcgttcacggtaaatttcacgcaacttccgcaggaagaactcaagccggggtaccggcatcatgtgatgggggatccctcgcgtttcaactgccgggcaaactgaatcgccccaaaatgggaaaaaggttgatacgtactccatgcgcttttatccctgtactttttggtcagcgcaagacggaaaagatctgctttttcggttacctgtacttcatatccggcgctgttggcaaatcgggttacattctgacgggcggtattgttgtccaccaatatcttataccgatcctgcttgctttccaacgcttttttcgtcatcagcaccagttcccggaaggaacgcccgcatgcgtcaatgatttgtgccattttacttctgatccttcctatttacttgccgaaaccacctgtgcacctgtcttggcctttttctctttcacaggcgatacaaaagcccgtgtttccggggtttcccaatactgtcaacaatacggcggcgacaccaatgataacgccggccaaagtccatttttttcacagaacccacctttttcctccattttgtcatttccaaagcggagatggaatcagtcgtttcctttaaaagtgtattatgccatatcccaaatttgaaattgcaattttcattgttttttccagaatggatagaatttttctctatatcgctgatttctgcaagataggtcgaacttttttaatttgctcatctttttcgtatttgtcaacactcattatctaagttcaagggaactggaaatataaaaatggaagtcttgctccttgcagtattcttttattttttgaatcagtttttgattagttgtatattccaacagatacacttccaccccatccgccttgcacgcttccacatatttgctgaaatattccctcgcctcgctcgtttgctcatggaatgttccgctatcaaaatcaatactgctccatactgattcctgatttacacctgtcataatctgatcaatcgccccatagcgttccctatattccgccacataagtatctccaccgttgatgatgaccgcttttccaaacgtcatcatgttttgtagaatcgctgtaatgccttcaaaaatactctcgtgcggagcgtaatcatatacatcacaattatctataaagaatccgtcaacacctttttcatatagttcctgagaaagctgtcctataaacttctgccagtctgggtttgctacatctacccattcttcttcctcccagtgctcatactcaccgattgccagttccgcataggttgtatagtactccctgaagttttcaattgacccaatatttagatatgtatatacgactgttccattttgatggagcaattcaatatccctttttgtaaaatactgtgcatcaattacaatcgtttcatacattttaaatcgttccaaagatgaggcgtccgcatttaaaaacaccctataatcgtttttctcaaattcctttgcttgattggctttcacaaaaaaacatccaccaataaacattagaacaaataatacagccaaggctactggttgtttgattcttttcccgcacataccgcccacatcctttcgataattttcgtttttccttatgactatcacattttacacattgatgattacgttttcccggatttgttgttcttgcagcatcagatttgttgctcaatttcgtattcaaattataggataaaacttgtgaacaattctatcgcaactttggactgtatgagaaatgccatcgtccgtgaaatggacaatgttcgtaaagccctgccgtgcggcgaa

SEQ ID NO: 313 - DNA, 32759 bp, Unknown
  16S sequences of unknown bacteria
agggcggccagcagcagggcgcaaagtccggggagccccgcgcccagggcggcggggacaagcccgccggcggggaggggcgcaagccctcccgccgcccgccccgccagggcggcggaaacggcggccgcccccagcccaaggagcagcggcccgcgccccgcagggaagacggcccgcaggacgcgcccacgcgctcctgagggctgcgccggaacggccggcgtggggagaagccggaatttgtctgcgccgtcgcagaatttttgcttgcttcttctcacgcggaatgatagaataactgcgtagagaggatctacgaatgtgtacatggaggtgaaacaacatggcatttaagattaccgacgagtgcatcagctgcggcgcctgcgcggccgagtgtcccgtgaacgcgatctccgagggcgacggcaagtacgtcatcgacgcggatacctgcatcagctgcggcgcttgcgccggcacctgcccggtgggcgctcctgttgaggagtaattccttggaaggtttggaaaaatcccctgccctgcttctggcaaggcaggggatttttccatgcaggtccaggagagatgtaaacgatttgtatatatctgttgcgaaggtttgacgctggccggaagcgtatgctacactcgtatctgtagatttggcgcagattttgtgggaggaaggaagacttcctcttgcgtgcgcgcaatcgcttcggcgcggcggcaaaacccgcgcaatcattcgcccgcgttaccaagaagaaaaagagagcggcaggcgtcggcgtatcttaggaggattttacggttatgaaacgtgttctcgcactcctgtgcagcctcacggttctgtgtgcggcgctgcttgtgggcgttcccacggcgcaggcggccgtggacggaacggtgcgcgtgtggctggaatccatgaacgaatatgggaccattcagtccgtgtccatcacgctggacggctcgtattccatccccaccgctccggaagtttctctctccacgcgcggaacctattacatcgaaaacgtggacgggacgctgatgatctccggaacgggcatcgacgggcaggtggccgtgggcaccaagttcaccgtcaagcagcacaagaacgacgacggctccatcggcaccatcagcctgtacaacaaccgctacggcaaccggtcctaccgcggcgacatgctctttgagatctacaacggcagcctgcgcctgatcaactacgtctacatcgaggactacctctacggcgtgctcgcgggcgagctgagcaacaccttcccgctggagacgctcaaggcgcaggccatcatcgcccgctcctacgtctacaaccgcatgctgaccaacgagccgaactacgagatcggcgatacctccagcgaccaggtctacaagggctacaattccgccaacaccaacatcatccgcgccgtggacgagaccgcgggcatccttctgcagtacggctccaagtacgtcaacgcctacttcggcgcctccaacggcggccaggtggagctgcccggcaacgcctggtcctcttcaagctcggaggggtgctacgtcatgaaggacgatccctacgacgtgcgcaatccttcctcgcgctctgtcacctataccttcaccacggaccccgactcgctggacacctccttttacgtcctcattcaggacaaggtctaccaggagctgggctattaccccaacatcgcgggcatccaggacgtgtggctgagcgacccggtggagacggacgagcgctcccgcggcatcagccggaactaccagaccatgaacatgaccgtgacggtgcgcgaatcgggctggagcagctctgacgacagcaatgtgtacgaccccttcgcgccctccgattccgacagcggcagcgtggagacggtggacatctccatcgacctgcacaacgagctcaagtggatcctcttcagcgcggattccgacctgcgcctcttctccctggaggaggacggaaactactactacctgacgctggcccgctacggccacggcgtgggcatgtcccagcgcggcgcccagcagatggccaacgagggccacgactacgaggacatcatctacttctacttcaacgacgtctccctccccaagatcgactttgtccgcgaagagctgacgacgaacgtgcccatcagcgattcgcccatcgcaacggccacggtcacggcctccagcctcaccgtgcgcgcggatgcctcgacctccgcctcgaagcttgggtccctgtcccgcggcacggtcgtcaacgtctacgcggagctggacggctggctgtgcatcgtctacaacggctccatcggctatatcagcacggactacgtgacgctgtccgattactcggaatcgggcggaagcacgacgcccggcacgggcggggacgacgcgctctaccgcgcgcaggtcacgctctccacagcgtcctccaccctgaagctgcgcgagtcgggctcctcgtccgcagacgtcctgacctacatgccgcacggcacgatcgtcgaggtgctcagcgacagcggaagctggtaccaggtgcgcaccctgggcggaaccgtgggctactgctccgcgcagtacctgacgcgcctggacgaggagatcaccacgaccaccaccccgacggagacgtccgggcagagcgatccggatgcggtcgcggccacgggcgaggtgaccggctccagcgtcaacgtgcgctccggcccgtccacgagcgccagcgtcctgggttcgctgaagaagggcgacggcgtggagatcatttcccagaacaacggcttctaccggatcgtctacaacagcggcacggcctacatctcctcctcgtatgtgcgcgtcaccggcacggtggcaacgcccacgcccacggcggacccggacgacgaggacggggacgcggtcgcggccatgggcgaggtgaccggctccagcgtcaacgtgcgctccggcccgtccacgagcgccagcgtcctgggctcgctgaagaagggcgacggcgtggagatcatctcccagaacggcgacttctaccggatcgtctacgacggcggcacggcctacatctccgcctcctatgtgcgggtcaccggcacggtggcgacctctacgcccagacccaccgccacgcccgactccggctcctccggagacctggaggagggggaggccctcatcgccgattccggaaccgccctcatgggcgacccgagcggcagcgtcatctatgaatacctctccaagaacgacgtggtgacgatcctcgactccgagggcggctattacctcgtccgcacggaggacggcgagacgggatacgtcgcaaagtccgcggtcaaggccgcggagaccgagacgccttcccccacggagacgccggagagcggcggctccaccacgcgccagggcacgatcaagctttcctcgtcttcctccaacctgaacctgcgccaggggccgagcacctccacggacgtccttgcgacgctgcgccacgggcagagcgtgaccgtcacgggcgagagcggcgactggtacgccattgaggtcagcggctactccggctacgtcatgaagacctacgtcaccttctccgaggacgaggagagctcctccggcagcagcgaggtgttccccgccgtgatccgcctgagcagctcctcctcaacggtcaacgtgcgctccggcgcgggcacgaactacagcaagatcggctccctcaccaacggcgcctcggtcaatgtcgtggccagcaacggcgactggtaccggatcgagtacggcaacggatacggctatgtgatgaagacgtacgtgcagctggtgtcgtccggctcgtccggctcctcctcgggggacgaggacgtgctgaccgccgtgaccacggccgccgtcaacctgcgcgaggagggcacgacctccagcgacaagctgggcacctaccccaagggcacgcgcgttgtcgtgctggaaaagggctcctcctggagccgggtggacatctccggcaacgagggctacatgaagaacacctacctggactttaacgattgatcggcaaggagcgggcgccgcgggcgcccgtttcttttgcgcggagcgggaggaaggatatgccagaaattcagctgcgggagggggagcggatcgacgacctgcaggtcgcgggataccgcatcatccagcacccgggccggttccgctttgggacggacgcggtccttttgcagaactttgcgcgcctgccggcccgcgcccgggccgtggacctggggacgggcacgggaatcctgcccatcctgctctgcgcgcgcgacccggccgtgcgctttgaggcggtggagctgcagcccgcctgcgcggacatggccagccgctccgtcgccctgaaccacctgcaggaccgcatctgcgtccacaccatggacctcaaggacgcgccggaccggctcgggcacagcgcctttgacgcggtgctgtgcaacccgccctacggaaagcgcggcggcgcgctccgcaacccccgggacgaattggccatcgcccggcacgagatcgccacggatcttgccgccgtcgtgcgcagcgcggccgcgctgctcaagaacgggggccgctttttcctgatccaccaggcggaccggctgcccgagatcgcccggcggctgcacgaggccggcgcgccgctcaagcgcgtgcggctggtgcacacctcgctcgagcggcgcgcgcacctggtgctctgcgaggccgtgcgctttgcgggggagggatgcatcgtcctgccgccgctcctgctgcaggacgcgcagggccagccctcgcaggagctgctgcgcatctaccagggcgagcagacggtctgagcggccggcggcgcgcccgcgtttggttgacagccccggcgttttggtgtatcttctttaaggaaaactaaggcaaggacgggaaattcttcgatgagcaacggcaaaaaatcttttgtgggcggggccgccatactcgccgcggcagggctgatcggcaaggtgatcggcatgttctaccgcgtgtggctgacgggcctgatcacctcggagggcatgggcctgtacggcacgccctattccgtatacaacttcctgctggtcgtctcctccgcggggctgcccacggccatctccaagctggtctcggagcgcctggtcgagggcgaccgcgcgggcgcaaggcagatcctcaagaagacgcggcgcatcctgctgtgcacgggcctggtctgcacggccatcatggcctccctggccgagcccatcgccaccctgatgggcgaccccatggccgcgccgggctttgtggccctggcgccctcgatcttcttcgtctgcctgctctcgagctaccgcggctatttccagggctcgcagaacatgacccccacggccgtctcccagatgatcgaggtcgtgggcaaggtcgtcttcgggtttgcgctggtgcgcgtcatggcgccgcacggcctggtctggggcgcggtggcggcaatcctcggcgtcacgatcgcggagctgctggcgctgctcttcctcatgatccgctatcacatcggccgcgacggtcgggcggctgcggcggcgccccgcgcggggaacgcgccgcttggcaaggacttctacaagcggctcttctccatcgccatcccggtgacgatcggcgcctccatgatgccgatcgtgaacctggtggacgcctcgctggtcaccaaccgtctgacgcacatcggctatgcgctcgcggatgcacgggaaatgtacggcgtgctcaccggcatggtcaacaccatggtcaacatgcccgcggtgatcacgctctccttctccatgtcgctggtgccggcggtctcctccgcgcagcggcgcggggaccacgccgccctgcagcgcaccacgggcacgagcctgaagctcgccttcatgatcgggtccgcggccgcggtcggcatgggcctgctcgcgcaccagatcctgcgcctgctctacgcctcggagccggaaaactgcctggtcaccggcggcgagctgctgacggtcatgtccgcggccgtgttcttcatcgcggtggtgcagacgacgaccggcatcctgcagggcctgggaaagcccagctacccggtcaagacgctggccatcggaatcgtgttcaagatcctgctcaactacgtcctcatcggcatcccgagcatcaacgtcctgggcgcggcgtatgcgtcggtcgcctgctacggcattgcggcggtggggaatgtgtacatggtgctcaagctctcgggaacgcgcctgcgcgcgggcagcgcggtggtgcggccggcgctcgcggccggcggcatggcggcggtggtctgggccttcgtgcgctttgccggtccccatcttggcaacacgacggagacgctcggcgcggtgtgcgtgggcgttgcgacctatgcggtgctggcgtttgcgctgcgcgccctttccccggaggagctctccatgatcccgggcggcggcaaactcctgcgctggatggatagatttggaggaaagaaagcatgataaccatagtggggctgggagttgcgcgcggggacctcaccctcggcgcgctggaggcgctcacgggcggcggccaggtccttctgcgcactgcgcgcacgcccgcggcggacgtgctgcgcgagcggggcgtcgccttctcctcgctggacgcgctctacgaggagacggaggactatgacgaggtcaacgaggccatcgcccgcgcggtgctgcaggcggcgcaggcgggagacgtggtcttcggcgtgctgggcggcggcggaatcctggacgcgagcgtgcgcgccgtgtgcggcgcggccaggcgcgcgggcgttccggtccgcaccctggcgggcgtcgggctctacgagcgcgccgccgcgcaggccggcgggctggacaacgcctgcatcctcgcggccatcgacctgcccgaggcggtcgtcgacgtgcgccgcccgctcctggtgtgcgaatttgcggaccggtgcacggcctcggacgcaaagctcaagctcctggaccactacccggccggctggcaggtcctgtggaacggcgagcccatcgcccttgcggagctggaccggcaggcgcagtacgaccacctgtgcgcgctcgtcgtgccgccgctgccgctcctggacgcggagcggtatgacttcgcccacctgatggagatcgtccgccgcctgcgcgcgcccggcggctgcccctgggaccgcgagcagacgcacgcgagcatgaaggccgacctcatcgaggaggcctacgaggtcctggacgccatcgacggcgacgacccggaccgcctggcggacgagctgggggacctgctcctgcacgtggccatgcacgcctgcatcggcgaggagcacggcgagttcagcgcccaggacgtgctgacctgcatctgcagcaagatgatccgccgccatccccacgtctttgcgcaggcgcaggcggagacctccgaggacgtgctgcgcaactgggaggccatcaagaaggacgaaaaatccctgcgcacgcagaccgaggtcatgcgcgacgtgccgcgcacgttcccggcgctcatgcgcgcggcaaaggtccagaagaaggcccgcgacgtcggcttcgactgggacgatgcgcgcgaggcgcttaaaaaagtgcgcgaggaggccgacgaggtcgaggaggtcctgcagaacccggaaaagctcgccggcgagctgggcgacctgctgtttgcggcggtcaacgtctgccgcatgaagaaggtcccgccggagctggcgctgaacgccacgaccgagaagttcatccgccgcttttcccacatcgaggaggcggcccaggcgcaggggaggaacctgcgcgacatgacattgcgcgaaatggacgcgctatgggaagaagcaaaagcttccgaacgaaaaaagtaacggaatctcgcgcttctttaagaaaaattaataaaaacgtggaaggataatgcggaaacgcggcgaaataccataagcgaaagtcctttggacttttggcatacatcctacattcttcaggaggcttattccatgaataaagcagagcttatcaccgcagtggcacagaagagcggtctgacccgcaaggacgcagataaggttgtcgcgtccgttctcgagagcatcaccgagacgctcgcctccggcgagaaggtctccatcgtgggctttggcacctttgaggtgaaggagcgcgcagcgcatcagggaatcaatccctccaccaaggagcccatgcagatccccgcgagcaagagcccggtcttcaagtccggcaagcagctcaaggacgcggtcaacaagtgagccgctgagggagaaaacctcttcgcatcgcgccgcagggagcaacgccctgcggcgcgatttttttgcgcgcgcccgaggcaaactaggccggaccaaaacgaaaaggagagtggacgaaatgtcgagagaatttcccctgtccgaccgctatggcgacgagacgcagaacccggccctgcaggcgcgggagtacgagcggagcgacgcgctgctgcccgaggagcgcgcgctcttcggcctcggcgggcaggcgcgccgccgcgccgaggccctgagccgcctctgcgacgaaaacggctttgccgaggaggaagaagaggagaattaacaaagccgcgcttgacgaatccagccaaagccgctacgatttaggcgtagacttctcaaggactggcggtaggaaacgtggaacaccacggtggacttgagaagaaaaatcgtttttcgccgaccgcctgggcaagtcccgggcggtcgtttttcttttggcccgcgcgttatccccgtgcaaaaggcgggtatttccaaagaggaaaaaccgctgcccgaacaggacgaagaggaggcaaaaccatggaccatcgttggaacggatttctcggcggcgcatggaccgagaggatcgacgtgcgcgacttcattcagcgcaactacacgccctacgagggcggcgcgggcttccttgcgggcgcgaccgcgcgcacaaaggcgctcaacgaaaagtatctcgccctgcgcgagcaggagctgcaaaagggcggcgtgctggacatcgacaccgagcacgtctcttcgctcctcaactacggccccggatacctggacaaggacaacgagctcatcgtcggcctgcagacggaaaagccgctctgccgctcggtcaaccccttcggcggcatgcgcatggtcctgtccgcctgccgtgcctacggctacgagctctccgacaccgtcaaggaggagttcaagtaccgcacgacccacaacgacggggtcttccgcgtctacaccgagcagatgcgcaaggcgcgccacaccggcatcatcacgggcctgcccgacgcctacggccgcggccgcatcatcggcgactaccgccgcgtcgcgctctacggcacggacgcgctgatcgagtggaagaagcgggacttcgcggccctgggcaagaagcccatggacgacgagaacatccgcctcatggaggaagtctcccggcagatcgacttcctcggccgcctgtgcaagatggcggagatgtacggctgcgacatctcccaccccgcggccaacgcccgcgaggccatccagtggacctattttgcgtacctggccgccatcaaggagcagaacggcgcggccatgtccctgggccgcgtgagcacgttcctggacatctacatcgagcgcgacctgcgcgccggcaccctcaccgaggagcaggcccaggagctcatggaccagttcgtgctgaagctgcgcatgtcgcgccagctgcgcacgcccgagtacaacgagctcttcgccggcgaccccaactgggtgaccgagtccgtcggcggcatgggcgaggacgggcgcacactcgtcaccaagaacagctaccgcatcctcaacacgctctacacgctcctgcccgcgcccgagccgaacctgacggtgctgtggagcgagaagctgcccgagcctttcaagcgcttctgcgccaaggtctccatcgacaccgacagcatccagtacgagaacgacgacctaatgcgcccccgctttggcgacgactacgccatcgcctgctgcgtctccgcggcgcgcatcggcaaggagatgcagttcttcggggcgcggtgcaacttcgcaaagctcctgctgctggcgctcaacggcggccgcgacgagaagagcggcgaccaggtcggcccggaggagcccgtcatcggcagcggcccgctcgactacgcggaggtcaaggcgcgctttgaccgctatgtctcctggatcgcggacctgtacgtcaacaccatgaacgtcatccactacatgcacgacaagtacgcctacgagaagatccagatggccctgcacgacacgaacgtgcaccgctacatgtcctttggcatggccgggctctcggtcacggcggactccctctcggcgatccagtatgcgcgcgtgacgcccctcttcgacgagcgcgggctggtgacggacttccgggtggagggcgagttcccctgctacggcaacgacgacgaccgcgccgacggcatcgccaaggccctgtgccacgacttcatcacggagctgcgcaagcacaagacctatcggaacgccgagcacacgctctcgatcctgaccatcacctccaacgtggtctacggcaagaagaccggcaacaccccggacggccgcagggccggcgagcccttcgccccgggcgcaaaccccatgcacggccgcgaaaagagcggcgcgctggcctcgctgaactccgtgtccaagctctcctatgacgactgccgcgacggcatctccaacaccttcaccgtcaccccgggcaccctgggcgcggacgagggcgagcgcgtgcagaacctggtctcgctcctggacggctacttcgccctggacgggacgcacgccgcgcaccacctgaacgtcaacgtgctcaaccgcgcgacgctggaggacgccatggagcaccccgagaactatcccaacctcaccatccgcgtctcgggctacgcggtgaacttcgtgcgcctctcccgcgcgcagcagctggaggtcctctcccggaccttccacgacgcgatgtagccatgggccgggtgcattccatcgagaccatgggcgccctggacggccccgggctgcgcatggtggtgttcttgcagggctgtcccctgcgctgccgctactgccacaaccccgacacctgggccgcgcagggcggggaggagcggagcgccgcggagcttgccgcccgcgccgcgcgatacaagcgcttcttcggccgggagggcggcgtcaccttcagcggcggcgagccgctgatgcaggcggagttcgtcctcgagtgcgtgcaggcgctgcacggggcgggcatccactgcgcgctggacacgggcgccgggctctggaacgaggcggccgcgcgcctctttgacgcggtggacctggtgatcctggacgtcaagcacagcgatccggcggagttccgccgcctgacgggcggggacatcgggacgctggaccaggccctcgcccacctgcgcgcgacgcagaagcccgtctgggcccgccaggtgatcgtggagggctatacgcagagcgcggagcaggtttgcgcgctgaaggaaaaactagcaggaattcacgttgcaaaaatcgaacttcttccctatcatacgctgggcgtgcacaagtggaaggcgctgggcatcccgtacgcgctggagggcgtaaagcccccgagcgcggaggagatggcggccctgaacgccctcgttcggtaggaggcggggagagcgatgcaggagaaacggctcgcggtcacggtgccgcagaggctggacggcgcgatggtcaaggacgtcgcgcgctcctgtctttcgctctcctcgacgcgtctcaagaaggcaaagcgcgtgccgggcggcatcctgctcaacggcaggggcgtgacggtcgtcgagcgcgtgcgcgcgggggacgtgctctccatcgtcatcgaggaggcgggcgcgcgctccgaggacgtcgtgccggtcgccggcgacctggacgtgcgctacgaggacgagcacctgctggtcctgaacaagcccgccggcatgcccgtgcacccgagccccggccacgagcaggacacgctggccaaccgcgtcgtcgcgcgctacggcgaggtgttccgcccggtcaaccgcctggacgccggcacgaccggcctgatggtcgccgcgcgcaatgcgcacgtccacgcgcgcctgagcgcggccctgcacaccgaggactttgaacggcgctaccttgcggtggtggaaggcgcctggcgcgagcgggaggggacggtcgacgcgcccatcgcccgcgcgcccggctccgccatccggcgctgcgtggacccggccgggcagcgggcggtgacccattttcgcgtcttgacgaacagtggcaggttttccctcgttgaactcttgttggaaactggccgcacccatcagatccgcgtgcacatggcgcacatcgggcatccgctcgtcggggactttctctacggaacggaggaccgggaccggatcgcgcgccctgccctgcacgcgtggaagctgcgcttcctgcacccgatgaccggcagggagctgcgctttgcgtgcgcgctgcccgaggacatgcgcgcgctgctcacccggcaaggagggcttgaagatggctgagaagatccaaaccctggaagacctggagcgcgccgtggagcggatcggcttccttccctacagcgggaaccggcgcgagctgctcttcaccctcgaggagcggacggacaacgcctggcacgacgacagccccagcgatccctggctctggcggtcgcaggtggcggccgggggacgcctggcatacggcaagttcttcctgaagcgcagcggctttgtcgcgccgcgctgcctgcccgcctttgtcgcccttcggcgggagaaccggacattttcggacctgtacgcgcgcgggctcgtctcgcgcggggccaagcgggtgtatgattgctttgcggaccgggcggagtggaccctccccgcgctcaagagcgaggcgggctttgccggcgcgtccagggagtttgaggccgcgctgacggagctgcagggcctcttctttctctgcatcagcgggcagacgcgccgcgtcggccggacgggggagccctacggctggcccaacaacgacttctgccggctggaggcgcgctttcccgaggcgctggccgcgcccatgcgcacggtggaggccgaggaatacctgctcgactgtgtgcagcgcgcgggggactttcccctgcgcgccgtgcggcgcctgctctgcggcggcggaatttcgtcagcataggcaaactgcttcttttcagggtgggcgttttgtgatataatactaccaatattctgggcattgtttggaggatggcttatggttgactgcattacgctcaccgttccggccaaagagagcgcgctgatggtcgttcgcctgacggctgcgggcgtcgcggcgcgcatggagatggacttggagacgctggacgatgtcaagaccgcggtctacgaggcctgctatgcgatgacgatgcagaaattcatccccgaacagctcaccatctgctttgcacccggagaacccttcgccgtaaagatctgcgccgagggcgcctggcgggagaccgccgggaaggtcccggacctcaagctgtgctatgcggttctgaccacgatgattccgcacgtcaaggtcgacatggacgagaggaagatccgctgtatcgagctgcacagatgaagagcggtgcggggaggggggcaaccgggcgcatggagcaggaaaaaaggcagaagatgctcgcggagtactgcaagacccgcgatgtcggcctgcgcaatgaattggtcacggagtacatgtaccttgccgacatggtcgcgcgtaagtacgcgggccgcggcgtcgaatacgacgacctgaagcagatcgcggccatggccctgatcggggccctggagcgcttctcctgcgacaagggcattcaattttccacctttgccgtgccctccatgacgggcgtggtcaagaactattttcgggatcggtcgcggatcatccgcatgccgcgcaccatcggcgagcgcgtgcagaagatcaccctggcgcgcgaggccctaacccaggagctcatgcgcgccccgacccctcgggagatcgcggagcgctgcggctattccgaggcagacgtcctggaggcgacggaggccatgcagagcctttcgctgacctcgctggacgcgcaggtcggcgaggaggaggacacgccccttgcctccatgctcggccaggaggaggcggagttcgaaaacatcgccctgcgcgacctcctgcagaaggtcatggacaagctctcggacgcggagagaaagatcctgcacatgcgctacttcgaggagcggacgcagcgggacatcgcgcgggagatgggcgtgtcgcagatgtacgtctcccgcgtggagcgcaagatgctcgcgcgcttccgggaggcgctgcgcgaggcgtaggagaaagaggagaaaaaaacatccagcgggggaggagagcacatgcagtacaacggaggatcgggataccgggacggctcgcgccagcggacctacctgccccggcagcagcagcccgcccccgtgcggccgccgcgcagcacccccccgaaaaagcgaaagagaaagatcgtcgtaaagccgcggttctttgtgtttttgctgatcctggtgctgctgatcgtcggactgatcttcggcatccgcgccggggtgcaggccctggtcaacaccgaggccaccgtcacctacggcatgatcgaggacgtgacgacggtcgacgccctcgtcgtccggaacgaggagtgcgtgcgcgccgagggctacggagagatcgaatacctcgtgccggagatgagctatgtcgcggccgatacgcccgtgctggaggtctacgcgaccggctactcgggcgacaggagccaggagatggacgcgctgcgcacgagcatcgtgcagcgccagcaggagacggtgctgggcaccatcgtcaacgcgaccctggaggagtacaacgcggaaatcgacgcccaggtcgacgcgatctccgacgccatgcgcgacaaccccgcgcagctggacgcgctgagcacgcagctgaccaccctgatggaggcccgccaggactacatcgagacgacgaccgaggcccaggccgacagcacgctgacccagtactacgcgaacaagacccagctcgagtcccagatcgacgcctggcggacgcagtaccgctccccgggcgaggggctggtcagcttctccttcgacggcctggagccctatctcaacatggacacgctcgacgcgctggacgccgcgaccgtaaagagcctcctgcaggagagcaaccccgccgtgccggaggagctgcgctcccagcagaacctctaccgcctcgtgcagccgaacgagtggtacgtcgccttcacgacccaggcctcgcagtggaagatcggcaagggcgagacctgcgccatctactttgaatcctacgaggacatcacctataccgcgaccgtgcgcacgctggccgccagcggaaacgacctgctcgtggtcctgcagatgaacgaggacgtgtcgcccctcatcaacgcgcgcaaggtgcgcgcggtcatcggcggccgcgtggagggaatgatggttcccctgagcgcgctgcgcacggagaactcgcagcagggcgtataccttgcggacgacaacaccttcgtcccggtccgcgtggtcggccaggactccaagaatgcgctggtcatgcccctggaagaggggacgctcacgcgcggcgaccgaatcagaaagtaagaagaggggaagcagccatggaagcgacggaaagagaaatcgaggccttccgcgcgcgcgtcgcgcgcgtgcgcagcgagctggacgccgccgcgcagggaagaccctataccctgcttgcggcgacaaagacccagagcgcggaggtcatcaatctccttccagaagttggaatcaacgattacggtgagaaccgcgtccaggagtggatggaaaagcgcgtaaaaattgaccaaagtctgcgctttcaccaaatcggacggttgcaaagcaacaagataaagtatataatagagcatgtcgtcctgatacactccgtagacaaactggagctcgcacaggacatcgacaagcaggccaggcggcacggccgccgcgtggacatcctcttggaggtcaacacggcgcgcgaggcgcaaaagggcggcgtcgcgccggaggagctcgagcaactgtacgagggctgcctcgggctcgatggcgtgcgcgtgcgggggctgatgtgcatggctcccaacacgccggacgagggcgtggtgcgcaggacctttgcgcaggcgcggtccctctttgagggattggccgcgcaggacaagaatgtggacatcctctccatggggatgagccaggacgccaggatcgccttggaagagggctcaacgctcgtgcgcctgggaacttcgctgttcggcaggcgcgcagggtatgacaatacgggaacggaaggaaagtaaggagtgagccaattggcaaagaagaagggcatgaatttcctgaacttcatcggtttgggatcttcggaagagccggtggaagaagatatgtatgacgaggaggaagcccccgtggtgaacaatagacgcgacaactattcgaacagcaggagctatcagcgcagcgaacccccgatgcaggagcaggactacggctacgattccggttacgacgatgactaccgcgatccgcagccgcagggcaccacgacctacggctcgtcctccaagatcatcaaccacccggccgtcgccgcccgccaccgcacgatgatctaccagctcgacagctatgaggacagcaaggacgtcatcgacgacctgctcgagggccactccgtgctcatcaacctcgaggcgctcgaccttccggaagcgcagcgcatcatcgatacgctcatcggcgcctgctatgccatcaacgccaccatcaagaaggccgccgcgcagacctacctgctcgcgccggagacggtggaggtcgccggcacctatgccgatgacagccgtaccagcaagatcttcgaggacggccatcggtaaggggtgaagaggtgctcaacaccgttttataccaggtttttcgcggcgtctattgggtgctgaacctgtgctcctgggcgatcgttgtgcgcgccatcctctcctggttccttcggccggacaacgcggtctacaacttcctgctgcgggtgaccgagccgctgatcgcgccgttccgcccgctggcctaccggatctcaaacggccggctgcccatcgaccttgcgccgctgttttcctacattgccctgatgatcctgatgcgccttgtctcctacggcatggtgtatcttctgtacggaatatgaacgagacggatcaacgcatggagtcggcgcggtttgcggacctcgtccgccgcgccgcgcggggcgtccgccccgtcttttctgcattccttacgccggatgcccgcgcgcgccttgcagccctggccaggcgcgaggggctggagagcggcgactttggcgcctccgccgacgcggagcgcgcggtcgtcggcctctggcagccgggctgcgcgccggaggaggcgccgatcgccgtcgtctccatcgcgtgggacggccgctacgcggcaccgcagcacagagatgtgctcggtgcctgtttgggtttgggcctgcagcgcgagacgctcggggacatccgcctggagggcgactgcgcctacgtcgcggcaacgcccgccatcgcagactacctcatcgaaaacctgcacgaggtcggccgcgcgaaggtctccctttcgcgctacgacggagagctccctgcggccgagagcggccgccgcgaagtcgtgaacgtgccctcgctgcggctggacgcggtgctcgcgcagacgctgcacctgtcccgggcccgcgcgcaggcgctcatccgcggcggggccgtgcagaaaaattggcagatcaccgaccgcacggacgcggagatcgcccaaggggacgtgctctccatccgcgggagcggccgcatccgcgtgcacagcgtgcagggggagagcagaaagggccggctcttcctggaggtggagacgtttctcaggccttagtcgacaagaagggacggtgtgcgcatgattacctcggaccagattcacgaaaaagaattctcctataaaatgcgcggctacaacgacgcggaagtggacgcctacctcgaccagctggccgccttcatcgacaatctgaccaaggagaacaaggagctgcgcgagcggctcaagagcactgccgaccagttgacctacatgaagaacctggagaccacgctgcgcgacacgctcatcaccgcgcagcgcagcgcggaggagaccacgcgcaacgccagcctgcgcgcggaggagatcctctccagcgccaacgacgaggccgccaagatcgtctccgccgcaaacgccgaggccgacgccatccgccgccagctcggctccctgcggcagcaggcctcgacctaccgccagaacttccgcatgctgctcaacgcgcagatgcagctgctggacgagtccgggctgggcagggagcgggagcgcgccgaggagcccccgaccgcgcgcatggccgccatgccccgcatcaacctgaccgaaaaccgccaggaggcggcagagagcaaaaagggcctgcaggaccagccgctgaccagcgcggcgcgccgcatcgtgcccattccccaggaggacgagtaatgccaatcctttacatcgccgtgatggccgtcgcattcctcttggaccgcgtcgtcaaaaactgggcggccggtcccctggtcgacgtccacgggggcgtgctgccgctcatcccgggcgtgttccagttcacctatgccgagaaccgcggcgccgcgttcagcattctgcagggcagaacctggctgctcatcgtgctcacggcggtgatctgcctggtggggctgtattttctgttcttttcccggcggaggctgccggttttccccagcatcgccattgccctggccctgggcggcgcgctcggcaacctctacgaccgcgtggtgctcggctacgtcatcgacatgttcgatttctgcctcatcaattttgcggtcttcaacgtggcggacagcttcgtcaacatcggggttgtgatgctcgccatctggatggtcttctttgaggaaaaggacaagcgccggggcgacttccgctggggcaggcccctgccgcaggtccaggcggaggagcgaaacgaggaaagcgaagagacacatgaagaacttgcaatggatcgcgacgaaggaagatgaaggcatccgcttggatgcctttttgtcgcaaaagagcggggaaacgcgctcccgcatccagaacctgatcaaggacggctgcgccgccgtgaacggcggggcgcccaagaaggcgggccagcccgtttccgcgggcgatgcaatcgccctggacatcccggaccccgcgccgctggaggccgtgcccgtggagatggacgtgcccatcgtctacgaggacgaggacatcgtggtcgtcaacaagccccggaacctcgtcacgcatccggccgcgggccacgcgcaggacacgctcgtcaacgccctgctcttcgcctgcgacgacctgtccggcatcgggggcaagctgcgccccggcatcgtccaccggctcgacaaggacaccacgggcctgctcgtcgtggccaagaacgaccgcgcgcacctggacctggccgagcagatccgcgtccacagcgccgggcgcgtctactgggcgctggtggagggccgctttcgcacggaatccgggacggtggacgcgcccatcggccgcagcccccgcgaccgcaagcggatggccgtcgtgcccggcgggcgcgaggccgtgacccacttccgcgtgctgcggacgttttcgcgcacgtcgctcatcgagtgccgcctggtcaccgggcgcacgcaccagatccgcgtgcacatggccagcctcggccacccggtctgcggcgacccgctctacggctttgcgcgctctgcggcggcgccctgcccgctcatgctccacgcgcgcgagctgcacatccgccacccccgcaccggggaggagatgaacttcctcgccgagccgccggaggacttcgcccgcgtgctcgaccggcaaagataggcaaaaccgcaaaacttaacgtccctgcgcaggcagaccttgtagacagggggcgctttttgtgctatagtggcaaagggtaaagcgttcctttaattcgttcccgtgaggacggcaaggtgcgtgtggaaaacgaagaagcacgaagtgcgcgcagcgcgtcatgcgccttgaaggaatgcagaccttcagggcgtttatttttttctctcggcaaaggaggagcagccatggaattttgcagaaaggcagagatcatggacgaggcggcgatgagccgcgccatcaagcgcatcgcgcacgagatcatcgagcgcaataagggcacggagaacctgatgctcatcggcatccagcgccggggcgtgccgctggcgcagcgcatcggcgcgctgatcgcgcaggaggaggggacggagctgcccgtgggcacgctggacatcaccttctaccgcgacgacctctccctgctcgacgagcatccccaggtcaaggggacggacgttcccgccaacgtcaacgaccagaatgtcgtcctcgtcgacgacgtgctctacaccggccgcaccgcgcgcgccgccatggacgccatcatggacatgggccgcgcaaagaccatccagcttgcggtcctcatcgaccgcggccaccgcgagctccccatccgcgcggactacgtgggcaagaacgtgcccacctcccacctggagatgatcgccgtcagcgtccgcgagatcgacggcaaggagatcgtggagctctttgcgcagaaataaggctgcggcctttccggaaaggagaatgcacatggctttcaaacacaaggatcttctctccctgcgcgacgtcgagcgggaggagatcgagatgatcctgtccacggccgcctcgatgcgccagctgctggacagccccaccaagaagaccgcgcacctgcagggcaagtccatcgtgacgctgttctatgagaattcgacccgcacgcgcatgagctttgagctggccagcaagtacatgtccgcggccgcggccaacatctccgcctccgcctcctccgtgcagaagggcgagaccctgctggataccggccggacgctggaccgcatgggcacggacgtcatcatcatccgccaccccatgtccggcgcgccgcacctgctcgcccagcacgtgaacgccgccgtcatcaacgccggcgacggcatcaacgagcacccgacccaggcgctgctggacatgttcaccatcaagcgccacaagggccgcctggacgggctcaaggtcgccatcgtcggcgacgtgctccactcgcgcgtggcgcgctcgaacatcttcggcctgcacaccatgggcgcggaggtcgcgctctgcgcgccgcccaccctcatgcccgcgcagatggaggagctcggcgtcaagacctatacccgcgtcgaggaggccgtcgagggcgcggacgtggtcatgggcctgcgcatccagaaggagcgccaggaggagggaaatttcccctccctgcgcgaatactcggagttctttggaatcaatgaggagcgcatgaagtacgccaagcccgacgcgctcatcatgcaccccggccccatcaaccgcggggtcgagatcaccagcgacgcggcggactgcgagcaatccgtcatcaacgaacaggtcaccagcggcgtggcggtgcgcatggcgctgctctacctgctgaccagaaagggtgtgcaaagcgtatgaagctgcttgtcaagaacggaatcctgcccggccgcggcgcctgcgacatgctcgtagaggacggccgcatcgccaagatcgagccgaacctggaggacgcggacgcgcaggtcgtcgacgcgcagggccgctgcgtcctgcccggcatggtggacctgcactgccacctgcgcgaccccggcctggaatataaggaagacatcgtcagcggcacccgcgccgcggcggccggcggctttaccaccgtctgctgcatggccaacaccgaccccgtcaacgacaacgcggtcgtgaccggctacatcctcaacaaggcgaagacggagggcagcggcgtgcacgtctaccccatcggcgccgtgtccaagggcctcaagggcgagaccatggccgagatcggggagatggcccgcgccggcatcgtcgccatctccgacgacggcaagcccatcatgaacgcgcagctcctgcgccgcgcgatggagtacggcgcggcctttggcatgacggtctttgaccactgcgaggacatccacctggtcaacaagggcgtgatgaacgagggctataactccacgctcctgggcctgcgcggaacgacccgcgccgccgaggaggtccagatcgcccgcgacgcgatcctggccgagacgctgaacctgcccatccacatctgccacgtctccaccgccggcggcgtgcgcatcatccgggaggccaaggcccggggcgtcaagatcacggcggagaccgcgccccactacctggccggcaccgacgacatggtgctcagctacaatgcggccaccaaggtcaacccgcccctgcgcctgaccgaggaccaggacgccttgatcgagggcctgtgcgacggcacgatcgacgccatcgccaccgaccacgcgccgcaccaccgcgacgagaaggaggtcgagtacaacctcgccctctccggcatctccgggtttgagacggcctttgccctggggatggagaccctcgtccacgcgcaccacatgtccctggaggactacgtcaaggtcgtcagcaccaatcccgcccgcatcctcggaaagaactgcggggagctggcggtgggcaaggacgcggacttcctgctcgtcgaccccaatgaggagtggtgcatcgacagccgcaagttcctctccaagggcaagaacacgcccttccacggcaccatggtccacggccgcgtcaaggcgacgttcgtcggcggcaagtgcatctatcgggacgaatagggaaaaaaggaggcgctgcacacatgaaactggccatcgacgcgctcatcgaaggaatcgagcgcatgggaaaccccacggcggtgggactggacacgcagctcgcgcacctgccggaaggatttgccggcaaggtggagagctttgccgacgcggcggacgcgctcctgcgctacaacaaggccctcgtggacgcgctctgcggcatcgtgccctgcgcgaaggtccagatcgcctactatgagatgtacggcgtgcccggcatgcaggccttccgcgagacgatcgactacgccaaggccaagggcatggtcgtcatcgcggacgccaagcgcaacgacatcggcgcgacagcctccgcctacgccaacgcctacctcggggagacgcccctgggggagaaggccgacagcgccttccccgtggactttgtgaccgtcaacgcctacctcggcctggacggcgtggagcccttccgcaaggcgtccgccgtgcgcggcggcggcatcttcgcgctggtcaagacctccaacccctccggcgtgcagctgcaggacctgaagatcggcgagcgcacggtctacgaggtcatgggcgacctcgtctccgaatggggaaaggactgcatcggcgagcacggctattcctccatcggcgcggtcgtgggcgcgacgtatccggagcagggcgcggccctgcgccagcgcctgccccacaccttcttcctcgtgccgggctacggcgcgcagggcgcgaccggcaaggacctgcgcggctgcttcgatgcgcagggccgcggcgcggtggtcaacgcctcccgctcgatcctgaccgcctggcgcaagcagccgggcgtggactttgcgcaggccgcctataacgaggccgtgcgcatgcgggaggacatcatggagggcatccgcgcatgaagagattgacggcaaaggtcctctcctgcgcgccgctgaacgcggagatgggcctgctcacgctcgcccttccggccggggcggaggccgcggtccccgggcagtttgcgcacatcgcggtgcccggcgaccgcgcgcacctgctgcgccggcccatcagcctctattccgtgcacgacggcatcctggagctcggcatcgcggcaaagggcgagggcacccggcggatcctcgcggcaaagcccggcgaggagatcgacctgctctaccccctggggcgcgggtttgaaaagggcggcctggagcgcatcgcctttgtgggcgggggcatcggcgtcgcgcccctgcgctttgcgatggaggcctttgcggacgcccgctgccgcgcggtcttcgggttccgcagccgggacctgctctacgccgtggaggcctgcgaaaggaccggcgcgcccgtcaccgtctgcacggacgacggcagcgccggcgtgcacggcctggtcaccggccccctggaggagatgctccggcgcggggaggtagacggcgtcatggcctgcggccccacgcccatgctgcgcgcggtgcaggccctcgccctgcagtacggggtcccggcgcagctctccctggaggagcacatgggctgcggcatcggcgcgtgcctcacctgcaactgcaaggtcaaggccaaggacggggaattcggctataagcgcgtctgcgcggatggcccggtgttccctgcagaggaggtcgtgttcggatgaagatgggcgtgaacctgtgcggggtggagctgaagaaccccgtcatcgcagcctccggaacctttggctttggccgggaatacgacgagttctacgacgtggggagccttggcggcatctcggtcaagggcctgacgcgcctgccgcgcctgggcaacccgccccaccgcatcacggagacgcccgcgggcatgctcaacagcgtgggcctgcagaacccgggcgtggaggccttcctggaaaaggacctgccctggctgctggaaaagggcgccgtggtcgtggccaacgccgccggcagcacggaggacgactactgctacatggccgagcgcctctccggcaccggcatccgcatcctggagatgaacatctcctgccccaacgtcaaggagggcggcgtggccttcggcacaaggccggagtccgtctacaagatcaccaaggccgtgcgcgcccactgcacaaagcccctgatggtcaagctctcgcccaacgtcgcggacatcgccgaggtggccctggccgcgcaggagggcggcgcggacgcgatctcgctcatcaacacgctcaccggcatggccgtggacgtgcgcacacgccggccggtgctggccaacgtcgtgggcgggctctccggcccggcggtgcggccggtcgccctgcgcatgtgctggcaggcggcaaaggccgtgtccatcccggtggtgggcatgggcggcatcgagtccggggaggacgccatcgccttcctgctggtcgggtgcacggccgtgcaggtgggcacggcaaacctgcacaacccctatgcctgcatggacgtgatccgcggcatggaggaatacggcgagaagtacggcgtgcaggacgtgcgcgagctcatcggcgctctgcgcctcgactaaaagggggcgcgcggcatggacctcggcatcatcggcggggcggacggccccacgacgatcctcgtctccgcaaacgcgtcggaactggcgtggacgctggccatcctcgctgtggccgcggcggccgccctggccttcgcgatttggaggaagaagcggaaatcgtaaagagacccccctgcgcgcacaacgcgctgaatacgggagaggcgagcctttggcccgcctctcccgcttcgccccgaaccgccagcggcggttcggggttacgaccggcttattgggcctaagtctcaaacgtggggcatctagctttgccccatgccgcctttcggtggcctggggttatggcgggcttattttcgccctgtggactcaaaacgctcaacctacagggacgctgacgcgccccctccgcaggcgtactcccttcggcttcgccccgaaccgccaccagcggcgcggggtttcgaccggcttattttcgtcctctgggctcaaaacgtgcggccttcaggagctgcgctcccttcgcgggcgtacacgccgccgctgcggattgcagcggaaagcccccctgcgcacaaacggtgcgcaggggggctcggcgttttgggcgctacgcgcgggccgccttgtcctcggcggaaaggcgcttggcgagcttttcgtccggcgagacgaagagcgtctgctggtgggtatagatgacaaatccgggctttgcgccgccgggcttcttgacgtacttgcgcagcgtgtagtccacgggcaccttgtccgcctggcggcccttggagaaggtcgcggcgagctgcgcggcctgcaggatggtcgcgttccccggcgcggtggacttgacgatcacgtgggagccgggcatgtccttggcatggagccagagctcgtcgcccagcgccgcgccggtcaggcggtcgttctgcacgttgtttttgccgacaaagatgtcgatcccctcgtcggagacgaagtggtgcggcttggactccgggatcttcggcggcttcttccccttgttcgcgtcgcgcagaaggccgacgcgaacgagctcctgctggatctccgtcagctcgtcaaacgtcgtgcagagctccaggttctccagctggccctcgagataggcgatctccgcctcgttggcggacatctggtccagcacaaggtcggaggcggccttgagcttgttgtactgcttgtagtagcgctgcgcgttctcggccggggagagggcggggttcatcgggatctccacctcgcgcatgtcttcggaatagtagtccggaacgacggccttgctcgcgccgcgcgggatgcagtgcagcgaggaggtgatcaggtcgcccttgcgccgcaggtcgtccatgttctcggcgtccaggagcgtctggcgctggatggcgagcttcttctcgtcgcgctcgagggcgttttgcaggaagcggcgcaggttgtgcgcgcgctggtggatgcgctcccgctggtcgcgctgcaggtaataggcgtccatcgcctccgagagggaggcgcacgccacctgccgggcgggatcgcgcgagaggtaggggaaggaggtcacgtccaggggcgagccctcctcgtcgaccaggagcgtgggcacgtcctcgagcaggcggaagaacgccgcgagcttgcccgccgcggtggggagcagcgcctcggtcagggccgcggtctcgctgcccgcggcgcggaaggcgagctcgcgcgccgcctgcgcggaaaggccgctcacgctctgctggatcgccttgtccagccgctggccgacgagcgggcgcagcgcgcgcaggtagtccgccgcctgcgccgcgtaggggttgagcttgtcctgcgcgggcggcatctcatagggcaggccgggcaggacctcgcgcacgcggctgatgtcctcggtgacgtggcgcgcgctgtccacgatgcggccgttcggcccgacgaggatcatgttggagtgccggcccatgatctcgatgacgagccgccgctccgtcaaatcgccgagctcgtccaggccctcgaagcggagggtgagcacgcggtccgcgccgagctgctccgcgccgaggaagcgcgcgttgaccaggaacttgcgcagcagcatgcagaacatgggcggcgtgtccgggctgcgctttgcgccgcgcgtcaggtgcacgcgcgcgttgttcgggctggaggagagcagcagccggtgattgccgccctgcgcgcgcagggtgaggagcaattcatcgcgctcgggctgctgaacgcggtccacgcgcccgccctccagcacgcggttcagctcgcgcgcgagggcgccgagcgtcagtccgtccatgggcatgaaaacatcaacctccgtcctgtccaatgcgaaaaagccgggccgcaaaggacccgctttccccagtataccacagttttattccgcgcaaaagcagaaaaaaaggacgagccccgtcggctcgtccatcggttgcggaagattaggcctcaaccttgtcgatgtacttggcgtacacgtaagcgttggtgccatcctcgagagcgatcttcgcccagttgccgtcaaactcgacaaccttcacaacatcgccgcgatggatgatgtcgatgggatccagcttggtggaagcggtggcgcgaacgttcagagcgcggcagatgacgacgtagtcggtggtctcctcttcaggggtgacgtactcgacatcctcggtgtaatccgcgtagtaggtgggctcgatgaagttggaatcggccagggcagtcatggggatgatcatcatcgcaacagccaggacaagggcaagcagtttcttcatggaagaagacctccttgatgaaattttacgatctcattataatctttcttacattgtttgtcaatcctgaaatgatttagaaatataatttggcctgtgtgaatttctgccagggggatgtactgcaggaattccattaagtttttgtaataaccggtgcaaaaccaggcgcattatggtatactcaaccgcggctgcacggaaaacagcggtcggaaaggaaaagaaaatgatacaggcaagcaatatttctctccaatttgggaagaggattctttttgagaacgtgaacatccaatttgacaagggcaactgctacggcatcatcggcgcaaacggcgcgggcaagagccagttcctgaaaattctctccggggagctgcagccgaactcgggcgaggtcatcgtcaccccgggcgagcgcatctcggtcctcaagcaggaccacttcctctacgatgaatacgacgtgctctccaccgtcatcatgggcaataagcgcctctacgaggtcatgcaggaaaaggaggcgctctacgcaaagccggacttcaccgacgaggacggcctgcgcgccgcggagctggagggcgagtttgccgagatggacggctgggacgccgaaagcaacgcccagaccatgctcaaccagctcggcatcgacgaggaaaagcacggcaggaagatggccgagctcgacggcaacgacaaggtcaaggtcctcctggcgcaggcgctctttggaaacccggacatcctgctgctggacgagccgaccaaccacctggacgtcaaggccatccgctggctggagcgcttcctcggcgactttgagaacacggtcatcgtcgtctcccacgaccgccacttcctcaacgaggtctgcacctacatcgcggacatcgactaccgccgcattcagctctacgccggcaactacgacttctggtacgagtccagccagctggcgctgcgccaggccaaggagaccaacaagcgcaacgaggccaagatcaaggagctcaaggagttcatcgcgcgcttctccgccaacgcctccaagtccaagcaggcgaccagccgcaagaagctgctggagaagattgagctgacggacatccagccctcgacccggcgctatcccttcatcgagttcaagcccgagcgcgaggcgggcaacgacatcctcgtggccgagggaatctccaagaccatcgacggcgtcaaggtcctggacaacttcaccctgcgcgtggacaagggcgacaagatcgcctttgtcggcgacgacgagcaggcaaagaccacgctcttccgcatcctcatgggcgagatcgagccggacgaaggctcctataagtggggcgtgacgatcaccaccgcctacttccccaaggacaacaacccctactttgagggcgtggacctgagcctcgtggactggctccgccagtattccaaggagcaggacgagacgttcctgcgcgggttcctggggcggatgctcttttccggcgaggaggccaagaagaaggcctgcgtcctctccggcggcgagcgcgtgcgctgcatgctctccaagatgatgctctccggcgcgaacttcctgattctggacgagccgaccaaccacctggacctggaatccatcacctccctgaacaacggcatgaccgccttccccgggaccatgctctttgtctccaaggaccaccagctcgtctccaccgtcgccaaccggatcgtggacatgagcgtcggccagcccgtcgtggacaagcgcaccacctacgaggaatacctgcagatgaagctcggcgactagccgcttaaagagaacctgccgcgggaaaaaatcctgcggcaggtctttttttgcgcgcggattgaatcctttgggcgggttgattcgtcataaaactgtggtatactgtctataatgaaggaatgtggagatgacgacatgagtgcgaataaaatcctgatcgtggaagacgatacgcccatcgcggagctgctggcttaccgcctcaaaaaggagggctacgacgtgggcatcgccgggacgggcgcgcgcgcgctgcagatggcaaacggcgcgcatccggacctggtgctgctggactggcagctgccggacatgtccggcctggaggtctgccggcagatcacgaacaagctgcacatccccatcatcatggtcacggcccgcaacatggtggaggacaaggtcctgggcctggaggccggcgcggacgactacatcaccaagccctttgacgtgcgcgaggtcgtggcgcgcatcaaggcgaccttccgccgcctggagaagacgaacgacgcgtcgcccgcgcgcaacgagctccggctccacttcgcggggctgacggtcacgccctcgaccatgacggtggagaagaacggccgccaggtggacctgacccccttggagtatcagctcctgatgtacttctacgaaaaccgcaacgtggccctctcccgggaaaagatcctgggcgcggtgtggggatacgactacttcggcaacacgcgcaccgtggacatccacgtcctgcgcctgcgcaaaaagctgggattggacaacgagatccgcacgatcttcaagatcggctacatcttcgaaattacggattagggcgtgcatagatgaagaaaacgacgaggaaagcggggaccttctccctgaagcggctctttgcgggcggaccggaggtccgcctgtccatccgtgtcaagatggcgctgtacatgctggccatcttcctttccatgctcctgatcatgaacttcttcatcgcccaaaacatttcccagggcaacgagcgctacatcaacgacgatctggtcacgatgaagaacaacggcctgatctacgtcaagcagatgctcgtcctaaaccagcagaacaacaacgaggagggctttgccgccatcgcccaggacctcgtggaggagatctccggcgcgacgggcaaccccacggccgccttcaccatggatgggcagatgctcgccgcgaccaattccgcggtcttcatcgagaacaacttcggcgacgtcagccttgcgcgcggcggcctttccgccttcaccctggacacggagtcgcagcggacgcgcgcctacttctcctaccccgtcctcatcgagggcaacagcatcggcatgatccgcaccgtcgcggactacaccatcctctacacccagggaaacaacatcatgcgctccgtctccctcatcacgatggtgatctgctttgtctccctggtcatcgcggtgctctttgccagctccatcgcctcgcccatcatgaagctcgcgcgcatcagcgaggcgttgcaaaaggacgtcgagcagaacaagatcgacgtgggcaaggtcgtgcgcctggcgcgctccaagcggcgggacgagctgggcatcctctcgcgcaacttcgccgagatgatctaccgcatcgaccagcagatgaagaccatcaacaccgacaaatacgagctcaagcgcctttcggaataccgaaaggtcttctacgacaacgtcacccacgagctcaagaccccgctgaccagcatccgcggctatgccgaggtgctgcaggagaacggctttaccgacaaggagttctttgacaagggcatctcgcacatcctcagcgagagcgaccgcatgtaccacatggtggtgacgc

SEQ ID NO: 314 - DNA, 3641 bp, Unknown
  16S sequences of unknown bacteria
atacgcgaaggccgcggggaagctcatagttgctgttttcgatgtagggctcggtgcggataccgccgtcatcgttggcggtgctcatgtcgccgaagttccattctccgagaggcataaaaggattgtcctcgctgtacaccctcatattgagagctctgtaatcggcaaatcctctggtccaaagacgggcttcgcccaccacttttccggaaacggtctgaccttcgatctcggtgggaatggcaagatctccccttacgacaaagtagcggacaccgtcgtccgaataacggaaattgccctcgtcaagcttttcctgaagctgcttgccggtcaggcagatttcgacgcaatagtcgtaatcctgcagataaaagtcggcgataagggcgttttggttttcgttgggggtaacgccgctgtagtcgagctcaacctcaaaggtgtaggtctcgccggcaatcacgtccacaagcccgccggagggcataccgtaaattccgtatccctgccagcccaccgatttccggcggacaagcacggcatgatcggcgtcggaagtaagtccgttgccggcaaagtcggagaactcggccgctccccaggtcttgacgtttacgtagcttccgtcggccgaggcggcaatcgccatggagcaggccagcattgcaaccgcaagcacaaccgaaagcacttttttcattgttttcattctcttttcctccaattgtaaatcggccgaaccttaattcgaccattctcacgttaaattataccataatcatttgaaagtgcaagtatttttattgaatattattttgttttccgttttttggattgggtttttacattttttaaagaaaatcggcggtgcttgaccgaaaaatcaaagtatgatataattaaccgaatataactttcggggtgattttgtgtcggaatttgacaacatttacgaggggttgaacgccccatacagtctcgattcggagcaatcggtgctgggcgccgtgctgctcgatcccaactgcatgaacgacgaaaaggtggccgagcttaaacccgagcacttttatctgccccaacacaaagccattttcagcaccctttttgccatgtcgcagctcaacaagcccatggactttgtcaccattcttgaagagcttcgctcgtcgggaagctatgaacaggcgggcggaaaggaatatcttgcccagctggcacagcttgttccgtcggtggcaaacgtgcgttcctacgcccaggtggtttatgaaaaatttcttgttcgttcgctcataaaggtcggtcgggaaatagtgacatccgccaccgagggcaccgattcggcagagcttcagcttgacgccgccgagcagcggctttacgacataagaaaagggcaggaaaactccgaccttgtggtcatcaaggacattctcgccaccgagacactcgatcatctgaccgcactcgacgaccccgagcagcgtaaaaagcttgcgggaatccccacgggattttccgacgttgacgccatgatcggcggccttaacaaatccgatcttattatcgtcggagcccgtcccggcatgggcaaaacaagctttatattaaatctcgcccgcaacgccgccaagaccggcaaaagaattgcctttttctcgcttgaaatgtcgagagaccagcttgcccaaaggctcctttccctcgattcctcggtgggaataagcagactgagaaagggcggtcttacccccgacgaatgggaccgcatagctaccgcgacgggcgagctttacaatgcgaaaattttcgtcgacgaatcgtcggccataacggtccagcaaatcaaggccaaggttcgccgcaacaagcccgacgttgtttttatcgactatcttcagctgctcacccccgtgacaaaatccgacaaccgcgccgttcaggttcaggaaatgacgagagaccttaaaatcatggccaaagagcttgccattcccgttgtggtctgttcgcagctttcccgtgcgggaacggggcgcggcgtttcccacgtcccccagctttccgaccttcgtgagtcgggcgcaatcgagcaggacgccgacattgtcataatgcttcaccgccccggatattataaagacgggagcgagggcgaagaggtggacgaaaacgaggcacaggtcataatcgccaagcaccgccacggcgaaacaggcaccgtcaagatgtattgggacggcagatttgcccgttttgtcaccattgaaaagaacgaatacgatgaatattgattttcttgactcggttcgcaaaacaatttgcgaaaacggcatgataaaaaaaggcgataaggtggcggtcggattttccggcggagccgattccaccgcgctgctctacgccctttaccttttaaaggacgagctgggattttccctttgcgccgcccacataaaccacggaatacgcggaaaagaggccgaaagagacgaaaattttgcaagggatttctgcaaaaataaggacattccttttttctgtcttcacgccgacgtgccgtcccttgcaaggatgagaaagctttgccttgaggacgcggggcggcaggtcagatatgaatttttcgaaaagtgtgcggcagggggaaaaatcgccaccgcccacaccctgtcggacaacgtcgagacaatggtcatgcggctgtgccgcggctcgggtcttaaaggcatgtgcggaattcctcccgtcagggataacattatccgtccgctcataaactgctcaagagagcaggtggaggatttttgtcaacagaacggactcgagtttgtcaccgacagcacaaatctcgaatgcgattacggccgaaacagggttcgaaacaaaatcattccccttttaaaggatttaaatcccgaattcgaaagggcggtggggcgctttgccgactgtgcgagagccgacgaggagcttcttgaaaagctgaccgcaaaggcccttgagaggctcgtttcggaaaagggccttgacgcgaagggcgccgcagcacttgaaaaagggcttttgtttcgggttttaaaggaatatttgcgtcccttttcccccgaattttcccacatttgcgcggtgaaagacattctcggcggagggtcggcaaatctgcccggcggcaaaaaggccgtttgcgacggcaattatcttaccgtgacctcggcaaaaaggccgcaatttgacggtttttcaaaggagctttcgctgtctgaggggcaaacgcaaattttcgctttgggcaaaagcattgtgcttaaacctatcgaaaaaaacgaaatttcggaaataaacggttgccaaaaaattaacaatctgttatcatatactttgcttgaccgtgataaaataggcaaaacggttgttgtgagaaccagacttccgggagaccgcattaccctttcaaagcggggctgcacaaagaccctcaaaaagctttggaacgaaaaaggctttgatcaagagcttcgcgaccgctttttgatcatcgaatccgacggacggctcgttttttccgagcccgacggccggcattttcttcggactgatgtttggtttgggaggtttgggctctgctttct

SEQ ID NO: 315 - DNA, 3736 bp, Unknown
  16S sequences of unknown bacteria
ggtaggttccgagctgctcgagctgctcgggggtagcctttcccgctcgttccagggcgaccaggcggtcgaactcctcttttgcgagggtgcccccctgtgcgccggtggcctgtggggcgttggcgcggtactggggaagcacgtgcgcgcagaactgcttggcggccttgtaccagatgtagagccattccccgaccgggttgccctgcatctccttgtagatcgaccacacgtaccagtaccagccgacgacggcggtgcagcccaggcagtgacggacctcctcggcggtggcctcgcgcccaaagtagatgctcacgagcgactctgcctgctcgatggagtagcccgagccctgcgagacgaagttgcccaggtcgcagccgtagtcgcccatggcagcgtactcccagtcgatgagctgcatctcgtcgcccttgacgagcaggttgggcccgtagaagtcgttgtggcagagcacgggcgcacccgcctcgagctcgaggtaggaggcgagcgcgtcgatctcttgggcaaggctgtcaaagtcgcgcgggagcgggtacgacgcgtccttgaggagctcgacgatgtgctttccctcgtcgtggaagtcgaacgaccacggcgacacctcgccgctcgtgtgcagcgtgcgcaggatctgcatcgcctgcttgacgtgcgcggggttgtagtagtcgaactcctcgcacccggggatgtaggcggagatcttccagccctcctcggggtcctcgtacacgtaggtctcgtctaacgagagcttcttggcgatcccgagggcgtgcgcctctgccctgcggttgacgatttcctccgtgccgacgcccgggtggcggtagatgtactgcttgcccttgcacgagaacagcaccgagaggttggtcagtcccgccttgaccggctccacgcccgtgatgtccgagcgcttgcattcgagcgccttgcagatgttctccaagatgcgcgagtcgacgttctcgaagaagtcggcatcgaagctggccaggtcctgcacgtagttgaactcgtgcatgacgcctttgggcaggatgcgggcgcgcagggagaactcgtcgaggtgttcggcgaggatgtcgtcccagagcttgggtgcggtttcgggctggtcgtactcgtcttctatgtgggcgatcagacgcgcggcgtcgtctttcgtgaagtgcgccggaccgcgcatctcgtagtgcccggtgccggtcttcgacatctccgagacctgtccggtccggctgctcttcaagatgtagcggtcgtcggggccgcctttcttaacgcatgtgacccaggtcccgtaggagtaggggctgaagacgttcttctcgaagtagaggtccgaagagcacaggtaggtgttgccgaaggagtttttgacggcgagcagcgaggagtggttgttacgcttggaatagtcgttgctgacggcgatcttcacgccgaacttgtcctcgaggtagaagaacgattccttcatgtagccgacgaccacggtgatgtcatcgatgcccgcctccttgagctggcggatgaggcgttcgatgagaatctcgccctggacttcgaacagagccttgggcttctcgaacgagagcggggcaaacctcgtggccatgcccgcggcgaggatgatggcgttgtcgacgcgatagggctcgagcgcggcgattccggcgctcgtgggcgcggcgctgctgttgagcaggcccttttcctggagcgaggcgacggccttgttcaccgatccaaccgagatgcccgccttggcggcgatgtcgcgctgggtcgacttgcctgcggcgctgtttgcgagaacctggaactcgtagaagtcaatcattatttttcacattcgtgtcacgaaaagtttacatgttcatgaacacggcattatacgcatttgtgagcacaatggcaaaaactgacacgaggggccgtgggtatcgtgccattttggaccaaagggacaccccggcctgtcccctcggttcacgaaggcgctgccggtgacagaccggagagctcctgaccatatgcatgacaggccggagagctattggccaaaaatggtcagagcctagccggtctgtcacgtatatggccaatgccttgccggtttgtcgcgtacgccgcacgtccgacacgtgcaggacgtcccgcctaacacccaaaacccttgtttaaaaccaagggtaaaaatataatcaggagcaatcaaaactattggagcaagctaagagaaagcgccaccgaatgctcacgacaaaagaagcagcagagcgcctctccgtgtcacgcagccgtgtgctggagctgatcaagaacgggcagctctccgcgagaaaactttcgggcgtctggctcgtcgacgaagattcggtcgaagagcggatgcgaaacgtcaacaagaagggcggacggccaaaggcgggtgcgggcaaaaacgaggtccgcttcaccctgatgaaccggacgcacgaggtcgcagaccttgtctacgacgagaaaaagctcgagttcacccacatcggcgacgcctctgacgcccttcgtgctcccatcgggctcgcggatgcttccgggaccatcgcccttgccgacttcaacgcatggtggcgcaaccgcggcatcccccgcacgcggagcggccttgccagcctcctgcgcgaggccggcacgtgcgttcccgaggagctgctgtaccggaatctcggcttgtcgctgtcggaccaatactggattcgcccgtgcggctcggggcttgcttggaaagacgtcaacttcttcggaaacgacttcgagcaggtcgatgcggcgactgcgggctttgttggtgcagcatcggctcttcgcgcgcatcccgacaacacctccgacggcaatctcgagaagaggtgggtgattcgcgacggggtgcgcatgctgcgaaaggcggggcttcgaaattcgcaggagccgttcaacgaggtcgttgccacggcgctcttccgccggctgctcgcggaaggggagtacgtgcgctattcgctcgacgaagaagatccgggccctgcctgcctgtgcgagaacttcctctccgacgaagaggagtacgtcccagcgctgtatgtgatgcgcgctttgccgcagagcggttctacgccggatttcgaccattacctcgcgtgctgcgaggcgctgggagccgggggcgccaggggagagctcgagcggatgatcgtctgcgacgatatcatggcgaacaccgaccggcatttccgcaacttcggcatcgtccgcaacgtcgagacgctcaaatgcagaccagtacccatattcgatacggggaccagcctctggtgcgacgttgagctcgcggcgctggagcgcggcgagacctccttcgagagcaagcagtttgagacgagccccgcgcggcagatgctcctcgtggaggacatgagctggttcgatcccgacgcgcttgaggggttcatcgacgaggcgatcgagatactctccggcgacgatgccatcgcgaacaggattccgtacgtccggaccgccttgcagcatcgtgtttcccggatgatcagcatcgcggaatggtcgtgaaaactggcacgaggggccgtgggtatcgtgccagtttggaccaaagggacacccggatgtgcggacaatttccgatacactctatcccgccgccgcc

SEQ ID NO: 316 - DNA, 13362 bp, Unknown
  16S sequences of unknown bacteria
tgaaaggcttgcgggaaggccgcgcggaagggcgagaaaaaggcctgcgggaaggccgtgcggaaggccgtgcggaaggccgtgcggaagggcgtgcggaagggcgtgcggaagggcgaatggcagaaaagcgggacaccgcgcgtgcgatgctgaaagggcatttgacggtagaacaggtgatgacgtttacgggcctttcgcgcgaggaagtggaaaagttggccggggaaaccggcgcgcaggagtagagcatattgtgctttgaggagttatgtttggcgtctttcaatatattgcggaaagagcgcgaagaaagaagcgccagtgtgagcgcattttgcggatggatttgttttgcgggccgccatagattttggcggttcgatttttgtgcaaaaaatttttagctgagagcgcggccggttctttttgccagagcgaaggcggccagacgggaagcggcggaagcgagcaggccgcaagcggcggcgtgccacagcgtccacgagcctaagagcaggatggccgcggcgcaagccgtttcgattcggaggatggcgcgcgatttgcgcacaagcgcggcgcgccggttttccagataggctttgtttttgtgcagcaccagcggcacggccagcaatgcggccagggaggcagccatgcagaccgcgtaagccacccgaggcaggcgaaccgagaacgacagcaggcataggcacagtccaagccacattgtaccaaagcattttccatgggaagcggcatggaaaccgcctccgttcgtttggttgagatagaagcaagcgatgatcacggcggcctcccaccagcggccccacacaaggccggtgagcagcagcgcgccggtgctggccaccgtgtacagggccagatccgcgccataggccagcacttcgcgatcttcttcttgggccgcgcctgtgcgaatccaccaatccaccaggcgttccacgcgcttaaacacagtagccgtcctccggcaaaggataggggatgacgagttttacatgaaattccctttcatcttttgaaggcgtaaactcgctgcgcccctccgcctgatacacgattttgcggacggtgcggatgcccacgccgtgcccggtgccctccttggtggtgaggaattcgcgccgcttgcggcgcaggctgccgggcaccatgctgttgtcgcaatagagatagaacatttcatacacgcgggcaaaccgcagcttcacatagcccttcatttgcgcgcgcagggccctttgcgccgctgtcgaggcattgtccagcaaatttgccagcgccgcgcaaaaatcgctggtatccatgggcggcgggcaattggaatcggattcgaattgaaactccacgcccgccttttgcatggatagcgcctttatggtgagcagtgcgtccacggcgaggcagccggtggaaaattggggcatggcgggcgcagaaccctgccatttttcccagaattgcccgctttcggccaggccgccctgctcgatcatggcgcgcatggtggcaatctggtttttggcgtcgtgccgccaggcgagcatttggtcgtacatttcctggatttccgcgttgtattggtgcgtgagctgcagggcgcgaagctcggattctgcctcttcctgtttttcggcataggtggagaggatttcgtacagcagcagcgaaaggaacaggcagaccagcaggcaggcgttggcgaggagaaagtgcaagcctgcttctggcaccacagagcggatggcaaagagttgatttatgatgaagacaaatatgccattgagcgccacgaagatgcccagcgccgtccaggagagtgggccattggagcgcggatggcgcgaaagcaaatagatcgccagcgcgagggcagcattgctcgccccgatataggcgagccgcatgcctgtgcgcgccatcaactcgggccaggtagcattccccgccgtcatgagcaatataagcacggcattggtgatgccgccaaatatggcagccagtacgagtgtccagaaaattttaaaataccacgcatcatccgaaagataaaacgcgtaggccattggcaataggaataccgccgtatcggtgaagggaagcgcaaaatagtggtgcgcagtgaaaaacagacccacggctgtaacgcatgctgcgtccgtcaggcgattcccccggcacacatgcacgtgccgccgcatgaaatacaccatcagcgccccttgaaataagttcacacaaatctcaaacaggatccattcatccattttgctccctctgatacagttcatcaaatttttggcagagatcagaatagtatttgcggcctacgggcaggtgcgtgccttccaccagcaccagctcattccggctcacgcggcggacatatagtaggtttgcggcataggcccggtggcaacgcgcgaggctgtgcacctgttccagcagctggggcagggtcatgcgcgggcgtacgatggctttggagatcgtttggtatatttgcagatagtgcccatccgccatggcgtagaggatgtctttatggcgcaggagcgcgcggctgcccatgctatccagcgcgatgctttccgcctgggtcactttccattgggccagcgccgtatccaggcattcgcgcagccgctcgtccgcaatgggcttggggagaaagcgcatcgcctgcacttcgtatccctggcaggaatattgcgcgtaattggagatgaaagcgatcatcacatggggattttgggcgcggatgcggcgcgccagctccatgccgctgatcccagtgcgcatttcgatatcgagcagcagcaggtcggctttcagcccattttcccattcccgcagcagcgcttctgctgaggaaacggcatgcatggcaatggcaatgcccgcctgctcggcccatcgcgcaatttgcctttgcaagccctggaggaagatgggctcatcatcgcacagggtgatgtgcacggttctccctcctttgatgtatttttgttaacaacactatactatggagttggaaatttttcaagggaacaaaaagttaaatatatttgcacgcacataatcttgtgttgtatatgcctgtagcgtgtcgtctgtgccaaacctctttacaaatggtattttatctctacaatacaagtataagccgttaggcattatagggtgggaggtgaagcggataaagcggctatggaagttcctggaacctcttctttgacgagttttgatattacagatgcattttatgcaaaaaacgatggagagtgaaggttttatgtaacccaaacatacaatggttatccggatggaaggcctatattctgttctgcgttcaacacagcaggaacggctaggacttcctattcaattaaaatgacctcgaacaattttaccgacaatgcagaatattatccaagtacatctattaacccaaatggtggtactccattttgtttgggagcacgtgcagatggaagtggaactgaagttggaagagtagagggacgctggcatccgtaatggataggtaaagcgcgcggtgctttttgcatcgcacgctcagcattaaatctaaggaggagtgtattaatatgaaaaagttcatatgcttcttgatgatagttgtgtattttagttgcaataatatatcgtctatggcagaagaagattttacattggatattgggaatgtacatatagatgctactataatgaattcgaagtctgtggctagtgaagtgcagattgaatatatgaaccaaatcaatatgcacgatgcaatggcgatgaacttggcggagtattatgattgcgcatatgagctgggatttgaagggggaaacttacaggctgatccgacggattggtcctattcatatatctttgataatggaaaacggttatcattaaacactggtccgctatttgatgtttcaacaatagattcggaatacgagtgcctgtttgccgatgccaataatattatagactatggtatggatacgttcgaatttgcattgccacaacatggtttggaacagggaatggaaattttgcacagtatgggattgaatatagatttgcatgcaagaaaaagtttctctgtcaatggagaacaatttcatgcaaagatagaagaactaaacgcgtactatcgggaaattggaaaggatactcattatgctttagaggaaaactataatccagaagcggaaatagcctatattatatgggtggagcaaacggttaatggattgccagtttcaggggcgtatcgttacggatcacgatggcgcaatacgtcatatattgtttttacacaacagggcatagagcattttcacctggatcatccgattgcaaacatggaaattggcgaagcacagccgctgatttcgcatgaggaagcggcggcagctttggcagaggattggaactatctgcttaacgtatatccattggatatcaaagaagtgcgactatgctatgttgcacaggatcccggcacaacgagtgatttgtttacgttagaggctgggttggtgcctgcatgggagttttcttcctattcatatgctgtaggggaagaaaatgtattgtatatagactattactatgtaaatgccattacgggcgaagtgattttataggttgtcatttgcggagaacagaaggtgaaattcatggcgggattttttatcagtgatttgcgccgtgccctggggagtgctggcttttttctcgcatgcctgattacgattttgatttgggtggttagcacgctggatttgctgcccattccggatgaaaccgtgcttacgatttacgagaatggcaatgttggacaaatgcagattttgatgcccgcagtcgccgcgctgccctatggtacggcgttcagcgatgaatggcgtagccgctatttccgcctgcaactgctgcggggcaatgttatagaatggttgctttccaaatttttggtggccattttgtgcggtgcgctggccgtgggttgtggagggattctttttgtgttgctcgtaagcttgtcgcacagcacgctgccacctgctgacatggcaacgaatataattgagaacattcgctccaatggacaggcaacttctttgctccgcgcggaaaatatttggctctatttgctggcgtgcaccggttttcgcatgcttgcagccatgatgtgggccggggtggcgctggcaatctccatttatgttcccagccgcttttatgccgtgctgagcccatttttgctgagtgttttgctgcgctccttctcggattgggtgggtattccttataattggcagctgaatgccattgtgcgcggggaaaccatgataaaagatgcgggacgcgcatatgcgttcgcattggcacggtatgggccctatattctgctgtgcgcgggggtttttctctggcatggtaaaaggagggtttgcaatgcgtaacactctgcgaaccatatttgcggtgtttgcatgcagcgcgcggaagcgcttgttgacgctgagagcccttttagcggcgttgtgtacattggcctttgtggaaacctttggtgcggcggctgtgcgtgaggcatgtgtggcgtttgacgaaacggtacctgtgctggggctgttcactgccctgatcgctagcccgttgcccgtgtgtttgctgtatggctgctggctcatgttgatttgtgatgcgccgtttatcgatgaggaacagccctatctcttgttgcgcagcggccgctatgcgtggtctgtagggcagatattgtatattttttttgccgcgctggtattttggctgtggatagcattggcaaccgttttgctgagcctgtcgaatgcgcaatttggcgatgaatgggggcggctatacacttctgtcgctcgtggtttgcaggcagggagctattttccgccgatatcgtcggctgtgatcgcgcgatacacgcctggcgaagcatttttccttctctttggactgcaatatagcgtgacggttctatttgcgctaagtgtatatgcagtaaatttgcttagcaaacgccactatggcgtgctgatcccagcggcctttttgctaattcattggattttctatttctggtttccgcctgcatatctcattcgcttttcgctgctgacattgacaatgctggacatcttcgatccgataggagtgagccggtatccatcggccagatatacgatagggctgctggcgacttccctcggcgtactggtcgtgatttgcgtgggtgcgatgtaccggcgggcaatttatacacaaccgccattataaggagtgaaagagaagcatggtatcatcaattttgatcgaaaatgtgtctaaaagttttggagagaacgctgtgctgaaaaatgtgagcgcgacattcactggaggaaaaatctacggcattgtgggacgcaatggttcgggaaaaacggtgttgatgaaattgatttgtggctttttgcccatggatgcagggaaaatcactgtaaatggtaaggcgttgtcgcatggggctgccattcccaaagggatcggcgcaattattgaagcgccgggctttttgccgcaatacagcggatacaaaaacctgcggtttttggcggatatccagcgcaagattggccgcgatgaaatccgcctggccatgaaacaggtgggattgaacccggacatgcgcaagcgggtggggacatattcgctgggcatgcggcagcggctggggctggcgcaggcaatcatggaagacccgcccattttgctgctggatgagccgatgaatgggctggacgaggcgggtatccaattcgtgcgagaacttttgcagcgattgcgcaaccatggcaagctcatcctcatggcctcgcatatgaaggaagatttggacttgctctgcgatgaaatttatcgcgtgcatgagggaagtctgttcccgcaatgttaaatttgaaatgaggcgtaaaattttgtttgaaaagggcctgttcaaacgtttatataaatagaggtggttataaaagccgctgtgcgtcccgcggaaagcacggcggctgtgcccaacccattttttaccagcgctttggccgaagcgcacgcctttgaccggccgtatccatttcattttcgctttgtgatattgggatatatagagaattgtggaagcctttatagggaggggatggcgtcatgaaaacttggctttgttttttgctaacctacattcttttcgcctgtgcgtcatccgcctgcgcacagggcgcgttgctatatgacgatgccctgctggaaacgccggatgcggggccggtttgctcatatcgcgtggaataccatgcgtgggatgcgcaaattctagcgagcgctttgctgggcgagggatatgcctttgagcgggaggacgcctttgggacgtggtatagcgccacaaaggaagcggaaaccaagctgctgggcatatacgcgagcgatccggcggatgaagagagcagcggcctgaagggcggctttacttttggggttcagcgggaaggaatctcttgcgcccgcgccttgagtgtttttaccagtttgcagccggtgccgcaaccggaacgggcatggatggatgtggaaaacctggcgttcgccgcggcggatgccgtgcaggcgaaagccgaagaactttttgcgcagttgggctttccggatatggttctttccaatctatatgcctgcacgcgggaggaaatccaggaagaaatccatgcggccagggatgatatgggctatgcccaatacgcgcagcaaatccccgagtgctatattctgttttaccggcaggcgatggacggcattgcgctcaacgatgtggcaagaaccgataaggcgcgctcgcggaacgacgcgctggagacgtatgtcgccctgattgtgagcgaaaacggcgtggaaagcatggaagcgttttccctatacgatgtcgttgagcaaagcgaacctgcggatacgctctcttgcgcggaggcgctggccgtgctggagcgggatttgagcaagggaatcgtgcaaaatccgctatccatcgtagaggcggaactggtgctgtatgccacgggaaatgcgctcgatgggatatggttgcggcccatatgggtttttacagccgctgaaggggaagcggattttgcctgctatctgatcgacgcgcataccggtgaaatctataagtgaggcgattctatgagccagagtacggcattctggcgaatcttatgggtggacgtgcgacgcggttttcgctccccgggattctggctggctccaccattgatttttgcggccatggccattgccacaagcggaaaaaccaattccattgatctcatcaatttgctggcggtgggggtatttggtagcggcacttttttgctgaccctttgcattctgccggtattgccctattcgatggcgtatgccgctgatcatcgtgcgcaagccgtccggttgtggagcgtgcggatcggaattgcccgctatgcggttagcaaatttattgcggcagtcgccatgggaatgctggcatatatcctgggaatggcgctttttttggcggtttcttccattggactgccgctgtttacggaaatgacggtagacgacggctatgcttgcctgctggcggaagggcggcccatagcctatttgctgtgttttgttttgcactatgccttttcagcgggattgtttgctggatgcgcgctgtttttcagcgcctgcattccaaacgcgtttgcggcgatggtgctgcccatcctttgctattttgtgtatttgcgcatatgcaatttcgtggcggttccggaggctgtttccgcggtggaattggtgcaaagcatttacgcagcggggtctcccgtgcaaacgctctttaccaaggcgggcgccgtgctggcgattctggcggtgctgtgcttcctgtcggtgattttgataaggaggcgggtatttcatgaatagattccggcgcattgctctgtgcgccatggtgaatttgcgcaagtggagaaccgatgggcggatttttctgattctgctctgcgtcctcgctttttcactgtggaacctgggaggcattcgggattttgccagcgacaattccctaccggtaacggcgtgggtgtttccgcacttttggggaaatcccagcatgctgttgctgtttggcagcatggtggtgctcttgttttgcgacgcgccatttgttgacgcgcagatggcccaatggattgtgcggatggggcgaatggactggctgatcggccaaattctctatattgccacggcttcgctgctgtttaccctatggacgtttctttcgacggttttggcgctgcttccatccatttcgtttgaaaatgcctggggcccggttttgtataccattgccatgcaaacgggcgtggcggtggaatacaacatcgtcctctccctgtcggaggcatggctcgatgcaatggcgcctttgcaagccgtggccatcagcctttttatgatgtggctggtgtgcatgttcatgggaatgctgattttggcctccaacattgccataaacaggcgcgcgggatttgtgacagggggcttttttgccttcctggcgtactttacggcgtatcttggattcgttctgtttggcgcgaaggtgctgtgggtttcgccggtcagttgggtaagcctatattcgctgaattggctgggcgatgcgcagacacccaatccctatggggcaattgccatgctgattgtggccattatgggatttggcgctctttccgctatcgttttcaacaggcgcgatctggatattcggcaggagggggtgctttcatgaacgacacccatgtaagcgtgcagcaggcgagcaaggcattcaaagaagtatgtgcattgcgttgtgtggacgccagctttgagcgcggcaaaatccatggaatcattgggcggaatggctcgggcaagaccgtgttgctcaagtgcatatgcgggtttatgcggctttcttccgggcggattctcatcgatggccagccggtgaaaccagccgcgccgcagaacatcggcgtgatcattgaaacgccgggttttatcggttcgttgagcgggtatcagaatctatcctatctggcctccctgaaaggcgttattggaaaagaggatattgagcgcgttttgcaatgcgtggggctggatcctgcgatgaaaaaggcggtaaggaagtattcgctgggcatgcggcaacggttgggcattgcccaggcgattatggagcgtccgcccttgctggtgttcgatgaacccatgaacgggctggacaaccggggcgtggaagatatgcgggcgctgtttcacagcctgcgggaagagggaaaaaccatcctgctggcgagccacaatccgctggacatcgatgggctgtgcgacacggtgtgcgaaatggacgcgggcgttttgcgacgcgtgcgataacaggatagatcattgtagagggctggcggcggcgcagcccttttgttttggggctggcgcggcaaaagctcttctcaacctttatgatgcaattctgatgcaagcagtgggtatactggtggccaatggcaaagcgccaaaaaggcggaaaaaaggaggcgaagagaatgaagagaagaatccttgctgctttgtgcctgtgcgcgctgttttctctgtgcgcggcggcggaaacggaggcagacggcctgtactcgcgcgtggaacccatttttgcggacgcgtttttcgaagaggtgggcaatgtcctgtttagccagagctcggcagtggcgggcaactgcgtagtgtcgctgaagatgaatggcgatgtttatgtgtacgatgccgcaacagaggaatatagcctgctgtgcagcgtacccgttgtgccacaggggacagacgcgccatatgagcaattggacgcggtgacgcgctcgctggctggtgaggcagtgtaccagttgattggctccgcggattcggacatagtttatgggtattgcccgatttcggggaaaatcggcctcctcacggaaacggggatcgcctggcgggatgtggcattggacaattccgtgcagatgaaccggggctgggcatatccttatgatttgctgtatccctatgtagagggagaaattttgtacgcatattatgatgttgcacaggatcaggaagaatacgatggcacagcttcgccgcaggggcgattgttgatgttcgatttgcaaaccggcgcgtgcgaagtgcgggaattggcagacacgtatgcattttgccgctatgaggaagggacgctgctgttgctccaaaaaggagaggaccattctttgtgccttgccagctatgcgctggatacgggcgaaatgaaagaaatccctctctcggttcccgtgacgctggatgcggaacattccacgggattgctggaagttacagaacaaattgcggggcttgcttatgacgcggcgcaccggcgcatcgtattcgctgacgcggatgggctatggtgcagcgtggatggggcaccctttgcccgagtgctgccggaagaaaccggctggatggggctcagcgcaaccacacaggcgtggatgctggaaaatggcgtgtattatttgcgggccggtttttcctatttggcacaatagcaaaaaggagggggtgacggtatgaagcggaaacttgccgcgttgtgcgcggcgctgatttgcctggcgggttttgccgccgcagaagaatccatggagccagtcagcgcgctcacgatcaccggcggcatgccctatgaacacgtgttggcctatcaggcgcaataccccggggcagcggtggaatttgccgaagtgttgagcgcggaggaaatcgctcagcgcatggtatcgcaggatggcgctatcgatctctacgtggtggaggcggattatacctttcatttgctcaaggaaaagggctatgtcgcgccgctttcttcgcaggccattgccgaggccgtggcggcgatggacgaaaccatccgcgccgttctgtgtgatggggcagggcaagtcgtcgcctggccggaatccatctatattcagtattatggcatcaatgagggatattggaacatgctttggccggatgtgccgctgccacagaccttcggcgaggtgctggaggcctggatcgattgggaacgcaattgccagcaggattttcagggcgtggggtttatgggcgccaatttcgattacgcgaattgggtggaacggctcgtgcgcgcctatgtgatgcacagcggcaatcctttgccggatatggacgcccccgcgctgaaggatgctttggaacaattgcgcgaaatttatgaaatccgcctgtccctgggccgcacgacgacccgggaggaagtggatccgttgctcgtgaacgacagcgaaaccgggccgggcgcggtgttcagcatgccccgcttcgaggccatgcacagctttgatgccacgccagtgacgaacagcgcggaaattctctatggcgtgcccaagaacggcatgacctggctgcccatgcgctttaccgcggagcagacgccgcggacgcacgcacaaatgcgggtgtatattgtgaatccctattcccagaatcgcgaacaggccatggcgtatttggcatgcgtggcgcagcgggaaacggacgtgcggctgtattgcgctctgcacccagaggcgacggaaccctgcgaaaaaccgggctatgcggcccagcgcgaggaatatgaacagatgtcagagctctatgcgcaggccatagaggaggcgcaggcggcgggggaagacccctacgagctggaagtgaagctggcgtactaccaggaatggctgcaaaacgacaacaaccgctatctgctttcggccaacaccatccgccaatactgggccaccctggcggaagcgccgctggatttccatttggactcgccgtatctgggggccatggataccggcgcgagcggcatcctgacggatgcctgcgagcgctacgcggccggaaacctggggctggacgccttcctgcgggagctggaaacgcggatggaaatggcccaccgggaaaatcttacctgacccagccgcccgaatggtcgttggcgaaaaatgaaattttgccaatgttaaatttaggttgcgtctacacgagtcaagtgatataatggcactatcacagtaaagagggtgtcatcat

SEQ ID NO: 317 - DNA, 3485 bp, Unknown
  16S sequences of unknown bacteria
atcattgcttgttcaccttttcacaataggtgacattttcccttaacgttaacaccgaaaaaaaaaaagcaggtcaagcaacatttacgctgagctttatccttaggcaaaatcaatgtaagcggttactttttctgttgacttttggaatcttgcggaatatgatgaagacaaagctgttatgccatcgaagaaaggatgtgatatacatggcagaaaaacagtatcttctgggcagcgatgaacagcaagcgtggatgcgcgactacttctttgcgccaagagggatcggcttcactgagccgggcacggtcggactcgacagtgcagaattcagtgcatataatgtggcaaaatcattctatcagaactatccggaggtcttcaacatcgcgatgatccaggaaaagaccgatctggcggcagaagagatcaccaagcgcctcaagcgcatgtatgacgagcatctcatcatgttcgtcatgaacccggcagtcgccgtatatggctggggactgtactattgggtggtcaagctgaaggatggcaccgatccgaaggtgaagcagcagctgagcgaatggttccagaataaagatgacatctgcaccggttatgagacaagcggtgacttcgattacttcaacggcaatcatatgcgcgtactggacaacctgctctatgatgtgatcggcccatggaaagatatggacgaagtggaatatgtgcacctttgtccgatccgccgtgacatccgcgaatcccatgtcaacatgtgggatgcgccaggagagggctatcggaaatatttgtggggtgaagagcagaaaaagaagatcctgaccttccaggatcgaatggatgccgcagacttcgccatcatcgacgccatcaacaactgcgaaagcgtcggcgacatgctcgattatgccgtgctcgagcggctgagcggactggacggcgggcagatgaagaaggacttcgtcgagatctgcgacaaacgccgcttcatcgtcccgatgatctacgtcaactacatgaagcttggcctgacgatgaaatgcttcctcgtccgcctgttccagaatgtgccaagctggcgcaaggcgcagatcgcagacgagctcagcacgaatagcaactttaacaacatctgggaattcagcgattccttctatgattatatgctgaccagctacaacgacatcacggatatcgacgcgctgcgcgcccttctggaaggctatgccgaagtggaagagatcaaggaggcagacagcgcccgtcagtttcgccgctgggtagccagactggatgagcagaatggatattgggaggaatgcgtcttcactgacgacttcctgcaagaccgcactcgcagcagcgatgtgaaatgctgcttttccaaggaggtgaaataagatgaaagtcgaacatgtacgtgattatgtggtagaacggcttccttatgccctgaatccaaggagcatcgccgtggtcggcgccagccgctacaccaccaaggtcggatacaaagtcatcgaagggctgaaaaactggggctatcagggaaagatctatccggtcaatccccgcacctcgatgatgcacggaatgaaagcttatccacgtgtctgcgatatccccgatgaagtcgatctcgtctttatcgccgtcccggcgcatatcgtcaaatccgtgctggaagactgtgtgaagaaggaagccaagatcgtcgtcatcgccaccagcgcattcaaagagatcggacgcggcgagctgcagaatgagctcacccagtattgccgcgaccacaagctgccgctgatcggccccaacctggtcggcatgggcagcccgtatctgaacttcaactgcggcttcatcccttacctgccgaagaaggggcctgtcgccatgatttcacagtccggcgccaacctgctggccgcgttaggcacatcccagaaagaccatttcggcatgagcttcttcgtcggcctgggaaacaaggccgatgtggatttctgcgagttcatcgcttatgcggacaaagatgaacacacgaagtgtgtctcggtctatatcgaaggcctggattctccggaagcctttgtggaagcctgccgcgcggtgaataaaccgatcgtcgccatcaaggtcggcggcagcaagatcggcgtcaaggcagcctttgcccacaccgccagcgaaaacccgaatgccgacagcttctatgatgagatcttccgagaggccggcgccatccgcgcgacgacatggcagcagttcctcgatatctctctggcgctgggcatgcagccgccgttaaagggagacaatatcgtcatgatcaccaacggcggcggaagcgggctgctcagctgcgatcacttcgagcgctgcgggctgccgctgcatgagctcgccgagatctcgccgaatctcgcacagcgcatccgcgcttacatgccgatgttcggctcgccgctcaacccggtcgatatcagcggaacggcgacgccgatccagtacaaaggcgcatttacgcaggccatgcgcgatccgaatgtcgatggcatcctcggttccatctgcccgactgccgtcactgacgtagacgctgtcgtcgacgtggtcatcgcgatccatgacacatacaagcatctgggcaagccgttcatcatggaatgccagggcggagaagaatgccagaacgccatcatgaagctgcgcgatcacggcattccggcttatgccactgccgagcaggcggtcaacgccatggtcgcactgcatcgatatgcgcagatccgtaagaacaaatcgacccaatgagcataaaagggacgtgccaggcacgcccctttttcatggcagcaggaccagcgtcttttcctgaagggcccgctcatgattgcatgcgcgcaacgcagcctcatccacatgatagcgggccgcgatgctcgcatacgtgtcctgagcccttgccaccgccagcctacacgtcgtatacggcgtcgcatcatcctcaaacagatcctcaaacgtatcgctgagcacgtctgcttcctcatcctcctggacgagcgcacgctcttccggctcttcctcctgcgcttgcggcacagcctgcgcggctggtccttcttcctgctcttccttgatcccgctgatctgcagttcgatcaccacatcgatctgagtgccctgcggctgagcctgcacttcgccgatatcgatgtgaaactcctcttcgctcagcttttccgccggagcgaagacatccatgtcgatcagctcgcggatcatcaccgggctgccttccgcatctgaatagctcccgatcagataaagcggaccgatagcgcggatgccgtcttcttcctttttatactgcaggccttcagaaacggtcagcttttcgatgctgctgacctctcggtccatctgcagctgcttttcgatgttcatcgtcttcatct

SEQ ID NO: 318 - DNA, 2783 bp, Unknown
  16S sequences of unknown bacteria
cacgaaagccagatgaaactcgcattcccccagattatagggctctgttcttccatagagttccgtaagctccagcgtgaaatccgacgtcccgtcgcccagatagacgagttttgcattggacagctctttcgtgcgcaccggcttcagccccagcgcctcctcgtaaaattggagacttcgtttcaaatcgagaacattaaaattaaagtgagcgaatcgaaccatatcttcctctcttcctttctctgtacataacacagcgccggagatctcccgcctcttccggaaaacgccggaagacaatttcccggactttcgcgaaaatcacatcccgctcaggcccaaaatgcccgcacgatacggaaagcatcaccacggtctgcggtctgcccgaacgcactatccgaattccgctccggcagaatgagacacggcatcacttcccgatgaactccactaccgcaaagaccttatcgtcttcggagcggagaacgacggtatagacgccgccgttttcaaaaacctccggaacaattatgtcgtccagcaccgccggatgcttgtattccgctctcatctgagcgatctgcagaccgtcgggaaggcattctgcggcgatgagcacatactgcccgttatttacgtgattattcgtatcaagatgatgcttcatcacgagtacagaagcctctttgcggccctttccttcggtcctgatttttcgcggcgcatattccatatccagacgttccgaaaattgatatgcttcatgctccgactgcggcacgcgtacggcgcgcccgttggacgtatccgtatagacccagatggaattcgcccaggcaagccgattgccgttttcgtccgtcataagaaagttacggtctccgaagacatttcgaaaatcataaggccaggtggaaatcgtcaccgtttctccaaatgagggataacggtctacgacgatctgccaggaagacagaaaccaggctctgttttcccgatcgagaacgcggaaatctctgcccaccgcctctgagttaaaaatactggcgtcctgaaaataatcgagaagagacaacatcgtcagattgtaatcggcccctacttcgctgtatcggattctgctgttaaatgaatatctcatgtggcgctcacactttcttacgcttcatcgacaaatttttcaatcgaagctttcggctgtgctccgatcgttttgtgaacgacttctccgtcttttacgacgaccagcataggaatactcatcacctgaaatttttttgccagttcggactgctcgtccacgttgaccttgcatactttgatatcagaacgctctgcggcgatttcttccagcgccggtgcgatcattctgcagggaccgcaccacgccgcccaaaaatcgatgagaacctttttatcgctttttgccacttcctgctcataattttcagctgtcaaatttataatactcataatataaaccgcctttcctccgtatcggattttcgcctgcagacgcgatcatcgtttaaagtaactcgcatactctgacttaattaattcccgtttcctgacaaaactaacataaaatctgtcttacagcattcggcagaagagacgagtttctgtatcgggaaacgacatatctgcaactgcttatatcgttctattatacacacttttaccagcgatagaaatctcattttttacattcggtcggttgacagggataaagcgccgacatatactgcacttgaatacataagtctctttttccgacctgtcgttcataagcgcgccggcagcgaataaaatgtagacaggagggttacaaatgacaatatttctgatcgttttgggtacgatcttcatcgccgagatgggtgataaaactcagctccttctcgtagccatggccagtaaatataagatttcacaaatactcgcaggcacatggctggccacgatcctgctcaatatactcgccgtcttcgtaggcgccgctctgagtcagtatctggatatgaggatcataaaaatcatcgcgggattcgcctttttctggttcgcctgcgccgctcttacagacagcggacaagaggaggaaaattattcgggacgcggccggttcgggcctgtccttgcgattttcggttccttctttctcggagagctgggagacaaaacacagctttccgccatcacactggccgcctcttacacgcagcacagcttttccaacgccgccgcagtatttgccggatgcactctgggactgatcctggcggactttatcggtctgatcgccggtctctttctcagaagcaaaatgcctaccggcattctcagcaaaatttccttcctgatcttcgccgcctttggcgcggtgagcatctgggacgcctcccgtctcatcttcgtctccggaccggggattattctattcgcgggagccgtctatcttctcttcgttctggtctgtatctgtctctacacggcagaaaagaaaaagcgcttttaaccatccgggaaaccataattttatcaaaagaaaatttcgggatatccctgcatcgcaaaaagtggttttgcgatgcagggatatcttcctgaaaaagaaaaccttccgataatctgaagccagatgacggaaggttttcgttttttctgccgatacagttcattttcgccgtcaggcagaaagatccgccggatctcgcattatccggcagtcagaataaaaaccggacggaacccgccgttctcagaggcgg

SEQ ID NO: 319 - DNA, 6118 bp, Unknown
  16S sequences of unknown bacteria
tccctctattcgttcggtttttccgaacgaattctgtcgttatgcataacgaaatttgcatttgtaaatttattttggctatttcatgcttctccaccgccattcagagataccggctggaatttcaccaatcgtctcttgacagataaacccgactgcttttataatagtaagaaggtttttctgtcaaatgcccccggacgctgcatgccaccgcgctattctgcggccaaaggcctgtccggcgacattccggcaaacaggagggctttatgcgcatattcgtcatcaaccccggcgccacttcgacgaagatcgctattttcgaagaagagaccgccgttttttccaaaaccatcacccacgacgcagacgcgctggcgcccttttcccaggtgctggaccaggtagaataccggctggcgctgatccgccaggcgttagaggagagcggcttctgcttgcaggatcttgacgccatctgcgcccggggcgggctgctgcgccatatccccgccgggacctaccggatcaccgaccgggtcctggcggatatttaccatccgccctacggagaacacgcagcgaaccttggcgtcgtgctagccgatcggctggcacgcccggcagggctgcctgcgtttttcgtcgaccccgtcagcgtggacgagctgtcgggcttggcgcgtatctccggctgcgccgggatggagcgggagagcttttttcacgcactgaatcaaaaatgcgccgcccgcaaggccgcgcagcagctgggaaagccctatgaggatctgcggctcatcgtcgcccatctgggcggcggcgtctccgtcgcagcccatgaccatggccgcgtgatcgacaactataatgtcaaggacgatggcgccatggggatggatcggggcggtgcgctgccggtgagcgcggtcgtgaagctctgcttctctggccttacccgggcggaggtgcaggcaaagctgggcagtggggccggtgtcttctcctacctcggcacgcgggacctgcgcctggtcgagcgccgcgcttttcaagaagcagatgcccaggcgctgcagatcttccaggccctggcctaccagttggccaaggacatcggcgctatggccgctgttctgcgctatcaggtcgacgccatcgtctacaccggcggcatggcccacagcgaccgcctgtgccgggagatcagcagctatgtcggccccctcgcgccggtgctgcgctttcctggggagtttgagatgcaggcgctggcggcaggcgcgctgcgtgtcctgtatgggcagcctgcactggactattgcccttagccatttggaggtacccctatgtatatccaatccttctataaactgctctccgttgcctcaagcctgaagggagagcacaccatggccgtcgtccgggctgacgacgaggacgtgctcgacgccgtcgtcgacgcccaggaggcccatatggcccgctccattttgattggcgacacggcgaagatccagcgcatcctggaaaagcaccacatcgactggcaggattacaccattctccaggaggataatgacgtccgcgccgccaagcttggcgtccagctggtgcgccaaggcaaggccgatattttgatgaagggtctcatcggcaccggcacactgatgcgcgaggtcgtctctccggagcgggggatccgcaccggcgcgctgctctcgcacctgatgttttatgagcccgccgggtacaagctcctgtgcgtgaccgacggcggcatcaataccttcccggacctggaaaagaaaaagcagatcctcgcccacgcagcccgggtctttcagaaatttaaccacgatcatatcaccgctgcctgcatctgcggcgcggagacggtcaatcccaagatcgcctcgacggtagacgcccaggcgctgagcgccatgaacgagcactggcagcgcatgtatcatatgacggtctacggtccggtcgggctggacctggccatatctaaggccgccgtcgcccacaagcattaccccgccgcctacgcgggggacgcggacatcctcctcgtccccaattacgaggtcggcaatgccattggcaaagccatgagcgtctttgcccacgccagaaatgccggcgttgtcgtcggcgcccaggcgcctatcgccctggtctcccgcagcgacagtgtcgagagccgtctcaactccatcgccctgtgctgcctgctggcggaacaagaaccaacacaaccggaacaaaacgtttagagaatagaaaggtggaacaccccatgaagcatcttatgtccggcaatgaggccgctgcccgcggcgcttatgaggctggcgtcaaggtatgctcggcataccccgggacgcccagcacggaaatcttcgaaaacctgccccagtacggcgacgcgctgtactgcgagtgggcccccaatgaaaaagtcgctgcagagatgacctacggcgcgtccctgggcggcgtccgcagcctgtgcgccatgaagcatgtcggcgtcaacgtcgcagcggacccgatctttaccgcggcctataacggtgtcggcaagggctatgtcatcgtctcagcggacgatccctccctccactccagccagaatgagcaggacaaccgccactatgccaaggcggcgaagcttgtcatgctggagccgtcggattcccaggagtgcaaggactttatgaaggccgccttcgatctctcggagcggtttgatctccctgtcctcttccgcacgacgacccgtgtctgtcattccaagagcctggtggaattcggtgagcacgaagagcacgattatccccccttccagcgggatatccgccaccgggtctgtaccccggccaatgcgtacttaaaccatccgctgttggagcagaagctcaaggatctggaagcctacggcaacacctgtccctttaataaggtcgagatggcaggcagcaagatcggcgtgattaccgcctccatcgcataccagtacgccaaggaggccttcccggaggacacctccttcctgaagctgggcctgacctaccccctgcccatggacctcatccgcgactttgcttctaaggttgagacgctctatgtcatcgaagagctggacagctttatggaagacgagatcaaggccgccggcatcgcttgcatcggcaaggagctgaccggccgcctgtatgagctcaacccgcagctgctgaaggagcgcatcttcggccagaagccggagacggtggacgtcggcgtcaaggccgtgccccgcgccccggcgctgtgccccggctgcccccacagaggcttcttctacaccatgggtaagcacaaggactatgtcgtctccggcgatatcggttgttacacgctgggctgcgccgcacccctgagcgcattggactcggtcgtctgcatgggcggcggctttaccgtcgccatgggtatgtctaaggcctttgagatggctggcgacaccagccacaaagtcttcggcgtcatgggcgactccaccttcttccactccggcatgaccggcgcagcggagattatctacaacaagggtaacgtcatccccgtcgtcttggataaccacatcaccggtatgaccggccaccaggataatcccggctccggctacacgctgcagggcgagatcgccgaccagattaagattgaaaaagtcctggaggcgtatggcttccagaatgtcattgtcgtagacccgcaggatctggccgccatgcagaaggctgtggacgacgccctggcctcgtccgtcccggcagccattgtctgccgccgcccctgcctgctcatcaagcgcatcaagcatgatatcggcaagtgcgtagtcgatacggacaagtgcatcggctgcaagaagtgcctaaaggtcggctgcccggcgctgatgatgcagggcaagaagtcccatattgatcccaccctctgcgtcggctgcaccgtctgcgcacaggtttgcccggtgggcgcgatttccagaaaggagaactgagatgaaccagacaaaaagtgttctgctggtcggcgttggcggccagggcgccattttggtggcgaagattctggtaaatggcctgatgcaggctggctatgatgtcaaaatgtccgaagtccacggcatgagccagcgcggcggctctgtctccacccaggtccactggggcgataaggtctactccccggtcatcggcaagggcgcggcagatatcatcgtcgcgtttgagaaaatggaagccgtccgctacgccgactttttaaagcccgacggcattgccgtcatcaacgactacgagatggcctcctcctccatcgcggccgggcagtttgcctaccccgagggctgcctggaagccatgcagcagcatttcaagacctatagcctgaatgccgcggacatcgccatgtccctgggcaatccgaagtgtatgaacgtcgtcctctttggcgcaatgacaaaggcgctggccatggaccatatcgactgggaggccgtcatcagtgcgacggtgccggaaaaattcatcgacctcaacctcaaggcgttccatgcaggctacgacgcagcccaataagcctaccccacgcgcaaaggaggatcccccattatgttgaaccaaaccatgtatcagctgggcgccgtccgttccggcatccgggagctatttgaatacggcctgcagcaggccgccctctgcggtaaggaaaatgtctttgactactccctgggcaatccgtccatcccggccccgccggaggtcaatgattcgatcgtggacattgcccgcaacgaggacacccttctcgtccatggctacacctccgcccccggctatgacggcatccgccaggccgtggcggacgatctgaaccgccgcttccaggcgggcgtccggccccagaatctgttcttcacctgcggcgccgccccggcgctcatcgccgtcctgcgggccctggccgtcccggacagcgaggtcatcgccattgctccgttcttcccggagtatcgccccttcgcggagacgaacggccataacttcgtcgtcgtcccgccggatatggcgcatttccagatcaattttgacgccctgacccagtgcctgaatccgcacacccaggccatcatcatcaactcccccaataacccctccggcgtcgtctacacccgccagaccttggaaaagctggcccgcctgctggaagagcgcagcacagcctacggccaccccatctatctcatcgccgacgagccctaccgggagctggtctacggcggcgtcgaggtcccgtttatcccaacgatctataaaaacaccgtcgtctgctactcctggtccaagtcgctgagcctgccgggcgagcgcatcgggtacgtctatgtccccgatgctgcagcagacagtcaggcgctctttgccgccgtcgccggggccagccgcgcctgcggccatgtctgcccgcccagcctgctgcagcgggtcgtcgcccggtgcgtccagctgccgccggacctcaaggcgtatgacgaaaaccgcacgctgctctataatgagctgacgaaaatgggctattctatggccaagcccgacggcgcgttctatctcttcatcaaggctcccaatggcgacgccgacgtcttctcggacctggcgaagaaaaagaacctcctcgtcgtccccggcaccagctttggctgcaaggaatacttccggatctgctactgcgtctcgaatgacatgatccgccgcagccttcccgccttccaggccatgtgggacgagacccacatataaaaatgctataaactgtccgccgttctgtctgtacagaacggcggacttatttcataagaaaaaccgcggcagagaccttgcttggtctttgccacggctttcgttttcattgaatctgttcttgcgcttagtacgcaacgccccagtagatcatctttttggcgggcttgccgcagatggggcagacatcgtccagatgctcctgctggaagggcatgcagcgggaggtcatcccggcttcttccttcatgcgg

SEQ ID NO: 320 - DNA, 4664 bp, Unknown
  16S sequences of unknown bacteria
aaaatgtgcaaaaatgcctgtgtagccagtgcttccgggtcatcctttggggtgagtggatgctgtaaatagtctttcatataagcaccgcttaatgactgattcaggtggatgccccggatcatcggaagcaacggctcatgggcgtcaaacatctgattcaggcagacaatcgcatcttccggtgtctgcagatggtaatgattattcataaaatgtcccgtatcaagcatgattcccttttttgcgtaatgcaccttggaaagcaaccggctagtgatgtctgcatcaagcatgttcaggccgggccaccagagattttccatcagaaaccagaacgggtaatcctgcccgtcaagcagttcattgataaatgccgccgccgcatccaccacctctgcatcactgtgccgcatttcatacgtcagggattccccatagctgacctgtgtcacatggaagaccacatattctgcctgcatacggcgggcatagtccagatccctccggtaatgagcaagtagcatctcctgatccagatccatccagtctgtgatacagcgcaggtggacgcctacgaccatatccttttcgaccagatgctgtggatcatcgccaagcggcatcacttccagtccggaaagcgaaaacgattcataaaagtggcgtagatctgcggcatttgcatagcggccaagatcatcctgatccatagaaaaattcatagagattttcatacccatttccccctcgtcatttacagatattccgtctgatatccatactccttacagtacgtatccacctttgatccctcatagcaacggatgaccgtaatcttattcgcaatatccgcgccgataaaatccgggtcatggtgaaattccagatatttgagcgtgttgcttccgtggaaagcatggtcaccgatataagtgactgagcgaggcaggacgacggacgtaaacgcacagcggaaaaatgccgcttctgcaataaattccagcgattccgggaacggctgatccgtgagcggacagaaataaaacgcctgcgtgccgaccttcttcagaccggagggaagatggaatgcgttcagtctcttgcagtcataaaaggcacggtcgccgatttctgccagcgtatccggaagcgtgatggaggagaggtgcctgcatttgtggaaggcgagcggttcgatccgttccagattgctgttttctgcaaaggttacgtttttcagcgccatatccccgacaaagagtgctcttggaagtacgcgaagactggccggaagcactgcggcgaacaggtcggagcattccgcaaaagcaccttcccccagttccagcaatccgtccgggaggatgatccgtttcaggtgcaggcaatgccggaacgcatgatgccggatgtatttcagggaatgcgggaaatagatggtctcgattttccggttttccgaaaatgcttccggcccgatctcggtcgcccacaccgggagtttcatatccttgcaggaataagaaggtgcgagctgccggttgatcgtgcgctgtacatggactactttggtagtattcatagataatccctttctgccacccgcttcttttccgaaaccgaaccgcaggtgtaatgattcacacactttcacaagccttccggaaaagcaagagaaagtaatagaataactgcaatttccgatgtaaagcggatattcgcaatccgcttcgcgatctgcgttcaaaattgagaaagaaaggagaataaagcgcattagacagaatatgtagtaattttgttcgaataaatccacaatattcagacaaaagcaaagacaatagcgaaaaatacttgacaaattcgcgggggggggtataatggaaagcaaggacacgtatcagggaatttatccgcgtgggtaggaagtcgggtgagaatcccgcacaggaacgctactgtgatgagcatatgctctaagtcaggtctgtctctggtacgtcgtgcacagaccctcgagctcagggtgcacggtatttcgcagtttggatgtactcctttgggtacgtcctttttttatccccgtaaatgattttcggggatgcgagaggacacgcgggagagagacccttacggccagctacagaatactcctagtacaagaggagaggagaaggcaggtgtgagcctgtcgaatggacgagctaacccattcaaatgcaactgagaacaaagaagatgattgccaaatggcagaaaggaaaatgagtatgaaaaacagaatgaaacagttatcagcacttgtattagcagcaactatggcgatgggaacctatacgtccgctttcgcagcagatatgaccgtatatctgcgcagcattggaaaggataagcctcagactcaggaactttcttttacagttcataatgtaaattccaatatgtctatttgtaatgcattaaggcaggcacctcagacagcaggaatgcttgatccaggggttacattagataccgcttggaatcaggtaactaattcggacaatactgaggactggtatttaacatatcttgccgcatcagattcacgcattaatgacagatatgaggcggggaataatggtggaaatactatcttatataaaaaggatggcgagacagttggtggatattacgaaggaaattcgtggatgtggtgtctaacagatggcaatttaaattccactgcttatccggctattactttgagtgatcagaaatgtaaggacagtaattttgctattattctgagctatgattattcttcctttgcatggggagatacgacgggaacacctgagaagcagtaaagaggaatagaagccatgaaaaagaaacaatgtatattattattgtcattttccctggtattttcaacgcttgctccatcaataatttatgcagaagaaaacgaaattcttactgatgaggtgttggagtcggatacgggagaaatatcagaatcatcagaatctgaatcgatggaaaataatacttctatatccattgattctattcaacaggtggagttggacacacctgttacgatggaagaacaagcagcagtgcaggaattagcagatgctgaggatgttgagtggaatgatctggttgactataatcttcgttaccgatatgtagataatgttctgtacgttgaattacttaataaaaatcaaccacagaaggctaccaatttcaatgttgataccgatagtccatggagaaacgccgaagcaaaaacagttacaaaaattgtgatagataatggtattgacaacataggcccatattggtttaatgcaggtacgacaacatattatgggaaattaacagaagttgttttaccatctactgttacaaaggtaggcgattatgcctttaatggagataaagcgctgcaggcgattaatctggagaatgtccaagaaattggtaaaggtgcgttccagatgaataaagctttgcttcagcttcagcttaattcagtgaagagtattggaaagtatgcgtttaatcagtgtacaacattaccgtatcttactcttggacagtcagatgttcaagttggtgaaggtgcatttatgagttgtagaaagctaaaaactatttgttacgctggaacaaaggatagctggtctgcaatttgtgcgagtgaaaatgatcgtttaaagcgagctacagctgttcattgcaaaggcgaagagacaaaacctaaagatgcaacttgtacagaagaaggttacgaaagcttgatctgtaccatttgcggtgactcctatgcaggcaatgtaatagaagcgctgggacatgactatgcggatgagtatatagtagatgtagccccgacctgtaccgagaaaggttttcagagtaagcactgcacacggtgtggtgaagctgatccggacagtgtagaagagctggcagcacttggccatgagtatgcagcagagtatacagtggatgtagcagcgacttgcacgacagcaggctcccagagcaggcactgtacaagatgtggcgaggcagatccggacagcgtacaggagatcccggcactcggccatgattatgtctccaaagtgacaaaggaagcgacctgtaccgaggatggtgtacagaccgatacctgtacccgctgtggcgatgtgaagacacagacgatcaaggcgaccgggcatcagtggagtgactggacaaagacagcagacgcgacagtcagcggtgcagagcagcagcagagaacctgcacggtctgcggcaccgtagagacaaaggatgtcggtgagaagctggctccgaccgcgaccgtcaatgcatcgaccgtcaccttaaaggcaaagcagtccacgaagggcctgaaggtcaccgggctggcaaagggcgattccgtggcaacatggaagtccaccaacacaaaggtatttaccgtaaagggcaatgcagatggcagctgtaccctgactggtaaaaagaagggcagcgcgaagctggagatcacactggcgagcggcctgacaaagaccgtgaccgtaaaggtacaaaagacagcggtcaagacaagtaaggtcaaagtggcagagaagaagctgacggtgaagaagggcgagaaagcatcc

SEQ ID NO: 321 - DNA, 2193 bp, Unknown
  16S sequences of unknown bacteria
gcggctctgcggcggcagcggcggccttcccctcgtcgccgagcaggtcgaggacgctcctgagatgacggttgaagtgcagtgccccaaaggcctcggtgaccttttccggctcgaagttgggaaacgccagcccgtccagatcgagctcgaagtcgaggtcgcgcacgatggttgcgatcttgcgcgagagaaacgcgaggtccttgttgtcgcgcaccttctcgagctgcttgcccttgaggtcgtcgaggtgctcgtagagcccctcgatgctgccgtacttctgcaggaacttggaagccgtcttggggccgacgcccggcacgccggggatgttgtcggcggcatcgcccatgagcccgaggtagtcgggaatttgctgcggcgtgacgccgtacttttcctcgacgccggctgggtcgtagatgacaacgtcggagatgccctttttcgtgttgacgatggaggtgagctcgcttgccagctggcaggcatccttatcgcccgtgacgagaagcgtccggtccccacgggcctcgtcgcgcgccgccacggtaccgaggatgtcgtcgccttcccagcccggcaccttgaccacgggaatgttcatggcctcgagcaacgactccacgagcgggaactgcacgcgcagggcctcgtccatgggcggacgctgcgccttgtactgctccatggcctcgatgcggaacttgggctttccggcatcgaacgcgcacacgatgccatcggggtccgcgacctcgataaacttgagcagcatggacatgaagccgaacgccgcgtttgtgggcgtgccgtcgggcgtgttcatgggcgtttgaacggcatggtaggcacggtgcatgagcgagtttccgtcgatgacggcgattttgcgattggccatatggcgagaccctccgagacgatcaactagttgtcccctatcatacccgactcctgccgtggcttcttggccgcgaacccagggggttcgagtatgataggccgcatggtacagcagacaagcgacacgaaacggcccttcgactttggcgaggtctcggaggcgacccgccattccatgcagggcaacaagcggcgcgacaccaagccagagttcgtcgtgcggcgcatgctgcgcgagtttgggtggacgggctaccgcctggactggaagaagtgcaaggggcaccccgacatcgcctacccgggacgcaagattgccatcttcgtcaacggctgcttctggcaccaccacgagggttgccgctacgccacgacccccaagaagaacgtcgagtattggaacgcgaagttcgagcgcaacagggcacgcgacaccgagacggcagagacgctcgaggcacaaggctggaacgtcgtcgttatctgggaatgcgagctgaaaaaggacaagctcgagcagacgcgcgaacggctccacgacgcgctcgaatacgccttcgtgtcggtggacgcccccgcatccgacaagccagacgcgagcgcctagcgctggcagaggcgcctgacggcgctagagcgcccggaagcctaggaaagccccagccatatcgcgaacttgggcgcatagcccatgatgaagatgatcactcccaggatgggaatgccatacgagcaccagatgcgcgccttgcgcgggaacttgatgccctcgcccgcgtccgcctccttgatgaagttgtcccagccccatcccagcttggtgcagcagaataccgcgaagatcaggccgccgagcggcaggatgttgttggagacgatgaagtcctcgatggactggatgtcgccgatgccggggacgacgaacccgctccacacgttgaagccgagcacgcacgggatgctgagcagtgcgagcgccacgccgttgcgcagcacggcctggcggcgcgtccagccccaacggtccatggcccaggtgacgagcagctcgaacacgcctatgaccgtggagagcgccgcaaagctcatgaagacgaagaacagcacgccccacagactgccgagcggcatctgcccaaagacgacgggcagcgtctggaacacgagcgacggacccgcatccgggctcacgccgtaggcaaagcacgcgggaaagataatgaggcctgccatgatggcgactgcggtgtccatgccgacagtcgagagcgcctcgcccgt

SEQ ID NO: 322 - DNA, 9023 bp, Unknown
  16S sequences of unknown bacteria
gtcgtcgacggcggcttgcagcaggtggaggctgcctgcgagatccgggagatgctcgatatcgatttgaccatctgcggcctggtgaaggatgagcatcacaacacttctgatctgatggacgatcagggcaagatcatcccgatcgaaaaggaaggagcgctgttctttctgttgacgcgcatgcaggatgaagtgcaccgctttgcgatcagctatcatcggcggctgcgcaagaaggcgatgacccgctctatcctcgatgaggtggaagggctgggcgaagtgcgcaagaaggccatctggaaacagttcggctcgctgaagaacctgaaggcagccagcgtggaagagatcagcgaggtcgttccggaaaaagtcgctgaaaacatctatcatcttcttcatcatctggaccagatcaaagatgatgcatagaatagggtgtgagtgatggagggatcttacgtacagcatactgacaccgcgggaacgcgaggtatatgaactgctgatccgcaattgctccacccgcgagatcgccggaaagctgggcatctcggacaagaccgtccgcaatcacatttccaatgtgatgctgaagctgggcgtcaagggacgagcgcaggcagtcgtcgagctgctgcgcatggaggagctggatctggaacaggatgactgatgtcctgttcttttttttgcacgtggattttagtataatgactgggaaaagagggatgcgcatgaaaattctgatctgtgaggcgctcggacacagctatggggagcaccgcgcgctcgacgcgtgcagcctggcgctggaacagggaaagctgcatgtgctgcttggaccgagcggctgcggcaagagcacattgctggaagtgatcgccggcctgcagccatgtacgcagggaaggatcatcctgcggggcgaggagatcagccgcagcagcgccggctgtcgatggtctttcagaccccggcctgctttccgcatatgagcgtgctggaaaacatcctgtttgccagcccgacacaggatgcgcatgcgaggaggaaggcgcaggagatcgccggcatgctgaagatcgggcacttgctcgagcgcagcgcggccaatctctccggcggggaaaagcagcggacggccatcgcccgggcgctcatgaaggaggcggatctgatcttgatggacgagccgttcagcgcgctcgacgcgccgctggccaaggcgctgggggaagagctgcgccgtctgcagcgcagcctttcgctgagcgtgctctatgtgacgcatgatcagcaggaagccatgcgtttagcggatgagatgttcctcatgcaggaggggaagatcatccaaggcggcgtgccggagcaggtatacgctgatccggacaatttgttcgccgccggctttctggccagcggcatgaatgtgatccctgcttcggtgaaggacggtcagctctgcttcgcccaggtacagatgcctgttccctttgcgctgccgcagggcgaagtggtgatggcggtgcgcggggagaacatccggatccagcgtgagggctggccaggcgcgcagatcatggactgccgccgcagcggcgcgctgcatcacattgatgtgatctggcgcggcatcccgctgcatgtgctctcccttgccgcgccatgcggggaaagcatctgcttcgacctgcctgactgtctgtttttcgacccgcatacgaaaaggcggatacgggaatgaatttggcatccgcaaaaagtatgctataatatgtaatcaaaaagaggtgaagtgtatgatcttgaaacgcctgagcttcattgcaggtctgctggcggtcttcgcagtctgcttttactggatgaaccagtcgtatgatcccttggcccgctatccctatgcggatgaggcagaccgtgagatcctgctgaagtatctggatcaggaagacatcaattatctgatctcgcagcagatccgccctgaggaaatcatgccgttcatcgaacaggagaactttgagatcgccaatacccgctggtatgcgctggccatgaagacgcaggaggacgatgcggcctacatcatcaacttcatcaatgaatataagagcaggctcgactacagcacgctggagacggtgctgacgcattattcatacaatgacctgatccgctattttgagagcagtgatgattatgatgaggattcgcagctgatcagcgatccttcttatgcgtacctggtgcttcaggatcaccagacggtattcaactatgagcctgcatcgcttacgctgctgcagcatgtgccggtcgtctcgacgagcggacagtccaaagggttctacctttgtgagaatgccgtggaagcgctgagcaggctgctgtcggatgcgacggagatcaacggcgaagaaggcggagggctgcgggtagcgcaggcatacacgtccttcgaggcacaggtctcgcggtatgagacggcgcaggaagattatggcgacgctgtctcatggtacagcgatgtgccgggggaaagcgagttccagctggggtataccgtgcgcttcgagctggatgacgagtgggaaaagaacgtggaggaaaagcgcagcggcgagcgttttgattatgcggatgcagagtctgcgctgacggatctgcagcggcagcagatctcctggctgcgggaaaacgcctatcgttatggattcgtcatccgctatgaagaaggaaaagagcatctgaccggaaaggcatggcagccatttacgcttcgctatgtcggagaagaatatgcgaggaccatgcatgacaatgatctgtgcatggaagagatgacattcaataaagaatgaagaccgttacggcggtctttttctttgggcgcctgcataggctgaaccagagctgtctgacccgcgcagggatgtttgcgctcatggccgtgctcacctgtctgctgttgttccagctgatcccatcttcccatcccagtgagatcgtcgtgcagcaggagggggagagcagttatacccaggtgtatctgaaagaggaggaggggctgatcgttccgctttccatcgagaccggagaggcgagagacagcgctgagcggatccaattcatgagcggcgtccttgccggaaagcagccgatcgagggatttcaggcattttatgcaggggaagagatcctgaatacggtcagcatccaggatgggatcgccacgctggatttccatgccgcattctctgactacgatgaacgcgatgaactgcgcctgctggaggcaatcgtatggggcgtcacacagtttgaagatgtggacggcgtcatcctgcaggtggagggccagcagctcacggaaatgcctaagcgccataccccgttgaacatgccgctgacccgggagatcggtatcaatcagtttgagagctctgccagtgctctgcatgattctgaggcggtgctcgtttatggcacgaagaagatcgacggcgcgacttatctgatcccgcgcagccgcagggtgggacaggaggataccgagaccctccaggatcaggtgcaggcggtcatcgccagcctctctctcagctcgacgctggattcgtccatggaagagaacgacgcggcttatctgggcatggaggaagatgtgctgctgcttcgcgtgggagcagggatatatggcagcgaccgcacgctgaagcaggatgaggtcaacgagctggtgctttctctgtgcgcgctggatgaagtgagcggcatctgcctgcttcaggaagaggatggggtcatgagccgcgacgccgatgtgctcagggccgaccagctgatctacaacattgtcactttctgatccggtttggctttcttgcctgcctgctttctggtaaaatggtatcagtaaggctggtgatgacatgaaggtggttgtggtaagcgattcacacggacgcgatgatctgctttatgacctgcaggagcagtatccaaacgccgacgcattcctgcactgcggagatgtggaggcgccgcaggagaattttccgggctatctcatcgtacaaggaaataatgactattattatgaccttcccgctcaccgtgtgcttccgcttggcgggcacagggtgctgctgatccactcgcatcagttttcctaccgcaagcgcgatcagcagatgatcgaatttgcgaaggaacgaggatgcgacgttgtctgttacgggcatacgcatgtggcggacaaccgcatgaaggacggggtcttgctgctgaatcccggctcgctccgttacagcagggacggcagagcgccgagctatgcactgctcacgctgacgccggaacaggtcagcgcgcagatcgtgtttttggaggaaccggaatcagaaaaacggcatttctggttctgaacagcgcatggtaggccatgttcagcttttttcatgaagggcttgaaatcatctggtgattctgctattataatgaggcagttaccgatgtctacgtagctcagctggatagagcatgcgccttctaagcgcacggtcaggggttcgagtcccttcgtggacgccatataagagagaaagccttgaaatagaggctttttttcatggttgaatgatcagtggtataaattattgatgctttcagaatgaccgtcttgtgaaaattgtcttggagtattaaagcaacttgaaagacaatatccaaatgtaaggattcaaatggtctcaacaaaagattctcgtatgaaacgaaaacataatgataattatcgggaaggatttaggaacaaatggaaaaagcagattcatatttagaaatgaaagaattaatatatgattgcatgaatgctcaagaaccagataaaaatcctatttcatacggcagtcatttttcaaacaattacactattttgctctttgactatgaggagcatgaactgatgcaggcatttatcgcttgtggattattcgaactagagcatcacgatcttgaagaacgaatcgagggacaaatgacatattggatctatcaatacgaacatttcggaaagttcaaggatatcattcccgattgtgatgtgatggaagcagatatcgccaagatcaaaagcatgatgcgattgcgctttgaagatttagcttgttatgaaggatagcacgctcaagcagtgtgctttttcatgtctgagcgatcattgacagatgcttcggatttgattcgatgctctatcctcacacacttctttataaaacgccggtcctgtagatatataatgttgcaacatcgaagaacatctgcttccttggtaaaaagaatggtaaaattataatttttatgaacatacatggcgatgacgtatgaccgggataagtcctggttcgatacgaatcagccttgtgaaaaggggggttttaccattggataggaaaagagatgacggttctcgtcagttgtctggcatttcacgcatcggcttgcctcggacgaagacgcttctgcgtgtggtcatgatcgttgcgctgatgacgtcgatgggaacgctggcaggctgcggagggctttcttcagcggagatcgttccggatgatccttctgccggtgatacggaagcgatggaggacatgacgcgaggggaaggggtctatgtcgtcagtgcggacagtacaaaggcgactcgtctttgggatgatccgggtcatatgagcgtcagttattttgacggtgctgactataccgttgaggacgccgattatgatggaaacgtcaggcttgaaggcgcgtacatcgaagacatcgcggaagatccagcatatgtcaacatttcggcaggagagaagctggcgctcgttctgccgtatggtccatatgttcgaatgtacgagggctcatgcatcgggtatggacactatgagaaatcagatgagctgaccggctatgaggaaattgccggggtggatctgtcagatgtcgagaccatcgcagatgccaatgagcggctggcgggcacggatctgcgcttttatacctgtgcgcgttcttctcattatgatgacgcgctgcttctttcttcgacccgcggcatgcaggtgacagcgggcacttacgtcggcacgtcgtttgaagaagagacgtacagctttgaccgcgccttctatcttttctccgtcacaagcatgcaaaagcctgaaatagagaagaccaaggacggatatttcatcgttgatctttctgacatggcgccgggcacttattatctggatgttgccgcaggcgatgcatattcaggacaggagacgttcatcatcgaaattgcctgaatgcggatcacgaacggctgacaggacgaaaacgctgaggacatgcgcttcagcgtttttttgctgtgagcgggatgcgcatcatgcggcgaaagagaagtgcggggcaaaaaagggatgaaaaaacataacgatcctgcgtatcgtgccttgacagaaattctcgggaggggggtatgatatttaccgtaatcatgatatgatgaacgtgtttgatggaggaaacaggggttatgaaaaaggaaatcctgaatgtgaacggtctgtgcaagacgtttacgctctccaggcggcagcagaagatcgaaaggacgcatgagaaaaagatccgtgcggtcgatcatctgtcatttaccgcttatgaaggagagatctttggtctgctcggtcccaacggggccggtaagacgactacgctgcgcatgctggcgaccttgatccgcccggatgaaggtgatgcgctggtggatggcacaagcgtggtcagacagccggagctggtgagaaaaaagatcggctttctgacaagcgagctgaagctggaagagttttttacgccgaacgcattgtttgacttttttgccgaattgcatcagatggagcctgcgctggcgaagaaacgcaaggaagagctgttcgagcgcttcggcatctcgcagtttgcggaggtgaaagtggccaatctgtccaccggcatgaagcaaaaggtctcgatcgtcatttcgatcctgcacgatcccaatatcatcatctttgatgaaccgaccaacgggctggatgtcctgacggcgaggacggtgacggactttctgcttgaactgcgaagacgggggaagacggtcatcctgtccacgcatatcttctcactggtggagaagctgtgcgaccgggtaggaatcatcgtcaacgggcgcatggctgtctgcgatacgctctctgcgctgaccgtgtcggaagatctggaagaggtgttcttcgatatttatcagaaagctgcaggtgatgatcgtgggtaaagggatctggacgatcatgaaaaaggaactggccaggtttttcaaggacggacgcatgtgtctgacgacgctgctgctgccagggctcatgatctatatcttatacagttttatgggggatgcgctgggctctcagctcaacgtgacggaggatttccagccggcgatccgggcggtcgagatctctgattcgatgcgtgagctgtttgcgcaggccggcatggaaacggaggagatcggcgcggatgagcaggcggatgcgatgaatgcggtgcagcaggaggagatcgatctgctcatcgtcttcccgcaggacttcgatgctgccgtgcgcgcatatgatgtatccgcgggagaagcggcgcccaatatcgagatatattataattccgccagcgcagattcctctgccgcatttgagcaggtgcagggaatgctggatcaatatgaatctgccttgtccaactgctttgacatcaaccgcgggcaggaaggctatgacctggccgacgaccgcgatctagccggcatgacgatggcgtcgatgatgccgctgctgatcttgatcttcctgttttcgggatgcatggcggtcgcgccggaatccatcgccggagaaaaggaaagaggaacgatcgcgacgatcctggtcacgccgatccgccgcagcgaactggcgctgggaaagatcttttccctctccatcatcgcgctgctcagcgggctttcttccacggtggggatcttgttgtccatgcctaagctgatgggcggcatggaggtcaacatgaatgtctatgaggcatcggattatatcatgctcggtctggtcatcttgtccaccgtgctgttcctgatcgccctgatctcgatcgtcagcgcgtttgccaagacgatcaaggaggcgcagacgctcgtgctgccgctgatgatgatcgcgatggtggtcggcgtcacgtcgatgttcggcagtgcgcagacgcagacggcgctgtatctgatcccgctgtacagcagcgtgcagtgcatgagcggcatcttctccttttcattcagcttggtgaacatgagcgtctgtgtcatcagcaatctgctgtacacggcgatcctcatcttcgtgctcacgcagatgttccattcagagcggatcatttttaccaaatagcagcttcggctgctttttcttgcggcgtgaaacgatttggggaaataggaattgcggaaatgtttgaggtatgctatattattgtatgtttagtcgctgggaggacctatgagcagctattatgatacgattctgaaacgtgtggaaagtgaaatggaaaagggcgatttcgccgaggcgatgaagcttctggaggaggagctctccatgccgtatattccaaaagaggatgaggagcgtatcatcacgaaatacaacctctgccgttcagagctgcgcgcgcaggaaaagccgcgccgcagcgcagtggaagatattggggatttgctgaggggttccatcgatgagcagtttcaggcggttgaacagctgagaaaaagtaatattcgcaattatgcggacgaggtgcgggaagcgcttcatgcggtgcgcagcgactgggtcaaggcgtttctgatcgaggcgctgatcgagcagtcggtg

SEQ ID NO: 323 - DNA, 7763 bp, Unknown
  16S sequences of unknown bacteria
gaaagatgctttcagagatggcaatctatgatgccgctgcattcactgctttatgtgatacagctaaaaaggctttaaactagagggaggcttttatgaataaggaacagcttatcaaaaaaatcaatgacatcgttgcaaacgagaagttcaagcttgacgcttatttcctctgcggtttccctacagacaaaccaaatgatgaattaaaggctgcctgtgagaaatatcttgaaacacttgaagacaaagaagcaaacaaggctgctgcagaagctatgatttcagagttcgaaaaagaactcgcttcagttcctgtaacagacgaaaacaaggctattctcggcatcaaaaaaaccgtaaaagaaatccttgacaacagagagttattattctaaaacatacgcagcagttaattctgctgcttttttatgacctaacccagtgaacgaagtgaactgttggtaggtcagcagtagactcttacaacagtatgtatagagtctttgcataagactttctatgatttattccataaatcaagacaagtctttaaactacagaaattgccgagctttagcgagaatgcaatttttcagtttatgacctaactcgatttgtgaaacaaatcatcagtaaatatatgaaacggcaggttttgattatgaaatcagaagatattaatacaatacttgatatactggagcagacttatcctgatgcgggctgtgcgcttgagcatattgatatatttgagcttcttatctgtgttgtgctttcagcacagaccacagacaaaagcgtaaacaaggttactcctgcgctgtttgcagaatatcccgatgcagccgccctttcgcaggctgaccccgatgatgttgcggaatacataaggtcaatcggcatgtacagaaccaaatcaaagaatatagtcaatctgtcaaaggctcttgtcgcaaactatgacggcaaggttccggacgattacgacagccttgtatcgcttcccggcgtggggcgcaaaaccgccaatgtggttctttccgtaggctttggtcatcaaagacttgctgtagatactcatgttttcagagttgccaacagaataggctttgtatgtgaaaaagatgtcctcaaaacagaacttgctcttatggaggtcatccccgaaaacagatggacaagaactcatcacagccttatattccacggcagaaactgctgtgatgcccgaaagccaaaatgcaccgaatgccctataaatcaatattgcaaatactacaaagaggctggaaactaatcagcctctttatcatttacctcttttaacagttccgcaagaacatagtttttgtcattgccagtcctgttgatagaacttcttatcttttcctttgcattttcgatatccgctttaagttcagccgaggtaattcgttttgcgcctgagccgaatatcataagctgctccatatagtcagaggttgcaactgtaacatcggcttttttgcccagctcataggccagcttttcaatatagctgtccgccgtctggttttctctggtgtaaaccacgctgataccgtttatatcttccgcagtaccgttattgcctttcaccttatagccgtcaaacacaagtataatctcagcgtctgtactgctgccgtagtcagatataatgtcaagcagtctttctcttgcaaatcctatattatcggagtctatatcatcccaagaaaaaatcatattgtagccgtcaatcacaagatattttttgcggtcaggatcgtaaggctccctcgccttatagtccgagctgtactgcctttccgacttccttacatacggctttgatttttctttccgtttgccgtaggttttttcgaatattgctttaagctcatcatcaaacacaccgcttctgtcacttaggctcctgactgcgcctgcatctgccgcaggagttttttgcagtacgcttttgatgtgcatatactgttcaacctcattccacggcacattgaagcctgcgccatgcgaacagaataccgaacccggtgggttgtccagatccgcctcagggttatatcctgccgccgctataacctcctcctgattatgacatgcatcatagccggaaaaactgcagtaaagcctgcctgttcctctggtgtacgaaagaacctctgtataatacccgttcatggttgaaacaggcgctctgcctctgattacagtcatatctcctgtaatttcaggctcatcaaaggttcctgccattctctgaatatccgaaatagctctgcctgtcatttcctgcggtatttcaagactgtagctgtaaaacggctccagcacaatgcatttgtttcgcataagaccctgccttacggctctgtaggtggactgtctgaaatctccgccctccgtatgcttctcgtgagcgcgccctgccgcaagggtaatcttcatatcggttatttcagcccctataagcactcctctgtgctttttctcacacagatgtgtaagtatgagcctctgccagtttctgtccagcagatcttcgctgacatccgtatcaaatataacaccgctgcctctttcgagaggctccagtacaagatgaacctccgaatagtgtctcaaaggctcataatgtcccacgccctctgaaacctgctgcactgtttccatatataccacattgccttctccgaattcaatgtcaattccaaacctttcggccacaagacttttgagtatttccgtctgcaccctgcccataagcttgacacagatttcacccagttctctgtttaattctatatgaagctgcgggtcctcctctgcaagctgcgaaagctttacaaacgcatcgtgaacatcaaagccttccggcagtatcacactgtaagaaagtacaggactcataacaggagagtaaaactctttttcactgcccagtccctgtccgcagtaagtgctgctaagaccggtcactgcgcatacggtacctgcgggagcctcctgtatttctgtgaacttagcgccctggtatattcttatctgctgtactttttcgctgcattcaggtatcagctgttttgctctgatgctgcctcccgttattttcatatgggtcattcggttgccctgcgcagctcttgaaatcttgtagactctggcgccgaatttctcatcgtattcaggtgaaatcataaatctgtcaagggcgtctataaactgctctgtaccctccatcttgagagccgaaccgaaatatacaggaaaaagctttctgtgttttatcagctttgaaagcctgttctccgtgattgtacccgtttcaagatattcctccatagcctgctcatcggatacggctatatcctcatagtatgccggctccggtaccaggcatctttcatcaagcttttctctcagcatctccataagcttctgtctgtctgctcccggctgatccattttatttacaaatatgaacaccggtatctcatattcagacaacagcccccacagcgtattgacatagcctgtaacaccgtctgctgcggaaataaggagtaccgcatagtcaagtacctgcagcgttctttccatttcggcagagaagtccatatgacccggagtgtcaagaagcgttatgcttctttcgcccagctcgaataaggcctgttttgaaaatatggtgatgccccgctgtttttcaaggctgtgggtatccagaaacgcgttctggtggtctaccctgccagcctgtcttatgctgcctgcgtgataaagcagggcctctgacaaagtcgttttgcctgcatcaacgggcgctgttattcctatcgttatcctgtctgtttttaacataattctcccacaagactgaatgtacttgactctgttattctgacagaaaccatcctgcctgtcagatcctctgaagctttaaaattcaccagcttgaagccgtcggttctgccggagtatgtcataatatcgtttttgctggtgccctcaacgagtacctgctgaacagttccgacatattctgcatttttctctgcggaaattctgttaatggtatctacaagtctgttaaatctttcgtgcttgacatcctccggaatctgatcttcaaatttctccgcaggcgttccctttcttattgaataaagaaaagtaaatgctgaatcgtatctcacccgctctgccagatcgagcgtttcaaggaaatccgcttcggtttcgcccggaaatcccacaattatatctgtcgagatcgttatatccggcacagctgctctcagtctttccacaagcttcatatagtcctctttggtatatcttctgttcattcgttttaaaataccgctgctgcccgactgcaccggcagatgaatgtttctgcacagcttgtcacagtccctgtatgcctgtataagacggtctgaaaggtctttagggtgagaggtcataaaccttattctctcaagtccctctatgtcattgagcatatatatcagagctgcaaagtcggtatcctcatcacctttgtaggaatttacattctgacccagcagtgttatctccttaactccgtcagccacaagatttctgacctcatttactatatcaagaggtctgcggcttctctctctgcctctcgtatacggaactatgcagtaggtgcagaaattgttgcagccgtacatgatgttgacaaatgccttgtgtttgtaaaggcgctttgccggcagtccctctacaatttctccgccatcctcccatatgtccattatcttctgtttctcattcatcacgttttcgagaagctgcgggaacatatgtatgttgtgagttccgaatattatatccacccacggatatttcatcttgagcgtatctataacgtgctgctgctgcatcatacagccgcatacgccaaccacaaattcgggatcttctgtttttttctttttgagctgcccaagtgtgccgaaaaatctcttgtctgcgttttctctgacactgcatgtatttatgattactatgtctgcttcttttttatctaaaaccggctccataccctgctgcgcaagcattccggctattgtttccgaatcgtgttcgttcatctgacacccaaaggttataatatggtattttttcatctgtgtcctcttcctcttaattttaatcaacattataagtatacattaattcatcatatattacaaacaaagccgctgaaatattttttaaaaactgtgtcatttgctacatacattgcccgaaaaatatattataatataatcataaacaagaagcttggaggtaaaaacaatgttagataaaaaagtagtaaaattattaaacgaacaggttgtcgcagagttctattcagcttatctgtatctggattttgcaaattactatattgatgaaagtcttgacggttttggaaactggtacacaatccaggctcaggaagaaagagaccacgcaatgcttttcatcaagtatctgcagatgaacgatgaaaaggttgaacttgatactatagcaaagcctgacaaggtattcgcagacagaattgacccgctcaaggcaggacttgaacacgaaagacttgtaacaggtcttatcaacaatatctatgatgccgcatatcaggtaaaagacttcagaacaatgcagttccttgactggttcatcaaagaacagatggaagaagaggataacgcaactacactgatttcaaaatatgaaatgttcggcacagatgcaaagggtctgtatatgctggatcaggaacttggtcagagaatttactccgcaccgtcacttgtattataaattgctttcagccatcagttttaccgatggctgtattttttttatttactttataatacagcagcacgccctgtatacacagagcgccttactgccgtaacctttttaaaatgtcatatctatatagaaatcattggagaaagtaatgttataaaaatgctaaaaaggttattatgctgtcactattttgaaacattcgattgttcccggtgaatatgtgtcttcactttccacaacctctatttcaataaccgcaggctttcctgttgccgcagctcttgagattgcgcctgctatatcctccggctttgtaaccttttcaccatagccgccccataccgcaggcagcttgtaatactcaaacggactgccgtcaggcattgttatatcctgtccgatatcattgttttcatccggcgttgcaatattggcaaagcctttaatcattgcatatttgttattgttgtttataaccgcgataacctgcgcaccgtgctttgcatatgtaagcatttcgcccacatactgtccgaacgagccgtcgcctgtagtatggagtatcggctttcctgttgccgcccatacacctaatgccgctcccatctgggaacctatgcagccgaactttgttccgtggaagaacttgcccgggaacattcccgcatcatcaagctttaatgatatataaggtcttatccattcaaggcagtcaccgccgtctgcaacctgtatgaagtcttttccctcattgttcaggaatttaaagaactcctttgctgcgcgcgcagtatgcataggcattctgtcgctgtcaaacgatgttttgtcaagctcagccataaactcccatgtcttctttgatatttccttaagccagttactttcagttcttgctgatgtcttagtcttaacactattaaggatctgtctcgcaacaacatctgaatgtcctgcaatacctatatctgcccctatattcatacctatatccagtggatttgtggtaacgtttatccatttagcctgcggatttacaaagaacatgccgctttccatatcggttttaaagttaaatcctattaccacatcagcttcgggcgccgcaaagcttcccattttgaacaggtctttatcctccttaaagaacttgcccttgttggtaagtgtaacgcttgtcggaatctgcaggtactctgccagttctttgaaagcagtcatatcctctgcaaaatactgagcgccctcgcctataagcattgcaggttttttcgcgtttataagaatatccgcgacttcttccgcaacctttggctccacgccggtccttctgttcatcatatagtttacaggatacatgatatcctcttcttcaacccgattaacctccagtacatcaagcggaagttcaaggtaggcaggacccggctgcatactgcagcagcttcttattgcagttgcaatatattcaggaattcgctctgtatacgggcatttctttgcaaattttgtagtctgcttaaatattgaagtaacgtcaaaatcctgcagggtttccgtaagttcctgttttgccgctccgccgcctcctataagaagtacaggtacatcataaatctgcgaatccacaattgctgtcagtgtgtttgtaactccggggcctgccgtagcaactacaacgcccattttgcctgtcacctgtgcataacccatcgcagcataggctgccgcgccttcgtgtttaacatcaagcacgcgtattcccgccttttcacattcgtggaacagtctgaaaatatgtccgccgcttaatgtgaatatgcactcgactcctgcgtccttaagcatttttacggctaataccgatccgtctacttttgccataaata

SEQ ID NO: 324 - DNA, 2402 bp, Unknown
  16S sequences of unknown bacteria
caagaaaccgaacgacatgatgccgctcatccgcgcaaaatacaaaaaataccctgagcttgtaaaaacgatagcggaacggcacataatgtataacagggagcttgacctgatcgcggaaaaagaggcggcgggcagacttttcgtaatccgtccggaggatgatatcccggtgaggcgtgtagagaaggacccggaaaagctgcgccaagcctatgatctcggcagaaaagcggcggaagagaagctcctggcgctgataagctacctttcgtgacagaaacgtgccaaaatgcttcgttaatatagtcatcacatttgccgcaaaattggctcaatatggcacaagtgctgaaatttgccgccgcgcgtcggaaaatgtcttttgccccttgtaaaatcgccgcggaaagtgtacaatatatatatgatggattattatgggcggcgtgcgctgtccgcatatttcttgaaatgaaaggatatggcgcggaaactttttcgcgtcaagtgagatggttatacaaatggagacttcgctgcttgacggcgtcctgttcacgaaacttatcggctgcggaaccgcggggctcgctgctaaggtcgatgaaataaacgcgctcaatgtctttccgatacccgacggggacacgggcgaaaatatgtatctgacactgagcggcggttatgccgcgctcacgagatcgccgtcggatgagctctcgagggcggctgaaacgctcgcttccgggatgctgatgagcgcccgcgggaattccggcgtcatcctgtcacagctcttcgcggggatagcggcgggcttttccgggcttgagagcgccactccggggcaggtcgcggcggctataagatgcggtgtcgagcgcgcgtatacggcgggcgcgaagccggtcgagggcacgatcctcaccgtcgcgagggacgccatggagagtattttcagaaacctcagcgaggatagcgggcttatcgacattgctgacgactgccttgaggagatgaacgcgtcgctgagacgcactccggagctccttccggtactgaagcaggcgggggttgtcgacagcggcggagcggggctgctcgcgatactcgacggtgtcgtccgcggactccgcggagaggatgtcaccaccgggacgcagattccggaggtgcgcgcgtcctcggcggcgaaggcggtcgatctcgatctgttcggaagcgacgacgagatgatgtacggctactgcacggagtgcctgctgagactgagttcgctcaagaccgacgttcagacgttcgatctgtcgctgatacgctctgatcttgaggctctcggcgactcgatggtcctgctgatggacggaacggttgtgaagctccatatccactcgatgacgcccgagaaggtgcttgagctgatgcaccgctacggcgagttcctgacggtcaagatcgagaacatgaccctccagcaccacgagacgattgtcggaaagccgaagcctgaaaaggaaagaaagaagttcgcctcggtcgtggtcgcgtccggagacggcataaaggagaccttcaccgagctcggagccgactgcatcgtggacggcgggcagtcgaacaacccgtcgaccgaggatttcatgaaggctttcgaggaggcgtcggcggacaatatcttcgttctcccggacaactcgaacataatacttgccgcgaagcaggcggcggagctctggactgagtcgcacgtttatgtcgtgccgacaaagaacatcggcgagggctacgccgtgatgtcgatgctctcatacgactcggacgacgccgacatgatatttgacgagatgtgcgacgcgatgaacggcgtcaagacaggaactgtctcaagggcggtgcgcgacgcggcggtcgacagtgttgacgtcagggcaggggactatatcggattcctcggaaagaaaatactcgcggacgagccgacaatcgtcggcgcggcgtcctcactgctcgaaagaatggattcggacgagaacgagtttcttatcgtcatctacggaaagagcatcagcgaggacgataagaacgagttcagaaccctcgcggcggatatcctcggcgggcttgagatctgcgagatcgacggcgggatggatatctacgatatgtatcttatattgcagtaaagtgatcagaaaggaaagtcaggatggcaggaaatttcatactgagctgtgagtcgacggttgatatgccgtactcgtatataagcggcagggatatcccggtgctcttctacacttatgtgataaacggtgaggagtgcattgacgacatgggacgcgacccggaggcgcttccggagttttatcgcaagctgaaggagggcggacttccgaaga

SEQ ID NO: 325 - DNA, 2573 bp, Unknown
  16S sequences of unknown bacteria
cgattacgcataagccttagtagtgtagttagaatgaccgcgtctgtttatttgggcgaaatttgataaatcgttcgtcggttcttctacggaagtaaaacgaaattgtacgttcgcttcacgtcagcgcacaaactcccgacaatccgcggttagcctaatccatttactttgattaggtattcaacactccgcgcgataaagaaataccgatttaagccgaatttcccgcgtctacctccaccgcgcgaacatgctaatgccactactaaggcttatgcatgaccgcgcgactgagctgtttatgggggcgaagacggaagtatattgctaaaccgaactccaccgcgagccggaactcacagaggtgcggcgtttgagcatctctgtgcgccctccgcgtaggagcgtcccctcaccgcagtgagatttaataaatcaaaagacgttagtcttttctacctccgtctttccgaaagacatgaagtctcttagaaggcgcacgtagtctaaggaaaagaaattagcttgcgctctttcttgctaagacatgaagtctcttagaaggcgcacgtagtctaaggtagaaaggactgcgacctttcagttgtcgctgacaatataccccaccccgcggatggtctttatcacatcgtcagaggtcttgtggcgtatgtaccgtacatacacgtctataatgttcgtctcgccgtagtagtcgtacccccacgcgtcgcataacagcttctcccgcgtcatcgcaacgttcttgttctccatcagcgtccgcaggagtatgaactcgcggttcgtcagctcaacaggctgcccgttgtacgtcacctcgtgcgagtccgtgttcatctccacgccggagcaggagagtatgcttccgtcttcctccttttccgcttgctcgggagccttttccgccgccttttcgctcgagcggagaatagcgcgtatccttgcaagcagctcctctatcgcaaagggcttcgtgatgtagtcgttcgcgcccatgtcaagcccgctgaccttgtccgttacgctgtctctcgccgtgagcagaatcacaggcacgtcggtcgttcgtctggcgcggcggagaacctcgattccgttcagctcaggcagcattatgtcgagaatgacgaggtcgtatccgccgctttcgattttttcaagcccctcgcgcccgttcgtcgccttgtccgtctcgtagccctcgtgagacagctcaagctccacgaaccgcgcgattttttcttcgtcttcgatgataagaatcttactcatttgcacctccgccgtttttatcgggaattttttctacagaatactggcagtcgaggaagagccccacaaggagagccgcgagggacacctcaaacgcgcacacgacgattataaccatgatgagcaccggcaaattgaggatgacgtttcccctgcgttttatgatgaacgagtggttaagggagaagagtaagatctccttcagcttagcggagaacctctgccaaaatccgccgtctcttgactgaaccgagggagcgaccttttcgtatcctgcggatgaagagtcggtggtagtcatgcttgaagtaagcggcgcgattttgccttccttttcgaggagggtgagcgcgtcgagcatattccatgaagagcggcggagagcgtcctcggcgtcctcacgggaaactccggcctgcgaatgcagtttttcgatcatttctttatgttccatagtgcaaacacctttagatttctttagatgagcaaattatactacgttttggcttaaaacgtaagggaaaacacattaaagataggttaaaatttaccttagacgacttaagccttctaagagacttccccaaggggagattcacttaggcttcaagtgagaagaaaagtagaaagactacgtctttcgatttcattatatgctcctacgcggagggcgcacagagggattcaagcgcctgtcccttgcacttactatgtaagtgcggagtaccggcttccggtggagtttggattatatgatgaacttccgtctccgcacatttcaaccgattagtcgcgcggtcttccataatccgtcgaatgagctacgctcattcagtggagcataaaatgtgcgcgcggtaagttttggggcgcgatgaagcataaagcgtagtagtgtagcgtaacatgaccgcgtctgttcgtttggactaaatttactacacgctcgttggttctcctacggaagctaaacgaaatcggacgttcgctatatttcagcgcacagattaacgacaatccgcggttagcctactccaattcagttatgatttggtattctcgactttgcgcgaaagagaaacgaatgaattcagtgcatttaccgcgtctacctctcccgcgcgaacattctaatgccactactaaggcttatgcgaaaccgcgcgactgagctgttcaaatgggcgacaccagtagagcatggtttaagaccaacgaaaccgcgagcgtagattcacaaggagacggcgtctgagtctccttgtgcgccccac

SEQ ID NO: 326 - DNA, 3366 bp, Unknown
  16S sequences of unknown bacteria
ggcacctcgccgtttgcgggaacatcggccgagccgtaaacaggcattgccgccgcaatcaaaaggcaaagcagcatacatatgattttttttgcggttgtcgtacttttcatttcaatcctccttttttgtttattatacttttaaacattaaaaaagtgaatatgaatttccgaacaagcaattgacaaagcggaaatcaaaagaaagatttgtaatttcagcgggtgtgtggtataatatctgtgaaattaggcaaccgaaaggcagatttttatgtataaaaatatcaaaaaacagaaaaaactgcagcttaaagagcttgtggactatatgcccggtcaggttataagcaagactcttgtgcagaacgaaaaggtcagcatgacgattttctcctttgacaagggcgaggaaatctccacccatgcggcgggcggcgacgccatggtcgttcttgagggaacgggaaagttcaccgtcggcggcgaggagtttattttgaacgagggcgaaaccctcataatgccgaaagacattccccacgctgtattcggacaggaaaaattcaagatgcagcttgttgtgtcgttctgattaagggccgcccgcaaaaacagggaggcttttctgtcggtttagacaaatttcagggggactttttgtgtaatcgtgcccttttataaatatgtgttttatgataaaatattttggcagtaattttatataggatgatgattttatgaaaaaattgctttgtataattctttcggcggcgcttgccttaagcctgccggtcttttcggcctcggccgaggaggacatttccacccgttcgattgagccatgcgacggatatttttccgactgggatcagacgggaaccgcaagaggtctcgataaaaccgattttatggagggcgagggctgctattcctttgagggaagcgacatgaccatcggtgcgaatttcaccgatatttcctgccccggcggagtcaaaaacgaaaagtatttcgaattttggttctatgtggacgacgcctccaagctttcggaggaatgtaaggttctgatttataaaaacgacataaaaaaatacaaaaccgcaaagtcgcctttccttaatgtgcaaaacggctggaacaaggtggtcatgaaccttaatcttgttatagcttcggtggacgaggtcaacagaatcgagtttgtgataaaggcgtccgacaaggttaaaatcaagcttgacgatttaagctttgccaaaaccgaacggctttccgaccgcacggctctcgacgccgccgtcgcaaaggcagaggcctttgaccccgccaacctgaccgcatccgagaaaaccgccttttataaattcctcgacagagcgaaaaacgacgtaaaaacccagcgcgacgccgacgctctttgcgaaagtcttgaaaatttcatgtcgctcagttccaaggagggcaagtttgacgacattctcaccacccacggcagaaccttctatgaaaacgacgaactgcacataacctactcggcaagcggttttaccgtccgtttttacggcacgagtctttcggccgatttttacacgctgaccggccgccccggcgaatacggcagccccaccaatcgctcctacgtcaacatctatgtggacaacgaccgcaatatgtatgactttgaatgtgatttcgaccccaccgaccgagagggtacaagatatatggagcagtcgcttgaggattataattcccgctgcccccatcagcttatcgatgccaaaaaggaatatgttcttgccgaaaatcttcccgagggcattcacacagtaaccgtgctcagaagaaacgaggtttgccttaacaaggaaattgtcatgaccgacataagaaccgacggacgttttctcactcctcaaaagaaatcgacccgccgcattgaggtcatcggagattccaacattacgggctacggcaacatggccataagaaccaattataagcccgaaacccaggatgccaccgtttcctattcaagctttattgccgacgctttcggcgccgagtataccataaccgcccgctgcggagcatacaccgaggccgttcctcagccgaatgtgggaacccccgagttttataccaacacctatttctttaccgactattggaacaccgcccttgtggacggtgcgggcagaccggttcagaacgaggacggaagctatgcggagttcgacgtctacaatccccaaaacaccccgaatcccgaccgttcgcggctttatgatttcaccgaggccgacaatgacgtcgtcatagtcaacatgggcgacaacgacgtgtggacaaagcccaaaaccgaccaaacaagggagcattttgccgaggtcatgaagaaattcctcgggcaggttcgccttgcaaatcccgacgcgctgattatttatgctttttcgctcaacaccggcgatttcagggattgctccaaagccgcagccgacgcctatgccgccaccggagacgagaactttgtttatgtcgatcttaaatattacgatcagcagggcggctcggggcacccctcaatgcaggtgcacaaggcttctgccgaccaggttataaaggttatcaaggaaaagctgggctgggacggcgtgctcagagaggtctatgccgatcccacctgcgaaaattcggataagatcaagctttcggatgattatgcccttgtgggtgacaccgtcacctttaaaatcgccggttcggccgaaaatgtcaaggttacaagccacggcgaacaggtcgattttaccgaagaaaacggagtttattccttcaccatgcccgagggcagcgttatgatttcggcagacattgccgacgaaattcactacggtgacattgacgaggacggttctgtcaccgttaccgacgcgctgctgacccttcaggcggccgtgggaaaggtggactttagcgatgaacagatcctttgggccgacgttgacggcaaggacggcgttaccgttaccgacgctctgctcgttctccaaagatcggtgagaaaaatcgaaaaattccccgtggaactgtaatatataaaaagaatgacccgagcaagccgctcgggtcattttacttttgtgccgttaattgcgctcctgcgcttttatgaggtttttataaaatctgacggctccgggaaggcagtttatttccacacattcgttaagtccgtgcatacccttcatctgctccggaccgaaaactatgggcgaaaagcggaggcagtttttgcacaccggctgataaaattgagcgtcggtggcgccggtcataacatagggcgagcagg

SEQ ID NO: 327 - DNA, 13301 bp, Unknown
  16S sequences of unknown bacteria
ctctggatcacactcaggcgcacgttctggtattcacccatgcccactggggcagcgttggcggctttgaggatttcgtcacgcttttcattcaaaatctgctgtggaagatacgcccggcaggatcgccggcggctcattgcatccatgacttccatagaaacagcctcctgtttgcactttctctggcagcggttatacgctgcatattttcgcatccgtattatagcacagatttccttgctccacacaaaaagaattgaattttttgccttcggctggacacagttgaacagatatgcctttttccttgacaaatcactcttttttgtggatactatataagttaaagtatctattttctcgggggccgccgaacccctcggacaacgataggaggaaacacccatggcgatggattacaacaagaccatcaacctgccgcagaccgatttccccatgcgcgcgggcctgcccaagcgcgagccggaaatgcttgcacagtggaaaaagattgacgtttacaaggcccttctgaaaaagaatgaaggcaagccgcgtttttccctgcatgacggcccccccttctccaacggcgcgctgcatatgggccacgcgctgaacaaagccatcaaggatttcatcacccgcagctatgccatgcggggctattacacaccctatatccccggctgggacaaccacggcatgcccattgagagcgccatcattaaaaagaacaagctcaaccgcaaggaaatgagcgtgcccgacttccgggaagcctgccaggaatttgcccagcactatatcgacgtgcagatggaaggcttccagcgcatgggcgttatcggcgactgggaacatccttataaaaccatgaacccctcttttgaagccgaagaagtgaagattttcggcgagatgtacaaaaagggctacatttacaagggcaaaaagcccgtttactggtgctataccgacgagaccgccctggccgaggctgagattgaataccaggacgatccctgtaccaccatctttgtcaaattccccatcaaagacgatctgggcaagctgggccagtactgcgacctctccaaacttttcttcgtaatctggaccaccaccccctggaccctgcccggcaaccgggccatctgcctgaacgcagcctataattatgttttgatgcaggtgccctccggcgaggtgtatattgtggccgagggactctccgaagcggtgtgcaaggccgcaggcatcgagagccacaccgtgctcgccaccctcaagggcagcgcattcgaacggatgaccgcccagcaccccctgctggagaacgtggagtccgtggtgctcaacggcgaccatgtgacgctggacgccggctccggctgcgtccacaccgccccgggcttcggcgcagacgactatttcatctgccagagctatgaccgcgccggcaagacccacatcggcgtgcctgtacccgtcaacgagcggggcgtgatgaccgacgaagtgttcaacggcgtgcatatctccaagtccaacgaaatcatcctgcccaagctgcgcgaggttggcgcactgctggccagcgaagagatcacccactcctatccccactgctggcgttgcaagcaccccatcattttccgcgccacgccccagtggttctgctcggtggaagccttcaaggatgcggccgtggccgcctgcgacgagatccgctgggtgcccgaatggggcaaggaccgcatgatctccatgatccgcgagcgcgcggactggtgtatctcccgccagcgcaagtggggcctgcccattccggtgttctactgctccgattgcggaaagcccgtgtgcaccgacgagaccatcgccgccgtgagcgccctgttcggcgccgaaggctccaacgcctggtttaagaaagacgccatggagatcctgcccgaaggcttcgcctgcccccactgcggcggcaagacctttacaaaagaagaagataccctggacggctggtttgactccggctcctcccacttcgcctccatgcagcgggatcagggcttctggcctgcggacatgtatctggaagggctcgaccagtaccgcggctggttccagtccagcctgctcaccgctgtgggcgctctgggcaagggcgcaccctttaaggagtgcctgacccacggctggaccgtggacggcgaaggccgcgccatgcacaaatccctgggcaacggtgtggatcccaacgagatcataaacaaatacggcgcggatattctgcgcctgtgggccggcagcgccgattaccatgtggacgtgcgctgcagcgacgccatcttcaagcagctttcccagaactatctgaaattccgcaacacggcccgctattgcctgggaaatctggacggcttcgatcccaaccatctggttgcccctgctgacatgctggagctggaccgctgggccatcaccaagctcaatgaactgacgaaaaaatgctttgcagcttatgacaattatgaattccatgtggtttcccacgccatcaacgatttctgcgtggtggagctgagttccttctatctggacatcatcaaggaccggctgtactgcgaaggccgcgacagcctggagcgccgcagcgcccagacggccctgtggctgattttggacaccatgaccaaactctttgcccccatcctggcctttacctgcgacgagatctggcgcgccatgccccaccgcacggaagacgacgggcgcaacgtgctctttaacgagatgaatcagccctttgcagactatgacttgggagctgcagtttcctggatcagcctgatccagctgcgcgacggcgtgaacgccgctctggaggccgcccgcaacgaaaagaagatcggcaagagcctggaggctcacgtgacgctggtgaaagacgccgcatcccacgacaatctggctcctctgcaggagaaattcgctgatcagtgggccgatctgttcatcgtctccgatgtagaggtttccgacgatgcagctctgtatgcccaaggggcggaaacccccatcgccggcgtgcgggtgctggtgagcgaagccaagggcgaaaagtgcccccgctgctggaagcacagcacccagcccgacagcgaaacgggcctgtgcccccgctgcgccgctgtggtggccaaactcaccgtcgaagcataaacaagaacgaccgccgcggggcgcaggaagatttcctgcgccccgcgcagtccaaaacgcaaaaggatactgcaggatgaaacacagccgcagaaaaaccggacaggcactccgctggagcgcggcgggattcctgctttgcgccgcgcgacggaaatcgatccggagaaacttgaagaaatgaggaagcgtctgcaatgattcgttgtattcttgccatctgcggcctgatcgccgcagaccaagctgtgaaatggtataccgtatcccacctgacattgggcgaaaccgcacccctgctgccgggcctggtggaactgctgcgcgtgcataactacggcgcggcctggtccagcttttccggcatgcgctggctgctcatcgtggtcaccgccgcggtgatggccgtgctggccgtgctgctcctgcgccgcatggtccgccatcccctgggcgtgacggctctggtgctgattctgggcggcggcgtgggcaatttgatcgaccggatccgcctgggctatgtggtggacatgttccatttccagttctggccctcctaccctgtgttcaatgtggcggacatctttgtggttgctggtgtaatcctgtttctgctgtactatttgttcctatatgaaaagacagacggcaaaaaaaaccggagcaaaccggacgacaggaaaggtgcgcaggattgatggaaccgattcacctcacccccgcaccggaggatgcgggcacgcgcatcgactgcttcctcgcatctcatctggacggcgtgacccgctccgccgcgcagaaactgctggagggcggcgccgtgcaggtcaacggcaaagccgtagccaaaaactataaattgacgggccgggaaaccctgtccgtcacgctgccggaagcggaggaggccgatcttatccctcaggacattcccctggacgtggtgtatgaggacgcggatgtgatcgtcgtcaacaaaccgtcgggcctggtggtacaccccgcccccggccacagcgacgggacgctggtcaacgccctgctctaccactgcgggaacagcctgtccggcgtcggcggggaaaaacggcccggtattgttcaccggattgaccgggatacctcagggctcatcattgccgccaaaaacgacgcggcccacctgttcctctccgcccagctggccgaccacactctcgcgcgcacctatgaagccatctgcaccggaaatttccgcgacgatgcgggcacagtggacgcccccatcggccgccaccccacagatcgaaaaaaaatgacggtgaccgaccgccgcagccgccacgctgtgacccactgggaggtactggaacgcttcggcagccacacccatgtgcgctgccgcctggaaacaggccgcacccatcaaatccgcgtacacatggcccatattggccatccgattctgggggatacggtgtatggcgccaaaaaacctgtcccgggactgaccggccagtgcctccacgccgtggggctgcagttcatccacccccgcacaaaagccctggtatccctctcctgccctcttccgccggaatttgaagccatgctgcagacactgcgccggcgcactttcatccagaagcgataacagaatgccccattgccgcccagtaagagcagcaatggggcaaaaaagtatgattccggtccagcctgccggtttcctccgctcaggcaatgggcgctgtcttgttcttggggatgcaaatggtcagcgtaatcgtgtcctccgtttcttcccggccgcatttggcatccaccccggcgcggcgcatcacatccatgctgtggttgatggagttgaggaacagccgcacatccttgatgataaagctgggccgccggggtttggccttgggctgagccgcctgcagaaacgactcgatgtactcttctgtttgagcgacgttcatgcttcgctgaagaatcacctccagcgccgctgcacgcgcctcctctccttccaggcgcagcagcgcccgggcatggcgttcggtgagtccgtgctccaaaagcgtctgcgcacactccggcgaaagcttgagcagccgcagcttgttggccaccgccgactgggagcgccccagcttttccgccacctgctcctgcgacagcccataagccgcgatcagtttctgcagcgccgctgcttcttccatgtaattcagatcccgacgctggatattttcaatcagagccagcagcgccgcgtcctcctcgcttacggcgctcaccaggcagggcacttccttgagccccgccatgcgggccgcccgcaggcggcgctcgccggccaccagctcaaaccccccgccgctgctgcggcgcacggtcaggggctgcagcacgccatagcgccggatgctgccggccagttccgccagggccgcctcgtcaaagtggacgcggggctgggcacggttgggaacgatctgggtcaccggcaggtaaaacacccggtcggactcgtaattttttttgcccctgagcagctgcatgggcaaaacctccttttcccgttcttttccctcatcataggacaagcgcggcgcaaagggcggcgaataccgccgaagcggaaaatttttccgcaggcaaagacggaaaaaggagcgcttccatttacaaacgcacaaaaattggatacaataaaaccaacgctcctccggagcggaggacaaaggaatttgattggagaacccactatgcttgacaccatcctgttcgatctggacggtaccctcctccccatggagcaggatgcctttatccatgcttatgtaaagcagctctgcgcgcgctatgtgccctgcggctttgagaaagatgacatcgtgcgcgccctatgggccggcaccgccgccatggtgcgcaacgacggcacctgcaccaacgaagagcgcttctggaccgtattcgaccagctgcccggcggcagcggcgtcatccgcgacagcgtggaggaattctacaccggccctttcgacacggtgcgtgaaatcgtctctcccacgcccctgtcccgccagatcgtggacaccctgcgccaaaagggctacaccctggttttggccaccaacccgcttttcccgccccagggcgtgcgcacccgcttggcctgggtggatctgctgccggaagacttttctctggtgaccacttatgacaactccaccttctgcaaaccctgccccggttactatcgggaaatcctgaaaaagctgggcaaacaggcggagcagtgccgtatggtgggaaacaatccgctggacgatatgtccgcccaagcgctggggctggacgtgtactttgtcaccgaccacatcgaaaacgaaaaaaatctgcccaccgaccggtatccccagggcactttggcggacgtgctggcctggagccaggccctgccggcgctgtaaccgccctctgtttcatgccaaaaaagaacggttcccacatagggagccgttctttttctcttaaatcccgctgtacctgcggcatatgaaatacaccagcgccgccaggggcagcgtaatcagcagcaccggataaaacagagcgatgggcacatggccgtagagcatgccgccgatggcaggccccagcgtcatacccaggtccagaccgatgtaataggtgctgttggccaggccgcgctgctccttgtccgccagcagcatcgccgtggactggctcaccgagcacatgatgccgtagccgcccgccatgaaagccgcggcgaaaaacatctgcacattgctgtgcatccaccccaagcataacatgcccgccagggcgctggccaggccgccggccaggaatacccggaaaggcaggcggtcaaaccagcttttcagaaaaagccgcagaagaagcagcacggcagcgtacatgggaaaatacaaactgacgctcacgctgatcgcccgcgcctgcacatagctgatcaaaaaggattgcgtggcgcagtacgggatggcaaagagcataacgatgagggcaatgggcagcacccggccgtctacaatgtgcacgcgcgctttctcttgctgcggctccgccgcggtgcgcgccggttccggaaggcctttgtccttcacaaactgaatcagcagcgccgcccccagggcaaacgccaacgcagcgccaaaggccgcgtggtagcccagcgcatgatagacactgataccgatggcaggggccaccgccatggccaaggcgttcatcatgccgtaaaaacccatgcctgagccgattttctctttgggcagcaaattggacagccaggtagagacgcacaccgaagagcaggcatagcccacaccgttcaccacgcgcgccgcaatcacaagccccgggtggaacgccgcgatataccccacgcaggccagcgccgccagccccgcgcccaaaaagcacatccggtatttgctgacgcgatcggccagattccccaccagcgggcggcaaagcagcgagcacaggttcgtcagcccgccaatgatccccatcagcgctgccgaagcgccgatgctgccggaaaagccggtgatcagcggcgtcaccagcatgggactggccataaagcagaaactggccgccaggatgaaaaaaatatctttggactcaatcgttgctttcatgtgccattcgcctgtttccatgtggtttcattttgcttttgccgtccgtcaaagcgcagcagcacgacgttttttcagattcgcctctgccggatcttccggatatcgtcccccacaaaaacgagggtgtaatattctccgcccaggcgcgaagcaatctgcggcgaatagcgctggcggattcctttttcatccagattggaattgataattgtgcgcttttccgccacgatgcggccgttgatcagctgatagagcgcatcctgcacaaagggcgtcaccagctctgtgcccagatcgtccacgatcagcagatcgcactccagataccgccgcacgtcggcagccgcctcctcctgctcctcttcaccgaagcggcggaacttgttggtttcaaactgggaaaacacgtgggtcgccgtgtcatagaccacggagaagccgttcttggatacctcccgggcgatacaggcggacaaaaaagttttgcccagccccggatcgccggtcaaaaacaggttgcgcaccgcgccggggcggccaaagcccgccgcgtactgccggcagatgcgcgccaccttctccatatgctcatagggcaccttgtggcaatcttcccggtactcccggggataatagtccagcgaaaaggtttcaaagctctgggcgccgatgttcagcaatttggacagctcccggttctgttcttccacataatatgcacgcagacatgtacacatggcgccgtccggcccataccccgtgtcgccgcacgccggacacgccggctgctccgtcagcgcatccggaggataccccgcctgctccagctgcgccgcgcgctctttctgcagcgccaggttttcttccttcagcgccgccacccgggcggccggatcctgcccgctgcgcagagccgccgcgatggtgcggctcacggtgccgcgcagctgcacgtcgatctgtgccaggcggggcacgcgggcataaatctccgcgcgctgccggcggaagtctgcacggcggcgttccttttccgtttcatagcggtctctggcccgcgccaggacctttccgtcgtatgccatgccccttcctccttactgcccgtccatttccttgagataggcgtccatccaggcgtcgttttcctccacggcggcggcccggccggaaccggttctgcgccgtcccgccgcctcgctccgcccggtctggggcggcttgtctttggcgctgatttcttccagcgaatgtaatccctttttgtgcagatctcttaaaataccatccagataacgccactccagcttaccacatttgaatatagtgatttcataggcgtattccaccacatcaggcggaaacccccattcgatccaccgttccaaaaaagtggcctcgcggttcaccggatcccggctgcccagacgcagcgcctccatcatctgcggcataatctgctgccggcgggcatagtccttcaaatattcctccaccagctccgcgcttaccagccccagccgcttccagcggtagccttctttttccacctggcgcatggtgggccggcggccagggccgtaacgccgctcggtgcgctccacgcagtgacccaccagcgaaaaaatcacgtcggcccccagtcccagatcgctgtacagtcccagcagcatatcgtcgtccttctctgtcatcagccggcagagcttttcgcccaccgcctgacgcagggcggcaaaggaagcgtcctgctccaacgccgcggcgatgtcgctgcggctgtacggcgtgcgcgcccgctccggcggcgcgctgagcggctcttccaccttccgcgtctcccccagcaggcccagcgcgcgcaggcgttccaccgcggcggacaaatccgccgacgaccagtgcagcgccgcgcagatctccgtctccttcttttccccgccggcttcggccagaaacagatacagcagggccgcgctgccgtcgccgctgcgcagcagggcgcgcacctgagcgcgcggcagcgtcagcacgtcgctctctttcagctgcaatgcatattccaccgtttctgcgcctcctttcgcgcctcattgtctcgatcgctctttattgtacacgattcgcgctggattctcaacaggaaatgtagccgccgccccggctctgctgtgcagaaattgttcctccggttgcacagcggcatacaacatttgccctgccctgcactacttgtgcagggcctttttgcacaacggcctgtaatttcagctacgaaatggagaaatgaatttgaattatacaaaacattatcaattaaaccagtgggacgccgccgaccgtgtgctgcgggaggattttaatgcggacaatcagaaagtggacgcagcgctggcggagatcaaggcccagccgtgctttaccaagctggcggaaacggttaccacagaatccgttcacaccctgttgtacgacctgcccagcatcgactgggcgaactggcagatcgtgcggattgacctgcgcctgatcaatggaaacggcggcaacggagaggtatccctcaacggcggcgggcagtacaccagcataatgggcggctcctccagcacaccttttttcataaccaccctgcaaacggaagccgccccggaaaccagagcacccggccgcatctttctgctgcccatgggtgagccggacaccgatgtgcgggccgtgtccatcggcgcttacggcttctgttacagcatactgaatgtaccttatcaggagctgacccagttatcggtggccacaaaaggcagtgccttccgtcccggctgccgcattgcggtgtgggggatgcattgacctgccagctctcgaccaaaaaagacctccgggcgctgcccggaggtctttttggaaattaccttgtaatagaaacccaaagtttcaattacacagttgcatcgaacacatacagatcggtgatgtagttatcgtcgtccagaacaacaatgacgtagtcgccggcagccagggcatagccctcggaaccgcttgcaccaaaggtgctgtcgctgtccagagccagatcttccacttctgcagagctgcccttgacgatgtaggagttgaactcgtccgccgtcacataggtcttgtcagcagttgcatcaatcgtcacaatgccattcttcagcgttacatcgctcaggccttcagcagcctgatcggtcacaatcacagtagccgtgtcagttgcagcagcatcaaagtgatcgcccatagcggagatgtactcatccgtgtaggagttattcacatacaggcccacagcaggggtgccattgaagcccgcatcgctgatgccgatggtggtatcctcaccattcaccagtgcattgtaatacttgattacagtgctgccgtccttttcggtaccctgaggagcggtatcatagatgaacacctgatcctcgttgctggtggaagcgctcttgttgaccacaacgatcttggccacggagccctccagcagagcatatccctcattggtttccacttccatgctgggaacgttcttgatgccggtgtaaacggtgtaagcgccgtctttcttcaccaggaagatggtcttgctggaagccgtcttgtcggtgaaaatggtggaattgcccttggtgatatcgccagaaaccttatttgcagtgccagtggtttcagcagtcacgtcgtactcgccgtccttctcggagaaggaaacaaactgatccttcaaatcggacagatcgctctcatccacatcaccatccgccacgacatcgtcgttgacttcggagacgtcgacccatttggtggtgccgtcggtgaacagcagcttcagggcgtaatcatactcgccgcggttcttgtctgcgctgtagtccagaacaaaggcgtacacgtcgtccgccacgtcctcatcgtccacattcaggatgtagccatactgatccagcgtcagggtgtaggtgttgccaatatcgccgtcgcccaaaccggtagcacccttcgccttctgatagacttcgccgccgatggtgtattcggtagtatcgccggaacccttgttcttggtgtacttgccggtgacatactcaggctcataagcctcgactacatcattgttgtcatcgagcaccacaacaacttcgtcatccttttccagatcggagaagaaggcaaacaggtcgtgatcgtcttcaattttattggcgccgccggtcagcgtaacctcgtctttcgcgaccttcttgacctcgaccagcttggaatcaatggccacaatgtcagtgatgacattgtcggtcacatagatctccacgctgcggccgttttcagtcagagcggcaacctcgtcggagctgtcgatgttgaaaacagcacttacgttaccagtagaagacagaccggcgtcgttggtgttgccataataataattcttcagatcgtttttgacggtctttttgccgctgtcggtattcatgtcagcggtgtagaccacagcggccttctgcgcataggtgccgatggacttgttctcgaacacccactcgttggaggggcggtccagatcgtcgctgctgcccttgttcagcttcagcttggaagcatactgctcgcagaactgcgtgtactcgtcgttggccacatccatgcgataaccggtggtcgtggtatgacccacatagtaacgatccgcatccaccacaatggtggtgccatccggcgtggtgatgttagtgccgccggtgtagtccaccattcttgcggtcatggcgttgaacgccatctgagcagcctgctcacgggtcagggcactgttcagagagatgtccagatcatccgccaggccggcagtgatggccagcttggaaatgttgatggcccagctgttgcccaccagctgctcgatctggggatcatagcccagagccaccagcagcatcttggcaaactgtacgcccagcaccttgtcagtggggttaaacttgccgttgccatcgccggcaatgatgccctcgttggtgcagtaggcaatcgcgcctgcgctccagcggttggccgccacgtcggcatagggcgccacagtggccgtcagcttgtcagcttccttctggcccagcagcatgtaggtaatgatcttcgcagcctgctcacggttcagcgtgtccgtggggttgaagtttccgctgtcgctgccgttgaacacgccggcggcagtcataacatcaactgcttctttgtaggtgacttcattgtaatccttgtagtcacctgcgtccgcggcgaaggcggcggtcatcaggctcaatgccatggccagcgccaacaccagggacagaacct

SEQ ID NO: 328 - DNA, 5257 bp, Unknown
  16S sequences of unknown bacteria
ttgtaaatcttccgtaaataaaagtgaaatattaacctttggactgcaaaaaaggggcgattttaccgtattagtgaaaggactttttcataccggcaaaaaaatcctttcctgtcggatctctccccgaataataaatcgagagccttttcgccccaccggtcaaacaggggcgccggttaattttttcttcagcagacctcatcgggcaatttgggggtctgccccagcgggaacctgcctcccaccagcaccttgaaaactgaataaaacaccaggccattatccccacagccggagatatatcagttgcaccccgcataaaaatgtggtatgataagctgtattatttcgctgttttggaaaggggttttttcctgatgtcaagcccaaaattgactgttgccgtcctgttcggcggcgcttccaccgagcacgatgtttcccagctctccgtcacctccgtcctgcgggagctggaccgcgataaatacgagctcctgccggtcggcatcacccgctccggggagtggttcctctacaccggggagctttcgctcatcaccgatggccgctgggagcagagcgatgcccgcattccctgcctgctttcccctgtgcccgcccaccacgggctgatggtacaaaaagccgatggctggcagccgctgcgggtggatctggttttcccggtgctgcacggcatgaacggcgaggacggcaccctgcagggtctgttggaactggcccggctgccctatgtgggctgcggggtgaccggcagcgccaactgcatggataaagatatcgccaagcggctatttgccgcggccggcattcccaccgcccggggctttaccgtttaccggggagaggttccctcccccgccgagctggccgccaaagtggaagccgaactgggctggccggtctttgtcaagccggtgaacctggggtcctcggtgggcgtcagccgggcctgcgatgccgaagagctggccgccgccatggaggaagccctccgctatgactgcaaggttctggtggaggaagccattaccggggcggaggtggaatgcgccgtaatgggcaaccaccacaatgccatccccagcgatgtcatcggcgagatcgttcccctgcgggagatgtacgattacgagggcaagtacctggatggttccacccagctgtatatccctgcccgaatccctgcggagcagaccgagctcatccgccaagcggcggtaaaggcttaccgcgcgctggattgccgcggcctttcccgtgtagacttctttgccctgccggatggcaccattcgtctgaatgagatcaacactctgccgggcttcaccaatatcagcatgttccccaagctgtttatggccagcggctacacctatccccagctgctggaccgtttgatcgagctggcgctggagccccgctgaagggacataatccccggcaaaattcccctttaccaaggggaaaaagtgcggctttgccggccatgcggcggcggagccgtggagcggacgagggctgcccgcagcgaagcggagggtcggcccgaggcggagcgaaacggcgacgccgcatctgcccccaagccgctgccggagcccggcccatgcggcgggcccgctccacttgatatcggactgacccgccgctgcgctttgggcagtcctcccccgtttcgcggccccgccgcggaaccccaaccaagctcttatcttccccagaaaggaggcgccgcccatggaccccagacctatcggtgtttttgattctggtatcggcggattgatggcggtgcggatgctgcggcatctgctgccgggtgagcccatcctctacctgggggataccgcccggatgccctatggcgaccgcccggccggggagatcgaccggctgaccggcgagctgaccggctggctgctgcggcagaatgtcaaggcgcttatcgcggcctgcggcaccatcagctgcaatgcaggcgaaacactgcagcagctgccggttccctgctttgatgtggtgacggctgctgccgaagcggcggcccaggccacccgaaacggaagagtgggtctggccgccaccagtgccaccatccgcagcgggcgctttacggaggagatagaaaggcggaccggacaggctgtgaccgctgtgccctgtcccctgctggcgcccatgatagagcacggagccggcccggatgaccctgcgctggccgccgctgtggcggaatactgccaacccctgctgcaaggcggcgtggataccgtggtactgggctgcacccattatccccttatcgcggagctttttacccggatattggggccggaagtgaccctgatagactgcgcgggcgaagcggccaaagccgccgccgaagccatgaaagaacaacatctgctggcggaggggaacgaccctgccgtcacagaataccgttttaccgccctgccgccgcaggccgcccgacagacggcccgccgcatgctgggagaggattttaccccgcggctgctgccgctggagaagctgaccgcgttttccaccgaataaagccattttgtgaaaaacgcggctaaaccgctaaattgaaaaaagggggcgagccccatgaaaacagaacaggaaaactgcaccgtcaccgtccgcggcatccagcgggtggagggtgacgaggatgtggtggagctggtgaccggcgggcgttttacctgccatgggggccgctggctcatccggtatgaggagagcgacgataccggctatggcggctgccacacctccctgcggtacgaccccgaaaaggggcaggtcattctgctgcgcaccggggcggtccactcccaactgatggtggaggagggcaagcgccaccaatgcacctacgataccggctgcggcaccatcatcctgggggtgagcggcagccgcatcgcggccgacctggacgagcagggcggcacgctggaatttcactactcgctggatgtaaacacggcgctggtaagcgaaaacgatgtttatgtggcggtgttcccgcggtaataagaaagcttgccggggggcaaggcggcccgcagggcgttccggccgggccggaaccggcggtcgcagaccgccgaagccgccgcaggcggcttgccctgcgggccggctcccggctcccgcgcaaattccaaatcgtatataaaccatatttctatacattaaggagaacttcaactatgatttcccgctttgatgagacccgccagggccttgaccgtgtcgttcgggcggcctttgccgcagcggctgccaagggcctgctgcccgatgccgagcccgccgcctatgtggtggaaattcccgccgatcccaaaaacggcgatttttccaccaatgccgccatggtgaacgcccgcgcgatgagatgcgctccccagaaaattgcggcggccctgctggagtgctttgattttggcgagctgccggtggagcgctgcgagatggccggtcccggcttcttgaatttctacatgaagcaggaatggtttggttcgctggcggcggaggcactggaaaagggcgcgcactatggccgcagcgactacggccaaaacgaaaaggtaatggtggagtttgtttccgccaaccccaccggccccatgcacatgggcaatgcccgcggcggcgccataggcgactgcctggcggcggcgctggaatggagcggccacgatgtgacccgcgaattttatgtgaatgacgccggcaaccagatcaataaatttggggcgtccctttcggtgcggtatatgcagctgtttgagggggaggacaagcaccccctgcccgaggactgctaccagggcatggacattctggaccacgcaagagagtttgcgaagctgtacggggataagtatgtaaatgctcccgaggaggagcgccggaaggccctggtggactacgccctgcccctaaacatcgccgctttggagcgggacctgggccgataccgcatccactatgatgtgtggtttagggaaagcgtgctgcaccgggagggcaaggtcatggccatttgcgagaagctgaaggaaaatggctgggcctatgaaaaagagggcgccctgtggtacaataacatcaagatgatgaccgaaaaggccgaaaaagccggcaagccgctgaccgaggcggagatagctgagctgaaggatgatgtgctggtgcgggccaacggcgttcccacctactttgccgccgatattgcctaccactacaacaagtttgccgagcgcggatttcaccgggtcatcaatatttggggtgccgaccaccatggccatgtggcccgcctgaagggcgccatggatgcggtgggcctggatggcaacaaactggatattgtgctgatgcagctggtgcgcctgatgaaggacgggcagccctaccgtatgagtaagcgcagcggccgggccgtgacgctgaccgacctgctggacgatgtgccgatcgatgccgcgcggtttttcttcaatatgcgggagccgaacgcgacctttgattttgacctggacctggcggtgcagcagagcagcgataacccggtttattatgtgcagtatgcccacgcccgcatctgctcggtgcttaagctggtgatggccgaggggctgaccgaggaggacataaagaacgccgacctggggctgctggtgacccccgaggagcgggagctgtgccgggcgctggggcagatgccggatgaggtgattgcggcggcgaaatactatgaccctgcccgcatgacccgttatgccatggaggtggcggcgctttaccacaagttctaccagaactgccgggtgaagtgtgaggactctgccgtttgtgcggcccgtgccgccctgtgccgtgccaccgccaccgtactggaaaacacccttgcgatgctgaagatcactgccccggaggtcatgtgacggcgggggaaaaatgatttgcaggcgccttcggcggggaagatcttataaaaggctttagttggtacgcctacccggcgggggcatccttttgtgccgacaaaaggatgcaaaaacggttcagggctgcgccctaaagacccggtcgccctgctgcgctggatacgaatttatttttaggctaccgcccaaaaacaaatccgtactgcacgcagatgggcttaaaaagagcctgcggcgcatttttatcg

SEQ ID NO: 329 - DNA, 2154 bp, Unknown
  16S sequences of unknown bacteria
tcgccattgtgcccatcgtggtcgtgttcctgatctttcagctgatcacccggcgctttcaaaagcaccagctgggcaaaatggccatcggcatcgtctatgcctatgtggggctggtcatgtttctgaccggcgtgaacgtgggcttcatgccctccggtcagatgatcggcagcggcctggccggcagcgctgtcccctggattctggtactggtgggcatggtggtgggttacttcatcgtccgcgccgaaccggccgtgcagatcctcacccggcaggtggaggatgtgtccaacggttctgtgacccagaaagccatgatgaacgccctgagcatcggcgtggccatttccgtgggccttgccatgctgcgcatcctgacgggcctgcccatcatggccctgatgatccccggctacatcgtggccctgggcctcaccttcctggtgccccagctgtacaccagcatcgcctttgactccggcggcgtggcctccggccccatgaccaccacgttcctgctgcccctggccacgggcgcctgcagcgccgtgggcggcaatatcatgaccgacgctttcggcatcgtggccatggtggccatgacgcccctgatcaccattcagatgatgggctacctcggcacgcgcaaggagcgcaggctctcggccgcccgcagcgaaagcaccctgtccggcatcatgtactttgacagcgactatgaagaggaggccgccgtatgagcagaaaacagacaccgctgtgccttttgtgcaccattgtggagcgcggcggcggccagcgggcattccgtacttacgaaaagcacggcatcgccctgcactaccgcatcagcggcgagggcaccgcatcttcggacctgctggacctgctgggcttcggcacttccgaacgcgacatcctcatcagccccgcccggcgcagcgccgtggacgcgctggtggaagaaatccaccgggacggctcccacatgcgggccaagggcattttgttcgtgctgccgctgaccgcggccagcgccaagattgccggcgccctgctgggcgcccacatttccaatgcagaggagggaactgccatggagcagaacgccaaaaaacagagcatgattctggtggccgtaaaccagggctacaccgaagccgtgatggccaccgccaaagccgccggcgcccggggcggcaccgtaatccgcagccacatcctgcgcagcgaagaacacgactccttcggcggccccacgttcgccggcgaacgcgaactgctggtcatcgtggcctccagccagggcgagcgcaacgccatcatggaaagcatcgacaaagcccacggcggcgagtcggcagcccatgccattctctactccatgcccatcgagcagatggtgcacatttcctgaaacaaaacggccaggggggaaccaaaacggttcccccctttcctgttttccctccttccgccgccgcttcgcgacgtaaaatccccttctcttgtgaactcttgccaaaagggctccatccgatttgttgaaaacagagtgggtaaaaacgcacaaaaccagttgacagaacgccggatttatagtatattatagacacaaagaagaaaggggtgagtccaaaggacaggtaagaaaagtcttcttccgaatgaagaagcacacagaggcgcgagacccaggcgaagttttcagcaaacccttagacgttccaaaccggcttacgagaagcaacacgtgcaagcgtagaacctgaagcgatttctgttcaccagcacacattggtttgtagagaaacaacaaggaagcgggaaatgttcccaaggatacgcgattctgacgaaaagatttgggttatagatttctaagaaagagtaggtatcgtccattggagaatgtagaacagcagtagtcccccggtcacgctggatggccgggggattgtatttttacaaagaggcgggggcctcttcttttttttgcccttaacaaagaatcagagtggtttttgcccttcttggaagaagggagaacctttgcgccccgcagcggggcggggttttgctcctcttggaagagggggaacggctgcgccccacatttctttttctctcgcgagagaaaaagaaacg

SEQ ID NO: 330 - DNA, 3367 bp, Unknown
  16S sequences of unknown bacteria
accgaagttccatgatacatactcgagattccttgattttacccttgaggatctcataacccttcccggtatcggccgaaaaaccgccaacctcatcatgggagacatttacggaaagcccgccgttgtggccgacactcatcttataagaataagcaaccgcctcggattttgcgacacctccgaccccgtaaaggtggaaatgaagctcaagggaattctcgacccaaaagaatcaaacgacttttgccaccgaatagttcatttcggaagagatacctgctcggcaagaaatccgaaatgcaattgctgcccgctgtccgagctttgcagaaatcacgtcaaataatatgcagtaaaggagacttgaaaatcaagcctccttttttgttattcgacctctgcccaaagattatctatccattcggtattgaccgtaccggcagggcgctcgtcggtgtaatagttcagaaactgtattccgatttttttgaccttggtaatgtcaaatccctccgatgccgtacatcccgcaagaggtatcacaatatgattccattcccctgccgtcaaatccgccgttttaatactttgaacgtttaaatcacagaagcaatcgttccacgagcccgaatatgtgttgtcctcattaacgaaatcccgcgacgaaagtatgatgcgtatatcggacacctcggccatatccgccgcagcgggtataaaatcaaaagatatataatccacattcgaaaaatctgttgttcccggcattttgtaataaaggccgacaccgccggtgttctgcgccttgagacttgcggcgccctgagtttttgacgaataatcggcggttacgctgtctcccgtgtaagcattccaatttctcacggtatcgcagtttgaaatcataaaactgcgagacgtgtcggcattgtttatgggttcgccgctttcgctgtaatagcagacaaaattatccacattaaactccacgccgtccccgtttgaaatattaaaccaggtgaacctcatgccggtgatgttgctccaatcggccgagtcaaccgcccttggaatatccgaaagggcaaagtcgaaatcattgttccagcccttataaatgttgcttgcaggaatgttgaggtcaaagccgtcctgcccatcggttataaaattgatttggaaaaagtcctgtccgcggtcggaggaagcataatctattccgctccaaagcgaaaatctcacgcggttatagggcgttacatttgccgaaatgccgtcggtgtagtacataaaggccatggaacccacacccgccgtgttgtcacggcaattatcgttgttgttgagacacatacttgtgagtcctctcgaatcgttttccgagaaaatcgtagtaccgtagcccgtcgaccaaccgagcgttgaattgcaatcggtcagccaaagctcgccgttttcgacgtgtggtccaacttcaagatagcacacaaaattatcgatgttaaactctacgctctccccttgagaaatgttgaaccacgtaaaacgcatacggcttatatttgacaggtctgcggtatcaaccgccctcggaattgccgaaatatcaaaaacaaaatcattgttccaaccctgtcttatactgcttgcgggaatgttaaggttatatccgtcctgctcggttccgtcaaccttagtgaccaggttcacctggaagaaatcctgctgacggtttgaggaggcataatcaataccgcaccacatagaaaatctgattttgttataaggtgtgagatcggcgctctgacccggtgaatagtcaagtatggccatagctccgaccccggcgcccattgaggtacagccgtcgggatttctcatgcacatacttgtgagcccccgagagtcattttccacaaaaagctcggtagagcctactgctccgaatccgtcggtggaattgcagtcggtcagccaaagctcgccgttttccatgtatggacccaccgttgtcccgcttattgtcgtttcaagcaaacaccaccagtcgacatgcatacggctgttgccgctgcggtttagagatgatggcgaaagccatgccaccccgtctcccgtatttccgctgtctccgggagccgaatcaagcacaagaaatgtatcgtcgctcgggtcatactcggcaagcacaataaaatgaccgtatgccacatgggcaatcgcagcctttccgctttgggaaatataatttttaagggtgtcgctataaaccgtcgcccatgttccgtcatcggtcacctcaaagccgtaggtgtctccgaaggccgattcaagcctcggataaacaacggtgcggtcggttccgccgctgggaaaggttgaaccgttatagccgttaatgttatgcgcccacgttgctatgctgtccacggcctgaggaatatcatcaatgccgctgatgtaatttatggcgttgacagccgaaagaattccgcatcctgtaccgcctatcgttccttcaccgtaggtttggtacctccagcggccgtcatactgactgtatgctaccgcatcggccaccgagggaattgtcattgcgaagaaggtagacataagcagagtcaggcaaagcattgcagataaaattttccgtgttctcattgtgtatcgactcctttagcaaattaaatcctacgaaggatttggtatattataccaatcattttgttaattgtcaatattttacaacgacttaaataaaacttttcagaaaaaaacaaaaccgaacccgtcgaaacaggttcggttaaacattttatacaaaaatcagccgaaatatctcttaagcaaaccggcaaaagccttgccatgccgggcctcgtcgcgagccatttcatgaacggtgtcgtgaatcgcatcgagattaagagccttggcacgctttgcaaggtcggtctttcccatggttgcgccgttttcggcctcaacacgcatttcaagatttttcttggtggaatcggtcacgacctcaccgagaagttcggcaaactttgcggcgtgctcggcctcttcgtaagcagccttttcccagtaaagaccgatttcgggataaccctctctgtgagccacgcgagccattgcgagatacataccgacttcggaacattcgccgttgaagttggcgcgaagatcatcgattatgtcctgaggtactccctgtgccacgccgacaacgtgctcggcagcccagctcatctcatcgctttgctcgacgaatttctcggcgggagccttgcactgaggacatttctcgggaggagtgtctgacgattatgtatctttacattaccttctgaaacatatg

SEQ ID NO: 331 - DNA, 16237 bp, Unknown
  16S sequences of unknown bacteria
gctgtttcgcccacagggcgcgcgcttcgtgcgcccctcgcgcctccagccgctttgcggccttcgattgcgcactgcgcttcgcttcgtgtgctcgccactccagcccttcggggcctccgctgctcgcaagctcgtttgcagttctcctctgtgcccacaattcgcaatagtcgccttgccacgctaccgcttgcaagtctcctttgctcattggacttccgcttcgcctgtttcgcgcactgcgcgcggcgaagctccgtccccactgggcttactacggcctgtttccgccactgacggcggccttcgtgcgcccctcagcgcgcgaaccgctttcacgctttcaagtacttcataaattcgcttttgaactgcgcgaggcgatatttgctgatgggcaggcgttcgccactcttcagctccaattcgcaatagcgcagatggcgcacataggccaggttcaccaacagcgtgcggtggcaataggcaaattggtgttcctgcagcaaggcggccacctgggaaatgctcatccgcacttccacctttttgtgcgcaaagtgcaggcgaacgccccgatcccaaggctccacatacacaatggcgcgcacgttcactttgctttggccttcagacgtgggcaagacgatttcgcgcggctgcaaataggcggcgcagcagtgcaacaacgcttcgcgcagcttttccgcgtccagcggcttagccaaatagcgcgccgccgccacctcatagcctcgcagggccatctcccgattgctggaaatgaagacaatggcggcttcttcctgccccgcgcgcaaagccgcggccaattccatgccgtccatgccctccatcatcacatcgagcagcaaaatctggaacgccccgcccgtttggatggcgtgcagcagcgccccggcgcttgcgaagcaggcgatttccgccggaatttcctccgcgcgcagaatctcctgcgccatctgcgcgatttgcgcgcgatccagcgcctcatcgtcgcagacggcgatgcgcagcggcgcgcgcgcttggttcggcataaggcagcctcctaaaaaagttccctgtttgtacatcgcaaagccgcgccccgccacgaaattcccgcggcggggcgcaagcccattttaataatcccgtatctgttcggcctgcgccaccagcgcgctcacgctttccgccgtttcattggcgcgcaatttgcgcgtgaacaagaggaagcggccattgtcctggtgatagctgcaagtgaccagcgtgagtagctcatcctcatagctcacatccaccggaatatcgtacatagagcgctcgagcacctcatcgagatacgcctggaactccgcctcggtggcgaaatcgtagcgcgccacgtcgaaatacgagctctcgtccgtattcatggaagcgttgaaggcggcgaacaccacatacgtgccgtcctcatagatcgtatcgaactgcacggtgggatattgcttgaggttatcgatgtctcccatatcgtccagcgagccgaacaccgttttgttcttcatgttgtgcccgtggatcacaatctgctgcgaacgcggccacagcgaacagcgcatgtccataaatgccgcgcccgccgcgtcctcctcgttgttgaaattgtgcgtgagatagtattcgttgtcgttgctatagaccacgggttccaccacgctcacgcccgcctgcaaaaagcccacgaacgaaggattggcataatagaaatcgctggtcataaatttttgctgcagggccggcgggggattttggtatttggtgaagcgggaatccatattgggcgtgggcgaaggcgaagccgcgggaaccgccgtcgcttgctccgccgtttccgccggcgtttccagtggggcaaccgtcgccgtgggcgcgggcgtgctgaaaaacgccgcgaacaagccatccggcgtgggcgacgacgtaggcgcggccgctgtgggcgtgggcgctaacgtgggcgacgcggcgagggctggcggcgtttgcgaggcaaacaggttccccgtggccgtgggcgaggaaagcagcgcgttgagccgctgctcgttctcccactggatctcataggaaaccatatcgtcggaaatgttcttgatcaaaatcgccagaaacaccacgcacaggcacgcgctgacatactgaatcgcgcgaaggatgatatccttcgtgctccgctttttccggcccatcgggcgccttctctttgcgttgcgcttttttgcccctgccatagcgctcgttcctccgccttttctgttcatccctcgccatgtcgcgaggaaatttgtgtgcgtatgatatagcgcgtaatagtatagcaaaatatgccgccacattcaaccggaaaagcgtaaaattccgcgcacatctctccccctgtctcaatagcgctttacctgttcggcctgcgccaccagcgcgctcacgccttccaccgtttcattggcgcgcaatttgcgcgtgaacaagaggaagcggccgttgtcttggtgatagctgcaagtgaccagcgtgagcagctcatccgcatattccacgtccaccggaatatcgaacatggaacgctcgcgcacatcatcgagatacgcctggaattccgcctcggtggcgaaatcgtagcgcgccaactcaaaatacgagcgatcctccgcattcatcgaggcgctgaaggccgcgaagatgacatacatgccatcctcataaatcgtatcgaactgcacggtgggatgggccttcaagttgtcgatgtcctgcatatcgtccaacgagccgaacaccgttttgttctccatgttgtgcccgtgaatcacaatctgctgcgaacgcggccacagcgagcagcgcatgtccataaacgccgcgcccgcgccatcgcgctcgttgttgaaattgtaatcgagataataggtgttgtccacgctatagaccacgggttccaccacgcgcacgcccgcctgcaaaaagcccacgaacgaaggattggcgtaataaaagtcttccgtcataaatttggtttgcatgggcggcggagcgttttgatagcgggtgaagcgggaggacatatccggcgtgggcgaaggcgctggcgcaaccgtggcggaaacgtcctgcgcaggcgcggctgtggaaaccggcggcgtgccaaaaaacgccgccaacatgttgtcctgcgcggcgctgggcgagggcagcgcggtgtgaagcgcctccgcggtgggttcttccgccgcgggagaaggcgcggcattccccagcgccgtgggcgaggcgctcaaggcgttgagcgcattcagccgctgctggttctcccattgcacctcgtaagaaaccatatcgtcggaaatgttcttgatcaggatcgccaaaaacaccaggcatgcgcaggcgctggcatattgaatggcgcgcaggatccgctcctttgcgctcctgggccgcttgcccgccgcgcgcctatcctttgaactttgctttttcgctcctgccatggcgtttgttcctccgcattcctccattttgcgccgcgcaagccgcatagatattgcgcggcaatcgcactatatgaaatattatagcaaaataattcgcgcatttcaatgcgcatttcgcaaaaatgccttcatatattttgcgtcattctgaaataaagcaaaaaaatggtcgcccccgaaagcgggggggcgaccattttttgcttgtgcctggaatgttgtccgccaaatgtgaaccgaagcggctcttagaagcgaaggggattgagcttgatgcccgggcccatcgtgctcgaaatcacgacggagcgcaggtaggtgcccttcgcggcggcgggtctggctttcacaatcgcgtccatcagcgcgcggagattttccgtgagcttttcggcatcgaaagaggccttccccagcgggcagtggatgatagcggttttgtccacgcggtattccactttaccggctttgatatcgtgaatggcgcgggtcacatccatggtgaccgtgccggacttcgggttcggcatcaagcccttggggccgagcacgcggcccaagcggccgaccatacccatcatatcgggcgtggccacgcaaacgtcgaaatcgaaccaaccgccctggatcttggcgatcatatcttcggcgccgacatagtccgcgccagcggcctcggcctcggtggccttatcggccttggcgatgacgagcaccttgatggttttgcccgtgccgtgcgggagcaccaccgcgccgcgcacctgctggtccgcgtggcgggggtcgacgcccaggcgcacggagatttcgatcgtttcatcgaacttggccttcgccgtctgcttcacgagggaaatggcttcctcgggatcgtactgcttggaactatcgatcagcttctggctgtccagatacttttttccctgtttcattccttataacatcctccttgtggtgatagcggcacaaagtcctcccacgattggccttcgtcagtctacgacgacaacgcccatcgagcgcgcagtgccggcgatcatgctcatggcggcttccacggaagcggcattcaaatcgggcattttcttttcggcgatttcgcgaatctgcgccttggtgatgttggcgaccttgtcgcgattggggcggccggaagcggtctccaggccgcaggccttcttgatcaacaccgcggcgggcggcgtcttcgtgatgaaggtgaaggaacggtcctgatacacggtgatcacaaccggaatgatcaggccgatgtccttagcggtgcggtcgttgaattccttgcagaagccaggaatattcacgccatgctgaccgagcgcggggccgatgggcggcgcgggcgtcgccttaccggcgttcacctgcagcttgatcagagcggtaactttctttgccatgggaatcctcctcttttatgtggtgtttcagcggagcgcgctttcgcgctcctcccactgattgaaagccggctggccatcaatctgagatgcgcacgacctcgtcatacgctaggtcgatcgagagctcacgcttgagcatagtcacgagcacgcggatgcgcttttgctgggtatcgatttccgtcacgcggccgttccaatccttgaaaggaccggccagaacgcggacttcgtcccccggttcaatatcgacccgcacaatttcctgcgtttgcccgatggaggcaaaatccgtttcagaaagaggcgtgggccgcgaaccgccgacaaacccggttacgccgcgcgtgttgcgcacaacataccaggaatcctcgttcatgcgcattttcaccagcacatagcccggcaacagctttctttgaaccgttttgcgacggttgtttttgatctcaatggcctcctcgatcgggatcgagatttcctggatcatatcctccaggccgttgttctcgatggtcttttcaaggttcgccttgaccttattctcgtaaccggaataggtatgtacaacataccactgtggctggacaagatctgccatactcgtctcctacttttcgttaatgggtgatcagctggatcagggcgctggcgcccgcgtcgatcaagccgatgatgatccccgtcgccaccatgaaggcgatgacgacgagcgtgtagttcacaagctccttgcgggaaggccaggtgaccttcttgagctcatggtacatcattttgaagctgttcgcgattttcagccccaaattcttgaaaaagcgcccgaccttctggaagaaattcggcttcgcagtctcattcgccatgcaattcacacccttcgattatcgcgtttccttgtggctcgtgtgcttcttgcagaagcggcaatacttattcatttccagacgatccggatcgttcttcttattcttgatggtgttatagttgcgctgcttgcactcgctgcacgcgagcgtaactttaacgcgcttatccgatgccatccatgacacctcccaacgtgaattctgaaagccttccaggcacaagcaaataagcccaaaggcagacctttatattatagccaaaaacgccgcgcaatgcaagcaaaaaccaggtggttgcgtaaatttcacgctaaatcacgctttgcgcatccaactttcatccgacgggttggcgcggaaggccagcaggcgctcgatatcgcttttttggatgtacccttcctcgctggccacctcgcacagcgcgtcgaaatccgaaagggaaatgttcttcacccgcgcggcggccaggcgctccaggccgcgctgcatgccatagctgaagatcgaggcgatgcccagcacttcggccccggcctcgcgcagggcttccacaacctccaccaccgaaccgccggtggaaatcaaatcctcgatgaccacggccttctgccccgcttccacgcgtccttcgatgcggttgttgcggccgtgatccttggcggagccgcgcacatagcacatgggcaaatccagccgctgcgccaccaacgccgcgtgcgcgatgcctgccgtgctggtgcccgccacgatctcgcagtccggataattctcgcgcaccacccgcgccaacgcgtcctccaccagatcgcgcgtttgcggataagacaggatcagccggttgtcgcaatagatgggcgaatggatgccgctggcccaggtgaacggctcatcgggccgcaaaaacaccgcgcggatgcccaacagcgccttggcgatttcacgcttcatcatgcttcttctccttccacaaagtccttcacggcgcggcggtaggccgtcaccgggtccgcggcggccgtgatcgagcggcccaccacgatatagtccgagcccagcgcgcgcgcccgcgcgggcgtggtcacgcgcttctggtcgcccacgtcgtcgtcggcaaagcgcacgcccggcgtcaccgtgaggaacgcctgcgagcaggcttccttcaccgccttcgcctccagcggcgaacagaccaccccgtccagcccgctattttgcgcgttttgcgcgtagcgcgccaccacttcttccatggggcgcggaatcaaaagctcttcctgcatcatttgctcgctggtgctggtgagctgcgtcaccgcgatcagccggggccgcgcgcccttcgcgcccgcctccaggccttccagcgccgcgcgcatcatggccgagccgcccgccgcgtgcaggttcaccatgtccgcgcccagggccgccaggttgcgcatggcctttttcaccgtgttgggaatgtcgtgcaatttgaggtcgagaaacacctcgtgcccgcgcgctttgatttcgcgcacgatctgcggcccttcgccatagaacagctccatgccgattttcacaaagggcttttcgttttcaaactggtcgagaaaccgcagggtctcctcgcggcccgcgaaatcgcaggcgatgatcacgtcccgtttcattggtgcgccctccctatgatggattgtaaggattcgatgccgtattgcgccattttgcgcggcaaatcttcgatgatgcgcttgcaggccagcggatccaccaggttctgcgcgcccacctgcaccgccgacgcgcccgccgaaaggtagcacagcacgtcgtccgccgtggcgacgccgcccgcgccgatgatggggatgcgcacggcctcgtacacctgatacaccatgcgcagcgaaaccggcttgatcgctgggccggaaaaacccgccatcttggtggaaacgatgggtttgccgctgcgcgggtcgatcaccatgcccagcagcgtgttggtcacggtcagcccgtccgccccttccgcctcgcacgcccgcgcgatggcgcagatgtccgtcacgttgggcgaaagcttcatatatattggcttgcggcagcgctttttcacttccgcgcacacgcgcgccgcgttgcgcgcgtccgcgccaaaggccagcccgcccccgtgcacgttcgggcaggagatgttaatctccagaatgtccacatccgccccgtccagccgcgcggcggtttcggcgtattcctccagcgaaaagccggaaatgttcgccagtttcaccccgcggtacacggcgttcagccggggcaattcctcggcgatcaccgcgtccacccccgggttttgcaggccgatggcgttgagcaggccgcagtcgcattccgcgatgcgcggcagcggattgccatagcgcgcgctcagcgtcgtgcccttgagcgcgatggcgcccaggcaattgatgtcgtaccacttcgccatttcatagccgaagccgaaagtgccgctggccggcatcaccggattgggcagggcgatggaacccagcatcgtcttcacgcgaaccgcacctccccactgcgcatcacgggcccgtccacgcaaatgcgctttggccccgcgagcgtttcgcacgagcagcccatgcacgcgccaaacccgcagcccatgcgcgcctcaaaggaaagctgcccttccttgcccagcgcgtgcacggcccgcagcatgggctccggcccgcaggcgaaataatagtcgtaatccaactggcgcagggcgtccgtcacaaagccgcgcacgcccgcgctgccgtccgccgtggtgatgatcactttgccatatcgcgcgaattcctccgcgtaaaagatctcgcttgcgcggttgaagcccagcacgcagcaaaacgcctcgccgcccagccgcttggccaggccatacagcggcggaatgcccacgccgccgcccaccagcgcgatgcgcttgccccgggcgggcgcgaggtcataaccgttgcccaggccggtgagcacatccagcttttggccaggcgtcatttgcgccatttgcgcggtgcccttgcccaccaccttgtaaatgacgcggatccagccctctccccagtcgcacacgctgatggggcggcgcagatacagcccgtccagccggatgttgatgaattgccccggcgcggtgatggcgctggcgtcccccacgagcgtcatctcatacacgtccggcgcgagaagcgcgtttttgccaatttcgagcaccctatcccctccgtttataaaaaaagacggccctgaaagccgctatacgcccgcgctttccgccgccctgcacatcttcgcaacccccaagcctctgtagatgggtatatcctaacacgcaaacgcgcgcttgtcaaggaaaattcgcgttacccatccgcctcttcttccgccaggcgcatttcgcaatcgctgatcacgatatactgcccctcggccagggataccgccgtctcctcgtgtaccatcacgaattcttcgagctggctgcgcgtgccgatggggccgtcatagatcgaatagcaggcaaaaatcgcgctttccgcggggcaaacgcggtattgcccggccggaatctgccggcccacccaatagccgcccacgcccagcgccgtttgcgcggaaacttccacctccggcgcgagcgcgatgggataggcgctcgcttccaccagttgcatttcctggccgctgagcagttccaccacgctctggcaattgatgatttcgaattccagcgtatcgcccgtttccccgtcgcgcagggtaaaactgggcaaaagcgccctttcgctttcccgcagcacatacacgccgggcaggatatcccgccccgccagatacgtgcccgcgggcaaaacctcgcccgccatttcgctttcgatctcttcaatgcgcgcggaaatcgcgtcgcgggccacgatcaattcgtccagcgtcgccgtgtccaaatccaattgtatctccatctccgccgccgcggtgggcacaaccatcgccgccagcaagagcgccgcaatccgccaaaaacgcatgtataccttcctcgcacttttttcgcccgggccagcagtccagcccgcactttattataccgtattccatgcgtttatgcaagaattcctcgcgttttttcccaaaaagacgctttcccgcctcgcctgccctattgcatattggcaaagcgctcgactgctttggtaaagcgctcgatggtcttttcggcatcgccatgttccaatccgtcgcgcacacaatgctggatatgcccttccagcaccacctgccccacccggttcagcgcggatttggccgcgttgatctgggaaagaatgtcctcgcagggtacgtcttcgtccaccatgcggtcgatggcctgcacctggccgatgatctttttcaagcggcggtgcaaattcgccgcatccatacattgcttcataaaattcgcgcgctcctttcgccgcaacaataatttagcacaattgcgtcaatttgtcaactctttctacgatttcatccgcaatccgcgccaaaaggcattgacggttttccccaggcctgttatactaaaaacggctccgccaagacgcgcgaaagaaggggccctaaacgcttttgcgctgaaagcctcataacaataagccttcataagcaaccccattccagccaacccgcgaaaaggacggtgcaagcgatgtttcagtccaccggccgccgcctgatttggcggcgcgacgcacagaccctatggatcgaaccctggggcgaaaacagcctgcgcgtgcgcgcgactgccgaagccgccatgcccgaaatggattgggcgctgttgcccgcgccggaagccgaagtggaaatcgccattggcgatggacaggcttccatcgtttgcggcaagctccgcgccgccgtttccgccagcggcaaaatccgcttcttcaaccagcgcggcgagctgctgctggaagaattcgtgcgcgatatgagccagcccgaattttccagccacatgcgcatcgccgcccgcgaattgaaagggcacatcggcggcctatacgccgccacgcagcgctttgaatccgacccggaggaaaagctctttggcatgggccaataccagcaggggattttcaacctgaagggcgcaacgctggagctaatgcagcgcaacgcgcaatgctccgtgccctttgtgctctccagcaagggctatggcctgctgtggcacaatcccgccgtgggcacggcgacctttggcaccaacatgacggtgtggcaggcggaatacacccgcctgatcgattactggatcacggcggacgacgcgcccgcgcccatcgtggagcgctatgtgcgcgcgaccggcctgccgcccatgatgcccgaaagcgccatgggattttggcagagcaagctgcgctaccgcacgcaggaagagctgctcggcgtggcgcgcgagtaccgccgccgcggcctgccgctcagcgtcatcgtgatcgacttttaccactggaccaagtttggcgactggaaattcgacccggcgtactggcccgatcccgtgggcatggtgcgcgaactgcgggatatgggcgtggaggcggccgtttccgtgtggccgagcgtagaggtgagcagcgaaaattttgccgaaatgctcgatcggggctatctggtgcaggtggacacgggcgtgcgcctctccatgcgctccgcggactggaccatcttcttcgacgccaccaacccgcaggcgcgccaatacgtgtgggaaaagtgcaaaaagagctattacgacgcgggcatccgctacctgtggctggacgccgccgagccgcaatacccttcctggctgaattacggcgcacaatcctaccgctatcaactggggccgcatccggtggtgggcaacctgtatccgcaattgttcgccaagggcatgtacgacggactgcgcgcggcgggcgaaacgcaggtgctttcgctggtgcgctgcgcctgggcgggcagccagcgctatggcgcgctggtgtggagcggcgatattcattgtagcttcaaaagcatgcgctggcaaattgtggcgggcctgcagatgggcctggccggcatcggctggtggaccacggacaccggcggcttcgattggggcaacatttacgacgagggtttccgggagctgatggtgcgctggttcgaatggagcgcgttcagccccgtgctgcgcatgcacggcgaccgccagcctcacccgctggacggcgaatccggcctcaccgcctcctgcggcgcggacaacgaggtgtggagctttggcgaggaaaactaccccattttcgtgcgctacctgcgcctgcgcgaggccatgcgcccctatatccgcggcctgatgcggcaattccacgagcggggcacgcccatcatgcgcccgctgttctaccactacccggaggatgccgaagcctggaacatcgcggatggctacctctttggcccggatgtgctggtcgcgcccatcctggaagcgggagccgtgcgccgccgggtctatctgccccgcggcagccgctggctcgagtgcgccacgggcctttggcacgagggcgggcaatgggtggaaagccccgcgccgctggataccatccccctgttccgccgcgacggcgttttcgtgccggggctatctggcgagcgctgagaaaatccccgcgcaaaaggcattgacaaatcccgctcctaccgttatactatatagcaacatcatctgcgccttggtgcgcgcgcggcttgccgcgcgcctgaaaagggaagcgggtgcaaatcccgcgcaggaccgctactgtgatggcttcgggcgttgcccgatcgttccgccgcgtgccactgattttttgggaagggcgcggagccatatgcctcagccaggagacctgccaagcgcgcgttggaacatccctcggcatcaggggcattccagatccgcgcgcccacagcgcgcgccggtgtgtttctgttgcccgcgtccatggcaaaatggcgcgggctttgtgttgccgcgggtttctatcgccatctcgggccgcgcgcccggtgggaatacgcggcaacgccgcacaaggaggtctccattcatgaaaaaattgttggcccttttgctgattctatcgctcgcgctctccggcgcggcactggccgaaaccacctatccgttcgccacggaagatatgaacggcaacgccgtcaccattgaagagcaaccggacgtggtggtctccctcacgccgagcaacacggaaatcctctacgcgctgggcgcgggcgatttggtgaagggcgtggattcctattccaattatcccgcggaagcgctggaaaacgccacggtggtgggcgcttacgcggatacagacatcgaagccgtgctcgcgctggaaccggacgtggtgttcgccggcaccggcaccttgcaggaagaatcccgcgcgcagctcgcggaagcgggcgtggtggtggtggaaaccgaagccgtggactatgccggcattcccaccagcatccagcggatcgcggatatcctgaacatcgacgcgcaacccctgctcaccgaaatgcgcaataaggaagccgcgctgctggaaaccgccgccgaggcgggctcctgcaccgtgtatttcgccctttcctttggcgaatacggcgaatggagcgcgggcccgggcacctttatcgacaccatgatcaccatggcgggcggcgtgaacatcatggacgacccggcgcttccctggccgaatccttccctggaaagcatcctggaagccgacccggatgtgattctggtttccggcggcgctgaaatggcccagctcttcctggaaggcgaggcctatcaggatctgagcgccgtgcaaaacgggcatgtgtatggcgtggacgccgatatgtccaaccgtcccggcccgcgcattgtggattcgctgggcgaattcgtgaccgcgatcaacgacgcgttggcggcggaagaagaataatttcctacggccgcgcggaatccattctccgcgcggccgcgatttccatttcagggagttgtgagtgtgcaaaagagctatcgttttgcgggaaagcaatccgccgcgctgttccttttcctggccgtgctttcgctggcgctgctatttgtgctgtgcatgttcggcagcgcgcatctgagcatcgaagaagtgctgcgcggcgcgctataccgctattttgccataggcgaaaaatcgggcaacgacggcgcgattgtgaatctgcgcctgatgcgcacgctgatggcctacatcaccggcgcggcgctctccgcctccggcgcgtgcatgcaagcggtgttcggcaaccccatggccgagccgcacgtattgggcgtttcctccggcgcggcgctgggcgcggccattgccacggtgctggggctggaaacttccggcctgggcatcagcgcgctgagcctgtgcgcctttggcggggcgatcctcgccgcggcggcggtgctcgcgctctcccgcatcgatggccgcacgggcaccgcttccctgctgctggcgggcatcgccatgggcgcgttcctctccgccctgctctcgggcctgctggccctcaaccgggaaaaggcggattccgtgtatctgtggacgatgggcagctttgccacggccacctggggcaaaattcgcctggccgcgcccgtcacggcgctgggctgcttgaccgccacgctctacgcccgcgatttgaatgtgatgctcgccggcgaaaccgacgcgcgcacgctggggctcgacgtgcggcgcacgcgcgcgctggcgctgctgctttccacgctgatgaccgccgtcgtggtgtccatgaccggcgtgatcggctttgtgggcttgatggtgccgcacgtggcgcggctattggtgggcccggatcatcgccgcctgttgcccgcgtgcgtgctgatgggcggcatctatctcatgtgcatggacacgctggcccgctcgctgttttccagcgaaatccccgtgggcgtgctcacctcgctggtgggcgggccgttcttcctgttcatgctgcgcaaatcgcgcggcgcgcggccccggcgcggaaggaggcgggccaaagcatgattgaaatccgcaacgtctcgtttggctacagcgaagacgcccctgtgctcaaaggggtttcggcccaatttttgcccggccgcgtgacgggcgtcatcggcccaaacggctcgggcaaaaccacgctcttccgcctgatcgccgggctggaagcgcccgacgcgggcgaaatcaccctggatggcgagcccgtgcgcgccctttcccccaaggccctggcccggcggctggccgtggtgccccaaagcgcgcgcatggattttgatttcaccgtgcgcgacatcgtgatgatgggccgccacgcgcacatcggccgctttcagcgccccagcgcgcgcgacatcgccgctgccgaacaggccatgcgcgaaaccggcgtctccgcctttgccgaaaaattcgtcaccggcctgagcggcggcgaatggcagcgcgtgctcatcgcgcgcgcgctgtgccaggaggccggaacgctattgttggatgagccggtttccaacctcgatctccagtaccagctatccacgctgcggcaaatgcgcgcgctcgcgcgggagaaaaacgcctgcgtggtgtgcgtcctgcacacgctcaacctcgccgcccactattgcgacgacatcctcctgctctggcgcggcgaagtgtacaaaagcggcgcgccggcagacgtgattacccccgccacgctgcgggaagtgtacggcgtggaggctgtcgcctgcccgctccccggcggccaaaccgaagtggtgccggtgtattgacgccgcgcaccggcagccaaaagaaaaatcgggcgcgccggatttttttctccggcgtgcccgcgccatttgggaaagcaggccgatgagcgaagcgcccctacagcctctcgcacacggccttgcaccgcttcttgtggaaggcaatgccgtaggccaggatgtcctcccgaccttcgttgcgcagccgctcgccataccgccgcgccttgatctgctccagcgcttttgcgcatgcttcgcccaatccctggaaggtgggcgcgtacttcacttcgacaacgatccccgcgtccggatcttccggctcgatcaggatgtcgctgaacccttcgcccgattccgcgttcgacaggatcagccacgtcggttcgcttcgcagcaaccccaagagcaacccatggtagaaat

SEQ ID NO: 332 - DNA, 13366 bp, Unknown
  16S sequences of unknown bacteria
cgccgttgcatcgcctcgctctgtcccctggccgggcttggctcgcccactgggcacataccaccccacgctttccagcctatccccgccccggggcgccgttgcatcgcctcgctctgtcccctggccgggcttggctcgcccactgggcgcaaaacaaaaaagacagatctgctgcaatctgtcttttttgtctcatggtatatgtaaaacggcttgcgccgcagtcaggggggctttctctctatggctgtatcataccgcgcctttgtggcatgggtttgtcttgcctatgaaccttcgttacggcgttttggcgtttgcctccgtctccgccgccgtcacggtttcgacgctgctcaggctgtcgtactcgatggcgccttccatggccccatcgctgcgcaaaaccagccgcccgccgttgttgccgctgctgccccattggccagccgccgcctttaccgccacgccagagccgccctgcacctgtgcgctgtccgtaatgcagatgtacgcctccgtgttggtaacatacagcgccgcgccctgggccgccgtcacccggccgccggatacccacagctctgccatgccgctgtccgcctgcgcctgctctgcctgcccggcgtccggctgaaataccagcacgcccatttcactgccctggctttccagcgccgtctgcgttagggaaaggctgtttgccccctccagcactgcgcacaccgaggcataggccaccatctcgctgtcctccagcgtcagcgtgcccctggaatacacgcagggcgcatacgcaccgctgctgcgcccttctacgccgctggcctggatggtgccgctgcccgtgcccgcatacagcatcgggctgtacgccccctgggtctcaatcgccaagttttgcgccaatatgcagccgtttgccgcggccatcaccccggcggatgcttcctgccgcgtggtaatcgtggtatcggataccaccacgcaggcattgtctcccaccgcggccagtgcggatgcgcccttgccatccgtctcgatggtgcagttttccagtaccaggttgccgccgctctgcgccaccagcgccgcattgaccccctctatcgcggatgcgctgtccgccgtgccgcccgttttggtgatggtgcagtttctcagcaccacgctgccgccatttttcacgacgagcacgctttggtccgcttcatcggcgcacagcgtctgcccctccagcgtcaggctatcgccatctaccaccgtaacagcgcgcagcacagcgctgttctccgccgtcgctgcggcctgggcctgcggctctttctttgccaccgccccacaggaggaaagggcggccgccgccaccgtacaagcgcacagcgccgccagcttgctccaagcgcttttcgccatcatgccctctcctcctttccgttttgtatcatagttgtatcataccgctacattgtggcgaaagatgggcttttctatgtgcttgttttccactttttcggcatttccctgtgcatagcgggctctgtgttccaccttccaaataatttcggaaatctgcccggccaaagccgtgccgccctacaaaaaaagccggcgttttcatccggctttgcccagccttaccatacccctgttaaatcaaatgccggggtatagcggctgtccgcggcgctgcgcgcctgcccgtagccctcgaaccccagccgaaccgcataatcgcgcacgctgtctatttcaaaatccgtcacccggcggtcgatctccttgtaggccgccgcgcggtagcaaggcgtgtattggctcatcaggctcaaaaggatgtgcctgggcggcgccaggcggctcagcgcttccagcaccgccatcgaatccttgcggcagccgggcagcagcagatggcgcaccatcagccccctttgcaaaacgccgtttgccccccattgcaaaggccccgtctgccggtacatctcctggatggcggcctgcgccacgtcaaaataatccgccgccccgctgtatgctttggaaagcgccgcgtccttgtatttgagatccggcagataaatttccaccagcccgtccatcatccccagcgcctccgggctgtcatagccgttggaattgtacaccaccgggatgcgcagccggggcttggcccgctccagcgccctggcaatctgcggggcaaaatgcgtcgggcttactaggtccagcgtttgggcgccctcatcctgcaggcgcaaaaagatctctgccagctgcgccgtgccgatctccttgccaaagccgcgctggctgatctccgcattctggcaaaacacgcagtgcagcgcgcagccggaaaaaaacaccgcgcctgccccgcgctctccgcaaaggcagggttcctccccggtatgcagcgccgcccgcgccacacgaaggcgcgcgcccatgccgcattggcctctgcccgttgtcctgtttgccccgcagcgccgggggcacagcgtgcagcccgttttttccatgcccatccctcctgttttctgcgctctatcatagcacatttgcgcgcagtgccgccatacggtatactaaacacacgcaaagggggcgtttttttgtccattgacattgaaaaactcgtacacagccaacagcgctattttgcatccggccgcacgcgggacattgcctttcgcaagcaggcgctctctcgcctggaaagcgccgttgtgcagtatgaagagcgcattctctccgcgttgaacgaagacctgcaaaaatcgcattttgaaggatatatgacggaaatcggcatggtcaaggccgagctttcctatgtccaaaagcgcttggtgcggtggaataggccgcagcgcgtaaaaacgccgctggcccagtttcccgccaaaagcgtcatcctgcgcgaaccctacggctccgtactcatcatggccccgtggaactatccgttccagctttgcttagagccgctcatcggcgcgctggccgcgggcaactgcgccgtcatcaagcccagcgcctatgccccgcataccgcccaggtgctcaaaagcatgatagaggcctgcttcccgccggagtatgtggccgtcgtgccgggcggccggtcggaaaacctggcgcttttggatcagccgtttcagtttatcttctttaccggcggcgccacggtgggccggtttgtcatggaaaaagccgcccggcacttaacccctgtctgcctggaattgggcggcaaaagcccctgcattgtggacagcaccgccaatgtgcgcctggccgccaagcgcatcgttttcggcaaatgcctaaacgccgggcaaacctgcgtggcgccggattacgtgctcgtagaccgcgccgtcaaagaccaattctgccgcgaggcccagcggtatatcgagcagttttataccaaggacccgctttccaaccccgcctacccccgcatcatcaaccaaaagcattttgaccgcctcgtctcgctgatggagggcgggcatgtgctctacggcgggcacagctgcgccgcgcatcttcaaatcgagcccacgctgatagatcaggtctcgcccgattctccgctgatggcggaggaaatctttggcccgctgcttcctattttgaccttttcagatagagcgcaggccatcgagtttgtcaacgcccgcccgcatcccttggcgctgtatctatttacttcggacaaggcgtttacctcccaggtgctgtcctccgtctcctttggcggcggctgcgtcaacgataccatcatccacctggccacctcccgcatggggtttggcggcgtgggcgcctccggcatgggccaataccatggccgccgcagctttgacgcctttacccacgaaaagagcatcgtaaaaaaggccacctggctggatctgcccatccgctatcagcccgccacccgccggaaaatgcggctgatgcgtcgctttctcaaataacgcttcccatgaaaaaagccccctgcggcgcgttcaggccgcagggggcttttgtgggttgcccctttccgtttcattcatagtcgatgcgctcgattttgaataccacaggccgcgttccgtccgagcagcaggcgatcatggtattttcctccttcatccaccccttcataatagagcccccctgtaatccggtatagatataccgggcgatcgcgtcccacgcttccgagcaaaacggcagctttggcccgcctgccactgtgtttgcatcgccggcggtcttaatcagcgtgttgatccccatatgccaaaaatcatcccgctggtcatcacgcaaaaaacaaattcatcccccacatggtagcatgggcaggggccggcgttggcatcggcgcaatattgccgctgcagttccgggtacagctttttatccaatacagttactttcactttatgcttcattgtctaggcctcctactggggaaatggcagttttcttcccccgctatggaaaccgcaccacaatttttttcttacatcaatcggcgcgaaaaaaaaccgccatggtttcccatggcggcaacaacgccttattcaatggcaatgaggtttttctgcggcagctgcctttgcggcgctttgggcatcgagatgcgcaaaatgccatcctcaaacttggcggatagatcctccgcctttacctgatcgcccacatagaagctgcggctgcattggccggtgtaccgctcctggcggagatagcggcctttttcatcctgctcgtttttatccaggctcttggcggccgcaatggtcagcgtgccgttctccagctgcacctgcacgtcctcttttttaaagcccggcaggtcgatatccaattcatatgtgttttccgtctcgcggacgtcggttttcatgatgtttttggcatgcctgccatacaacggattccgcgcatcaaacgcagacatcattctgaacggttcctcaaacaattcctcgaataagttttcaccaaaaatgctgggcaacatacgtcattcctccattcgttccaatcactcgtagccaggaagaaatctttctctagtagcgagtgtaccccgcgcggcccttggccggcgctttttggttttttcctcgggagcctggcctcttggcccctctctcaaggttcaagtatagaatagcacttttgttagcactgtcaagccttgagtgctaaaattcacatttaatccatttttcttcgtcgttttgccataatgctgcgcagtcctctgcccatccgcatgcttcacaaggcaaaggccaggcttttccgcgctttttcgccccataaaaagagcgccggcctaggccggcgcatggtttgttcgctgttattcctccacgcgaaagctggataagatcgccagcgcttcgctcgtttcctgctctgtcatctccccttccggcgattggcagacaaacgccacatgcgcgctgtaccaaaaggagaattccgtctcgtttacgccgcgcacatcctcccgtgtgccctcataggaagccggcaccaccgcataggataccgagccgtccacatcggtaaactcagagtccgtgttcatatccagccgcccggtcgttttaagcttggccaccataaactcacccaggctcttatgatccgtgccctgtacatagcccggcacaaactgcgaatccgccgcctttgtcacttccacacgcgtcatggatacgctgctgccgccaaagctgtaatccttgggatacgaataaaaagcgtagatgatctgcacgcccctgtcgttttccagcgtcacgcgctcggtctgcgtatccaccctttcctccgtaacgtgccaggtatccgggtaatcaaaggtgaacacaggatacgtcaccgcatttttctcgccaaactgcgtggcgtaatgattgttcagcacgatttcctccggcgtgggctccggcgtctgtgtgggcgcggccgtttcggtttgcgcggggggctcggtttgctgcggggcctgcccgccgcatgcgcttagccccagcgccatcaaaacgcacaggcccgctgccgccagcctgctttttctggatgcttcctgcatctgtttcattgtcttttcctcccctaaaatggtcggccgatattgtatcaccttcgccccgtttggtcaatttcctcccgcatcaaaaaagacccggtttgggtcttttttgtcttggctaatcgcgttttattttttggtacagcaccacgccgccgcccacggccgccacacccagcacagcccacagcacccacatcggcaggctaccgtcgcccgtgcttacgccgcccggcgtctgcgttgccgcgggcgggttggtctgcgccggcgttgtctgcggcgtggccgtaggcgccgcgccctcctctgccagcgtcagctgcaccggcttttcgctttccaccgccacgccatggtagctcatcttggcggtaaaggtataggtgctgggcgtgcgcaccaaataggtggcctcggccgtctgcgcatcctcgcccaccgccgtcggcgtaccgatggcctggccgtttaccataaactggatctcggcgtccgccagcgcacgatccagcgtggccgtcagcgcaacggtatcgcccgctttcagcggctcgtttgccttggcggaaaggcgcagcgttaaagtatccagctgcaaagcgccatcgccctccagcttgcccaaacagctaagcttatgcccgttttctatcagttgagatccttggggcagcgtcagcgtttggtccttttcaatggtaagatcgcccgtcagcttcatctgcccatacaccgtgccggcctgcccgttgaaaaagaggccggtcgggttctgcgctttggagaatgtctcggcattgcctgcatcgccataccacacaacgccgtttatcgtcaggctgtcggcggccggccaattcataccgcccaccgtgcccttggtgatcagcgtgccgcccaaaagctcgatcttgccctcggcagtatccgtctccctgtacatgccggaccccatcgcattgccgtagcccgccaccgccgtgacctggccgccggtgatgcggatcgtgccaaacgggccgctggcccctgcgccgatggccgtggaggcaccgccgtgcgcctgggcatacaccgtgccgccggaaatttctataagctctgcgccggctttgttcagcccgccgccgccaatggccgccgtgttgccatagccgtgcgccgtcacttggccgccgcaaatatagatcggccctgccacagcgctgtatccgccgccgatggctgcgccgtcgcggtttgttgcctcgatcacgccgccctcaatgcggatggtgccgctcttgccggtggaaacgccgatacaggctccgccttgggtttcggccgtcagcttgccttcgccctttaccgtcagccgcgcgccctccggcacacggatcgcgtccgcagcgctcaccccgcggctggcggttgtcaatgtattttcccccgccagcgtcagcgttaggtgcgcgccgctctcaacggcaatgggcggcatcttgcccgcgccctctgccatgtttacgttttccagcgtcatggcgatatcgccgctctgcaccgtgatggtgttggtggtctgcccgccgctctgctttatgcggtaagcgccgctatacggcgtctcctgtccgttttgcacatactttgtttctgtgatggtgatgctgccccctgccagatccagcgttttttcctccgccgccagcgagaaggccggtacgcaccaggccaaaaatgccatcgtcaatacccagcacatcgtttttctcttcatcataaacccatcctgcctttatacagtcgtttggtatcggttctgttctattatgtccattataataaaatatgcgcgcccgtcaacgattttccctcttttcccgccgccagattgtgttaaaatatgggttatgtattgaaatttacacccaataggaagtgaatatcccttgcagtttgccaaccgaatggatgcctttggcgtcggtatcttcagtcagctggcccagatgcgcgcccagcgggtttcccagggcctgccggtggtggatctctccgtcggcgcgcccaacattgcccccgccccgcatatcatgcaggcgctcagccgtgaagcgcttgtgccggaaaactatctctatgccctgggcgatacccaggcactccgcgaggccgtagccgcctggtatctgcgccgctacggcgtaacgctggaccctgcctccgaaatcgtctcgcttttgggttcccaggaagggctggcgcatatcgcgctttccatcgtagacccaggcgacgttgtcctcgtgccagatccctgctaccccatctttgccgatgggccgcgcctggcgggcgcctctctgtatcctatgccgcagcgtgcggaaaacgggtatctcatcgatctggacgagatccccccgtccgtagcccaaaaggccaagctgatggtggtatcctatcccaacaaccccacggcggttttggcgccggatggcttttatcataagcttatcgcgtttgccgccaaatacgatatcatcgttttgcacgataacgcctattcggagttggtgtttgacggcgcttcctgcggcagctttttggcctatcccggcgccaaggaggtgggggtggagttcaactccctctccaaaacctatgggctggccggcgcgcgctgcgggttttgcgtgggctgccgcgccgttgtcgagcgcctgtctgttttgaagagcaacctggattacggcatgtttttgccaatccaaaaggccgccatcgccgccatcaccggcgaccaaagctgcgtggaagccacccgccaagcgtaccagcagcgccgcgatgtgctggtggaagggctcaacgccctaggctggcccgtgcaaaagccgcaagccaccatgtttgtatgggccaagctgccgcacggctttgccgacgaccgaaaattcgtacaggatctgctccgtgaaagcggcctgctcgtaacccccggcagcgcgttcggcgctttgggcaaagggcatgtgcgcatggcgcttgtgcaggaaaacgacgctgtgcagggcgcgctggaaacgctgcgtcaaagcggctttctttcctccggcgaaggccggtaacgcattgccccctccgctgcaaaaaagggcggcgcataccgccgtccttttcctattgcttatgccgcccgtcaagctcagggccgccctgcggggcggcttttttgctgtgcctcggccgcctttttccctcgccctccgcctgctcataaaacgtgctttgctgcttgatagcatgcttcaagcagcaaagcacgcgcagatcctgctcagatttagccggcgaaaggatgtctatggcctgcagcgccccattcagcagcttggcatacatactttcaaacacgtttgtttgcataacgcagcccctcctcggataggctaatccgtatatccgatgtttacattatataatgcaataatctatatgtaaacatcagctatccgttatcatcattttaatgatgaaaggaagaaagcatgctgcgtttgaatgtgctgcccttgctgcgggcgcaggggaaaaccaaatattggctgtataagcagctgggtatgagctaccaaaactttaataggatggtcaacaaccaaaccaaatccattcgatacgaggtcatcgagacgctctgccaggttctggagtgtacgccaaacgatttgtttatttcggattagccgcctagtaggcggcgccgggtccggccttttttcggattcagggcagggattctgccccggggaaatccttcggctatgccccctcttccccattctcctagcaggcggcgccgcgtccggccttttttcggattcagggcagggattctgccccggggaaatccttcggctatgccccctcttccccattctcctagcaggcggcgccgcgtccggccttttttcggattcagggcagggattctgccccggggaaatccttcggctatgccccttcttccccattcgcctagtaggcggcgccgggtttggcctttttctatcctttgcaggctgttctgccccgaaaaggggcttttgttttttcaagccccgcctgcctttctgtttacttcggttttatttggtttcggcgtttctgcacatcctttcttccctgtttgtatccagattcccttcttgttacttatttcacaattttctggacttttccctttccccgctgtacaatacctctgttctactcatactttttcaatcttgtaagaatggggggaaaggagcatgtttaatcccaacgactttttcctgtttgcgctggtctccgttgtcattctatttatattggctcaatcggtctattttctcatcaaggcctggcgcagggcaaaagagcttggctttaccgcggcggtgttgaaaaagactgccgtttccagtgctacctttaccatcgcgcccgcgatttccattctgctgggcgttatcacgttgtccaactttttaggcttgccgctgccctggctgcggctcagcgtcatcggcgcgctcacctatgagctcccggctgctacctcggcggccagcgcgctcggggtttccatcgccacaacggtcacagaccctacggtgtattccgccatcgcttgggtgatgacgctgggaatcatccccggccttatcctggtgccgctgtttatgaaaaagatccagcgcggcatcgtcaacctaaaaaccaaggatgaaaaatggggcgaaatttttatgaccgccctgttcctaggcatgatctctgcattcttgggcatgatctttgcagacatcaataccggcatcgcagggtggatccccatcttcgtcatgctgatttccgcggcgctgatgtgcatttgcggcctattggtcaaaaaatgcggctggcgctggcttcaggattttgccctgcccatctgtatgctggcgtcgatggcgctgtccatcccgttgacctttgcgctcgtgtaaaggaggttttcatttatgaaacaaaaacgatcgtatatgcaatccattcatactgccgggcgcatctggatgctgaccgcgtttgcgctgctcattctggtgcccaccatcatctgtatccattataaatcctggcccggctttggcccggtcttccaggggctgttgggggtagcgcccatcttttggacggtgggcaccatcgaggtgtttacctacacgccgatgctgggcgcgggcggctcatacctcggctttgttaccggcaatctgaccaacctaaaagtgccctgcgcgctcaacgccatgcagtctgccggcgtggagcccggtacggaggagggcgaggtcttatccaccatcgccattgcggtcagctctattgtcaccaccgtaatcatcatcctgggtgtatttatgctcaataccctgcgccccattttggaaagccccatgctggcgccggcgtttgccaacattctgcccgcgctgtttggcggcctggcggtggtgtatgtatccaaggattggaaaatagccctggcgccgctgctcttcatggtggtgctgtttctctgcgtacccagcctggccgattctgtcggtgtgctggtgccggtgggttctttattggccatcggcgtggcgcgcatcctgtataaaaaaggcttgctgtaatctggaaaggaagcgatgattttatgtggtggcttatcatactattggccgcgctgctgttgctgctaggggtcatattggtgcgcaccctgcgctttaccccgccggcagagcgcatcccggaggcgcagcccgtctcggtggatggaaaaaaagcaaccgaacacctggcagccatgatccgctgccaaacggtgtcctcccgcgataaatcccaggaggacggcgcagagtttgaaaagttccggcagctgctgccaaagctctatccacgcatccatgaaacgtgcgaatgtgagcacatcgggcgccacggccttctgttccgctggccgggccggcaggaaggcgcgcccaccgttttgatggcgcattatgacgttgtggcccccggcgatctttccgcctgggaaaagccgccgtttgacggtgtggtcgagggcggttatctttggggccgcggcacgctggataccaaaggcacgctgtgcggcattttagaggcggcggaaacgctgataaacgaaggctttgccccgcagcatgatatttacttttcctttgccggcgatgaggagatcatgggcgacggcgcgccgcagatcgtcgatgtgctggaagcccgtcacatccgccccgcgctggtcgtggatgagggcggcgctgtggtagagcatgtgtttcccggggtggataagccctgcgcgctcatcggcatcggcgaaaagggccagctggaggcggagttttccctacacagccagggcggccatgcctccagcccgccgccgcatacgccggtaggcgtgctggcgcaggcggttacggcggtggagggccgtcccttccccatgaagctcactccgccggcagcagagatgttcgatacgctcggccgccacagcacgtttgtctaccgcatgatctttgccaacctctggctgtttcgcccggtgctggatgccctctgcaaaaagcagggcggcgaaatgaacgccctgatgcgcaccacctgcgcgtttaccatgatggagggcagccgccaatccaacgtcatcccgccccaggccaaggtaggcgccaatctgcgcctcatcggcggcgatacgatggagtctgcgctgcgctatctgcgcgctaccgtgcgcaatccggacatcgatatcacggccgtgcaggggatgaatccctctccctattccgataccaagggagaagggtggcagcggcttaagaccgctatcggccaatcctggccggaggccatcgtttctccctatctaatgatcgcatgcagcgattcgcggcatttctgccgcatctcggacgccgttatgcggttttccgccatggcgctgtccggggaagagcgcgcgctgatccatggcaacaacgagcgcatccccgtgcaaaagatcgcagataccgttgcgttctatatgcgcctgatccgcctttcctaaccgcccagtgggcggcgacttttccggcccatcccttgcgcttggcgtattgcctgccccggggatgggct

SEQ ID NO: 333 - DNA, 4124 bp, Unknown
  16S sequences of unknown bacteria
catttcgccggcagatgctgtcgctgcctttcttctatctcttgtcctccagctgtttttctttcccgttttggtagacatccggtagacatggtagacaggggctggaaaaaaacggaaatcatctgccgccagcgcttaaaacaaactcatctgctcccccttccccccacactcgatagcattggccacctggctcagcacttcattttgcgtatcgtcaaacaaatgcgtatacacctggctggttacactggtattgctgtgccccaacgctttactgattttaaacatgggaatgtgcagctcattggccgcactggcaaaagagtggcgcagcccgtgcagcgtcaaatgcggcaagccctgctcggccacaaatttcgtaaaccatccggacacataatccggtgcatatggctgcccgttggcatgcaccagtacgaaattatccgggttataacccggttttttctcccgcttgagcgcctgctccgctttgatgctccgcagcatatcctccaaatccgtgagcccggaaattcccagtgtacgcatggaagacgtagttttcggccctttgttaatagttacgccgcccacagtcgtgcgggcggcgcaaatagaaatgacaccgtgctccaaatctacattttcccattttaatccacagatttcgctgcggcgcaatcccagataacctgccaattttaccgcaggctccagcggcataccgcgaaccgccgcaaacagcgcacgcatctgctctgtattataaaaactgtgccggggcgcagcctttgccggcgcttccacccgccgggccggattgcggtgaagaacttcctgccgcaccgcacactccaacgcagtaaacagcagctgatgatgtttatgcactgtattgctgcccagtcctgcccctcgcatatccacataataactttgaatttgctgcggctttaattcctgaagtattgttttccccaatgccggcttgatatgatttttaatgatattttcataaccgtataccgtggaacgcgcccggttagggcgcaccacatcgtccaaccaccgatccagccacatgcccacagtcagttccgtgggaatcgtaatttcgctgcgccgttttttcatttcgaaaatccgcagggcttctgccgcagccacatgggtatcgtatgtctttgtctttttcacccgcttgccattcccgtcgatcccataatggaacgtaacataatactttcgctttccctcgtcataggcaatgttgttttcaattctttttctgctcattgtaataacttcctttcttttatcatgggatagtttcactttaggcagattttccgcacttttccagatgtttgttctaaaatccctcaggttctttcgatttctttaaattttcccaggacgcgtaaaaatttcccgatttcactggaaagtgtgctatactatggcagaacccacaaatgaaacaacagaacggagaattgtatgacatacgacagtattattgcaggcgccggattcgccggcgcggtaaccgcgcgcgtactggccgaggccggccggcgggtgctggtgctggaacagcgtccccatgtgggcggcaacgctttcgactgtctggacgaatccggcatcctgattcaccagtacggcccccacatcttccataccaatgacaaaaccgtgtttgattttctctcccgttttaccgtctggcgcacctatgagcacgaagtggtggccaatctgcccgcagaaaacggccgcatggaactgccggtgcccttcaaccttgcttcgctgcgcctggcgtttggcccggagcgttctgcgcagcttcaggaaaaactgatttccgcttacggcgcaggcactaaggtcaccatcctgcagctgcgcgaggctaccgaccccgcgctttccgacctggcccaatatgtatacgatcatatttttgttcgctacaccatgaagcagtggggacagaccccggaggaaatcgaccccgccgtcacggcccgggtgcctgtgttcctttccgaggactgccgctatttccaggatacttatcagggtatgcccctgcacggctatacggccctgttcgaaaacatgctccgccacgacaacatcgatctgcgtctgaacaccgacgccagggagcatttgcgcttcgaaaacggaacgatcctgctggacggcgcggaatttaccggcgacgtgatttattccggccccgccgacgaactcttcggctgctgcttcggccgtctgccctaccgcacactggatttcaaatttgaaacgtttcccgccgacgttgtccagagtcacggcactgtcaactacaccatggatgaagattatacccgtatcaccgaattcaagcatctgaccggccaggtgcgccccggcatcacaaccacagtaaaagaatactcccgcgcctacaccggcgcagatggcgagatcccctattatgccatcgccaacgccgataccgccgccctgtacgccaaatatgccgaaaaggccgcccagttcccccggctgcatctgctgggccgtttggcggaataccgttactataatatggacgcgattgtcgctggcgctctggcgctgagccggaagctgatcggagaaagcgcatgctgaaagccgccgtattcgacttggacggtacgctgtgcgctgtgggcaaagcgatcctgcccgaaacgctggcgctgctggagcagcttcagcggcgcggcgtacagctggcgttgtcctccggaaaaccgatttattacctgtgcggccttttgcggcaaacaggtctgcgggacgtgattctgatgggcgaaaacggcgcatcggtgcagcgaggcgtggatctgccgccccggttccactaccgcatgccggtggcgccccatacccgcgccgccctgacgcagctgcaggaaaagctggaagctgaattcggcccgcgcatctggtttcagcccaatcagacggaggtgacgcccttcttctgcgacgaaaccacccatgctgacctgcgcacttttctggcccaggagctgaacgcagaaaaagcgggcatcaccgtgtacgatcaaagcgactgtatcgatctgtgtcccacagggctggataaaggcagcggtctggcgttcctctgcacgcgcatgggctgggaactgtcggaaaccgccgccgtgggcgacggcgtcaacgatgaaccgatgcttcgcgccgcaggctgttccatcgggatcggccggcagcccgtggctggagcgcagttcaccgttcccaccattcaggatgccattacatacctgctcaccttgtaagtaaaatgggaaaacgccttcgcttttgcgaaggcgtttttttattttttgcgtttgttgtatccggccatgcaacatttgctctgccctacacagtcagtgtagggctttttttcaaaagccccaaaatccgactacataaaggagaaatcgacttgaagtatacaaaaaattatcaattgaatcaatgggatgccgccgaccgcgtcctgcgcaccgactttaatgcagacaaccagaagctggacgcagccatcgcagaagcaaaagctacttgcccttatgtgcatctgctgacagcctctcttccggcggatgctgtgcagttggacttggatgtgtccaccctggatctgacccggtattaccggctggatctgcacatcacgcccaaggccggggcagattatgccgacgcgattatgctgcgctgcaacaatttgagcgagggctacgtcaacgaggacaaggcccacggctatctggcctattgcgcgctgggcagcatgacggaatatttctgccagctctgtttccatgtgtatctgggcagcgccgtcatgggcagcgtgacttatggctgcctggattatacttattgggaaaagggccttgtgcactgctccgacacgccggcgttctacggtttggcactctccccggccgagatcacttccttgaatctggtttccggtaccaacgggaaactgctgggcgacggattgtctgttcagctgtatggattgaagaaataaa

SEQ ID NO: 334 - DNA, 4763 bp, Unknown
  16S sequences of unknown bacteria
taaagatgataatagtcgtgaagaattagttcaaagcattgacttttccggagccgccgaaagggtgaccgacgccgccaaaagccttgcgggcagcgtttcaaagcaggtgggaaatctgacggaaaaggctcaggcagcagctgcggccgcagccgaacaaaaggcgtctgctccctctgttcaaagcgcaccaacgtcagcccctcaaaagaccgcaaaagccgctcccgccgctgccgtcgaggacagcgaccttatcatggaaaaaatcagcaagctttttgacatgaaggaaaagggcatattgaccgagcaggaatttaacgtgaaaaaatcggaactgctcaagaaaatgtagcaaaggcggggcgaaaatggaagaaaacaagaaaaattttgacaaccgtatcataatcgccgccgtaattgccgttgccgtggcggcagttgtgatttacggcatattcggcgggaaaaagagcgaaaagattgatttttcctcgcttgccgtatcgagcgaaagcgatgaatcgttagaacagcccgagtccttagagcctgtttcggagcagtcggccgagcaatcggccgtccaaagcgaaccgtcggcaacaccgaccgtttcccaaagcccgccgcagcagccgacatccgccgaattttctcttcccgacagcattataaatgcgcttaacacaagcaaatcgggcttattcggcgcaaacgttcccgcgcctaccgattattttgagggttgtgaaatttatactgtcaacggccttaatattctttacgaattgtggagcgacaattcaaagctgccgaatgcagtcatttgtgattgcagcgtcctcttccccgaaaaagccggatatacggcagccgaactcaaagaaaagctcggcagctgttttgaaagcgacggtgaagatcaggtggacggaggctacgatttaattgcttcttggaatggatatggaattaggttttcgggagctgatccttcatatatttcctatgtagcaatttctaaaacatattaaaagaccgcccgagcttgaaaaacaggctcgggcgtttttgatattaaccataacgcacatatccgaacacgcctgaaatgtcctattaacggtgcttttcggtttgtcgtcgcatataggcgtcggccttatatgttccttcgcaccgaaaatccctcgttactatactcatttcaggtcaaagaattttgtcggcaagaaaaattctcacatacaaggcaaaagcgcagttcatcctgtcggatcaacgagcattttaacgcagaatgtggggatttttctccgtcaaaatcgtattcgtatatgtgcgttatggttataagaaacaaagcggaaatcacaataaaaaagcagttcgttttaaaacgaactgctttttggtggagcatagcgggatcgaaccgctgacctctacactgccagtgtagcgctctcccagctgagctaatgccccaaatttttgccctctctctgacggcaaaggtatattaccacaagagaggacaaattgcaagtctttttttaaaaaattttcattttattttttctttgaggttttgtgtgaaaatctttattccgtaaccgctattttagacttcttccacctgccggtttggatatacacaacgccgataatcgccgacacaatgggagcaaatcccatggcagccgcaattcccgtaagccccatgttaagaccccagctcatggagaaaatataggccatgggcacacggaacacaaaggcgtttatggccgaattcacaagagaaaacatggtgtgccccgacccggttgcaagtccgtttgtgcagaagaaaacgcaggcaaaaagatagtcaaagctgcaaagggaaatatacttggcaccgatttccatacattgctcgtaaagctcaaggtcggttcccgaaagagagtttttattaaggaaaatacccattatctgattcgggaaaagatttacaagcccgaaaaccaccaccgaaagggcaagagcaaagcccataccaatccacatggtcttttttgcgcggtcatattttttcgcgccgatattctgtcccgccatggaggaaatggacgaggaaagggctatacagggcaatataccgaaggtgttgagcttttggcctataccgagaagggtggttcccaccgttcccgcaatggcgtttgaaatgccggtcagggcaaggaacgaaaggccggttatggaaaactgaacggccgagggacatccgattttgaaaatcagattaagcttgtccttatatattttaaaggatttaagcttaaaatcgaatatgaaatcacttcttttaagataaatcatggaaagcacaaagctcagcccctgggcaacaacggtggcaagagcggcgcccagcgagcgcatacccatatatttgacaaaaactatgtcgagaataatatttgtgaccgtcgcaatggcaacgaaccagagaggccgtttgctgtctcccatgccgcgaagaattccgctgacggcgttatatccgaaaataaagatatatccgaaggagcagcaaagcagatagttataggcctcgttaaaggaaatatcgtcggtgccgagcagccgcaaaatcggcgcattgagcaaaatcatgagaaccgtcagcccgacgctcacaaaggcgaaaaaggtaaacagcgtacttatggtctttttttggccgtcgttgttttttgctccctgatactgagcgacaagaacggtggcgccgacaacaaatccggtgacgatgttggttatcagcatggtgacctgaccgcctatctgaacgccggaaacacccaccgggccgacatactgacccacaacgaccatgtcaacgacgctgtaaagcgcctgaagcagatttgaaaaaagaaacggcagcgaaaaacttataagctgttttacaacactcccctgcgtataatccttctgaaattttgacattaaaacttttactcccttatcttgtttgtccgtctccgaaaatgacgtatttatatgatgtaagttctttaactcccatgggacctcttgcatgaagcctgccggtggaaattccgatttcggcgccgaagccgaattctccgccgtcggtaaaacgggtggaggcatttacataaaccgccgccgaatccaccgcttttgtgaatttttcggcgttttcggaattttcggttataatgctttcgctgtggccggtggaatactttgcaatgtgggaaatcgcctcatcaatattttttacaactttaaccgaaataatgtaatcgagaaattcttttgcgaaatcctcctcggtggcgggcacaacgcagtctccgagaatttcggcacatttttcgcatcctcttatttccacattctttttgtcgagaagggcttttgccatgggcaaaaattcctttgcgacagcctcgtgaacaagcaggctttcggcggcattgcaaaccgataccctttgggtcttggcgttataaacaatggcggcggcttttttaagatcggcaaactcgtcgacgtagatgtgacagttgcccgttcccgtttctataaccggaaccgacgaattttccacaaccgcctttataagacccgctccgcccctcggaatgagcaaatcgagaaggccgcttgccctcatcatttcgtttgccgactcgcggctcgtgtcggtcacaaggcaaatgcagtcctcgggaaagcccgcgtctttaagggatttactcatggagcttgcgatggcgatattggaatttatcgcttcctttccgcctctgagcacaacggtgtttcccgccttgagacaaatggcggcggcgtcggccgtgacgttggggcgagcctcgtatataatgcccacaacgcctatgggcaccgaaattttgctgattttaaggccgtttgggcgctcgaaagagtcaagagtcctgcccacgggatcctcaaggcgggttatctccaccatcccctccgacatggaggtcagacggtcgtcgtttaacataagacggtcgagaagtccctccgaaaggccgttttctctccccttttcaaggtcggtcatgtttgcggcgagaatttcctcctcgtcgtcaagaagcccctttgccatgtaaagcaaagcggtgtttttcatgtccgcatcggccgccgaaagaaatttttccgccgcacgggctcttttgcaaagttccttaaccataaattcagctccttttttcggccttgaaaagcgtgccgacctttttgccttcaaaaagcttatacatttccgacggctcttttccgcacatgacaacggtatctatcccgcgctttgcggcatattcggcggcctcgatttttgtcctcatgccgccggttcctctgttcgttccggcgccgcccgaaatctcatatatttcatcggttattttatccactcttgaaataagcttggcgtttttgttctctctcggattgctgtcgaaaagaccctcaatgtcggtgagaataatgaggaggtcggctccgcacacggcggccaccatggccgaaagacggtcgttatcgccgaaaacaatttcctcgaccgccaccgtatcgttttcgtttatgatcggcacggcgcccatttcaagcagacactcaagggtgttcattgcgttttcacggcgttttccgtcctcgatacagtctcttgtcagcagcat

SEQ ID NO: 335 - DNA, 8930 bp, Unknown
  16S sequences of unknown bacteria
gatcacgtccgaaagcgtgtctccccgctcttgcgcatccagaaccatttctgtcaaatcccggcgtactcgttcctgatcatacgcagagagtgatgagccgcgcagataacagatcatatccgtaaacacaccctggttttctgcaaaaatctgtttatccaacgtattgttttcccgattcagttcctttcttttctgatacatgcgttgtctcctccgtttgaaacagcatcccaatcgctctggatagttcccgccagctgccgtaaaactgctccatttcgattcgtcccttttcggtaatagaaaaatatttgcgctttggccccacaggtgattgtttatagtctgcctgaatcagtgcattcctctccaaccgcagcaacagcgggtaaatcgtgccttctgaaaggtcgaaaaggccatacgatttgcacttttccactatttcgtacccgtacgtttcgttttcactgatgatcttcaaaatacatccttcgagcacccctttgagcatttgggatggaatcacgttcccgccccctatcttgtattgcatggtaggttatctatattgtattgcataatagcttgcttgtcaataggcttagtataaaaagagcgcatggaatcttccatgcgctctttttcgttatttttccagctttcggtcgtaatacgaggtgtgcagaagagcttcggaaatgggactgagtggttctttataaaactcacggtagatcgtctgaatctccggattgtcgcaggagttgcgcagggtcatccgctcgtcctcggaatataggctggcaatacgctgcatccggatagcatcagtcaccggaattgaatgacactggggctgtcccgcaccgctgatgcagccgccggggcaagtcatcacttccacaaaatggtactgcgacacatctccctgcaggaacttatcagcattttccgtcccatagaccaccgcgattttcagcgtcagccccgccacatcaatgctggcctccttgacgcctgtcatgccgcgcacaggggtaaagttcagcagcgtttccggcggtttctggtgcgtcagcacttcataggcatagcgcagcgcagcttccatcacaccgccggtattgccgaagattacgccggcgccggtacccttgccaaggatatcgtcaaagggcagatcgggaagatcattaaagtcaatcccctcttcctggagccagtgcgccaattccttactggtgatgcagtaatcattgtcccgaatctccggacgcttgagcagacggccagccgcattgaactccggccggcggatctccgccttttttgccgtacagggtgtgacaaccacattgacaatacgggacggatccagctgctttttcatggcaaaataggtttttatagtgggaccctgcatcccaatggggcttttggccgaagaaatatttggaataaattccggatggaacgtttccacatacttgacccaagccgggcagcaactggtaaattgcggcagcggcgcgctgccggtagtgatacggcggatcaattccgaaccttcttccagaattgtcaaatccgccgagaatgtcacatcaaacacataatccgcgcccaaagctttcagggccgccaccattttcccttccacatagcggccgggctgatcggaaaaagcatcgcccaaaccgacccgcaccgaaggcgacgtggaaaatacgacgatcttattgggatcgcggatagcatctttcaccgcttggcattcgctgcgcactgtgatggcttcttcggggcagttggcactgcactgcccgcaattaatgcagattgctgtgtcatggttcttcagcagatcatagtgcagctgcacgccgatctcctcctggcagaccgccaggcaatggccgcacagcgcgcacagatcattgtttttgacaatagcgggattgtctgcctcgaccggaacgcagcaatcgagatgttgaaacttgctcataagctgctcctttccgttcaaatgccaagggctttgcgcttttcaaggatcacctgctccaaagcgtccgccgaagacgacacatcggtatcgacaatcaacttgccgccggtcagatccggcagctggttggtcagcacatccaagatcaccgggctgcccgtgacaaagggcggcagtcccaaatggacggtgaatcccagagccaggccgaagcagccgtccgccagggcctgttcttccagccactgaggcgcagagagcaccagcggaagctgcggcagatcgacgcccagcaattccgcaatttcgccggccagcagatccaaccgcccaatagccaggcaggggccgaaattcagcaccggcggaatgctgagctgctggcacacggccttcaaattcggcccggccagttctgcagcctccggagacatcaggccgcagttttccaaaccgccgcaggtgcagccggcagccagtacgatgatatctttcgcaatcagctgcttggtcagctccacagtgaacacatcgtggcccttggcacgcaggtttgagcatcccaccacagcggcgactcctttgattttcccctgtacgatcagatcaatcagcgggcgataacttccgcccaggaaagagcgcagcgtctcttccgtcacgccggtgatagcattgggataaccgtgctgcgccatgggattaacgcggccggcactgcttctgcccacctccagcagcacttgagtcagggctgccttcagcgtcggatcactgacgcgctccagcgccttcgagcagttggcagcattgaacaccccatcttttcgcccggcataggactgaacggcctgatcaataatgtattcgctgatctccttcttcttggcaaaatcatacggcacatactcagcatttttctttttcgccacatcatccagacagatctgtggaatctgcagcgcatcacaaatcggctcgattccgggaatggtgcagttgaattccgacagcaccaaatcaatacatcccgtgctcagtaccgcctcgctggtatagttattaccagcatggccgcaaaatgcttccgtgcatgcatccttgcgcacctggaagtcctgtccaacgcaggtgcagcccacaatacggattgccttggcgcccacagcgcgagccttctcctgcgccgcaggagaaaccaacgcttcctgcagatggttgaacagcgcctgctgatggcctgtgatcataatattgatgcactctggatcaataacccgcaggcccacaggatcaaagccgatcttcgattcgcccagcagaacgtcgttgatcaggttggtgagcaccaaaccgtaaatgcccgtggaaatccccagacgcaggcagtgcagcagcatattgaccgggtcggagttcaaattcgtggaagttttgaccacggcgttgaacacttcgtcctttgcgccgccgggcaggatccccaacgctttccatttctccacccgcatgggatagccgactttttcgaccagcttcatcttttcctctataggcttatgtagatcggccaaaacggcgtcagctacctgtccggcgcggtcccaatccgtaaaaccggtaatgccgaacagtttggacagccggtccagcgcatggatccccttcagcggttctttcttggctgccgtctttttcagctgtttggccgcattctccaccacatggatatagcagccagaaccggccgccaccgaacgcaggaaattgcgcgcggcgatggtatcggcatcagcgccgcagacacctctgggccgcgctttggagatccggcagggaccattggagcacagccggcagcatacaccctgcgctccgtagccgcacttattctcctgcgtgatcatccggttgtgggacacttccatagacaaccctttcagataggtttccaatggctggtccgcactggcgcacatgtttctctcatccattttccaagtacccctttctatttcgttttgccgccccatgcctgcttccgggttctcccttccccaaacacgccgaaaggcgacaaaaaagcccaaaaactttttgaaaatttttgggcttcgatgccatttgaacgaccgatatacgccgttgcatatcagctgttattctgattttacagtaattctaatcgaatcatagcaactctgccgaaagttgtcaacaaatttccacgactttcccgcattgcccacctaatttatacagatgcgacaaaagaacccgtctgattttgtcgtttcgataccgcactgccggtccgcagagaacgccgggagacgcgcttacagatgagcgtcgataatcgctttatattcctcgatcgtacgcacacccaccaggcgttccacttccttgccatccttgaacagcaccaccgtggggatgctcatcacgccaaaatcgccggccaggccgccttcttcatccacattaactttacccacactggcacggccttcatactcctgcgccagctgctcaatcgtgggacccaccatgcggcagggtccgcaccaagatgcccagaaatccaccagcgctacgcttttctcctccaggaatgcacggaactccgcgtctttcaaatgccgcactgcttcgtttgccataataaattcctcctgttttttctatttgtatatgattcacttaacatactcgttttattccgggcgccggtccagccaggaaacagccgccaatgcggctacctgcccttcaccgacagctttcgcaatttgatatggctgccctgtacagtcgcccgccgcatacaaggcgggaaaattcgtttccatccgcggtgaaacacggatatggccatcctggatcgcaagccccggaatcagatccataggcgccacggacgcacgcagcaaaaacacgccgtcgcaggcaattttttctccatctgccagcacatgggtaagcaccgtatcgccgcccaattccagcgtcttgatacggataaaaggaatggtgccaaccagcttcccctgttccggcctccgggacagatacactacaatgcagccgatctctttgagatagttggcttcttgttccgcgctttccgtttcaccgtataccaccacacgctttttccgataaagcattccgtcgcaggtggcgcagtaactgacaccgcggcccatccactgctgctccccgggaaatttttctccccggataatgccgccggccagaatcagtacacgagactccagaacggtttccgccgcgctgagcatccagctctttccgacgtacatggcagcgatcagccgcttttctatccattctgcaccaagccccacggcctgtgcatgcatgcgctccaagagctcggcaccggaaatatccggcagcgctggataattcggcacatgcccggaacgatacagcggattgtcctggcaggcgtttgatatcaccgccaccgttttattccggacgcgggcattgatggctgcagacaatcctgccggcccaccgcctaagatggctatatcatacatgacttggatcccctccgtccgttgcatatgcatcacttcgccaaaaaatggaatattttctttcattatacatggtttcccgtaaatttccaccccttcagcaaaaaagctttttgccacagcggcagaacgcagtcagctcaactttaaaatctcctttttcagctttgcgataatttttttctcgagccgtgaaatataagactgcgagatccccagccggtcggcgcactccttctgggtttgctcctgcccgccgcccaagccgaaacgcatggtgatgatttccttttcccgctccgacaacttttccagcgcctgatgtagaagttttcggtctacatcttcctcaatgggacgcatgacaatgtccccgtccgtacccaaaatgtccgaaaggagcagttcgttgccatcccaatcagtattcaacggttcgtcaaaagagacctctgctttctgcggcgcgcttttgcgcaaatacatcagaatctcgttttcgatgcagcgggaacagtaggtggccagcttgatgtttttatcgctgcaaaacgtgttgattcctttgattagtccgatggtgccaatagagatcagatcttcaatattaatgcccgtattctcaaaacgccgggcgatatagacaaccagacgcagattgcgttcgatcagggtagatttgactgtctcatccccctcgtccagccgtttcagcagcagggcttcctcctgccgcggcagcggcggcggcagcggatccgttccgccgatatacataatttttcccggtgcaggacggtgcagcctgttccaaagggcacccaaccggttccagagtttttgcagcgtttgtttcagatttcccataatattgccttttcctttctgtccttcattccactggtccgccccacagcgcatcatactcctgcccttccgataccggcgtaggcgagagcgccacagtaacgcgttcggctttccagcagccgatccggacatgctccgccgtatatcccagcaacaacccggaggccgtacccacgctgcgaaagggcagcagccgcagcttcggtgcattttccacgcagcgcagcgcttccagcgcctcctccgggcgttccaaaaaaggctgcgccaaataggggcgtgccgcttccggccaggatgaagcaaaccgtgtcccctccgccaccagcaccggcgcgccggtcagcggatcgcatagcgtattcccgctgtcgcgcagcacgcgcagatgcacgcgcgttcccatgatctcgcactccgcctccgtcagctcccccaatacggcatgatgcagcctcccccgcgaaaaaagccacagcgcgccgaaacacagcgccgcgctgcaaaaaagcaggccgaactgcacaggcaggagatacgccccgcgaacataatactgcgtctgcatccaaaaaccgcaggcgatcacacttccagccagcacacacgacaaggcaaaaaacaccagacacaagcgccagaagcactctccccagccgtagcagagcagcaccagcagtcctccaaacagaagtttgcacggcggccaccccaaaaacacgccccagggaaaaaacactgccgccgcataaaatccgcccagcgcagctgtgggaagcaggcgataaaattttcgttctgcgccggcaagatagcccgtaaaatacagcagcagaccatcgagcaacgcattgagcagaaaaacgctgtctatgtaaatgaccattcaaactcacccgaagaacagtataatagcttgttttctgaaaaagcgtcgcaaaaggggcgcgccaaaaggcgcaggatttcgccagaacgaaaaaaaccgccgcatactccaaagagtatgcggcggatgtcacacttccctcatattgctttcaaactatcgcccagcgcagacaacagcgcatccatttccgcatctgtgcccaccgtgatgcgcagaaaccggtcgattcccggagtgttaaaatagcgcaccaggattttccgctcccgcagcgccgcaaacagtgtgccggcatcctgttccggatgcgccgcaaacaggaaatttgttttagacgggagcacaaaaaaacccagttctttcagtgcctgcgcacttcgctcccgggtagcgacgatgcggcggcaggtatcctcaaaatacgcccgatcccgcatcgcagcagccgcccctgcctgagccaggcggtccagcgtgtaagaattaaaggaattttttaccgtgctcagcgcttcaatgagaggctgctgccccatggcgaacccgatacgcagccccgccagcgaccgagacttggagaaagtctgcaccaccagcagattggggtagcgctccaccagcccgacagcgctttcgcccccaaaatccacataggcctcatccaccaccaccaaggcagcggtgtgctcgcgcagaatctgctccacctgatccagaggcatcgccatcccggtgggggcattgggattggcaaacacgatgcccttatagtcccctgcaaacactccggcatccagcgaaaaatcctcccgcagcgctacggcatcgtaaggaacagcaaacaaatcagcgtagaccggatagaagctgtagctgatcttgggaaaggcaatccgatcctccggggcaaaaaacgccaggaaggccaaggccaacacctcatccgatccattgcccacaaacacctgctccgggccgagtccgtaaaattcagcaatcgcgtcgcgcagatcgccgcattccggttttggataccgccgcagcgccccgtctgctgctgcggcgatagcttccagcactcggggggagggcggatacgggttttcatttgtattcagtttgataaacgagccttcttccggctgctcgccgggaacatacggcacaaggtgcgccaggcgccggctccaataagaattcattgccctgcatctccttccagaatgcatttgatgcttttttccgctttgctgcgcggcagcatgatctcccgcccgcagccttcgcagcgccatttgatgtccatccccacacgggtgatcacgccggttttgcagccgcagggatgctgttttttcagttccacacggtcattcagatgcagatccattttttccaatcctttatgattcaatttcgcgccgaagggcgcatatagtggtatatcaatctttatttcatgccctgaaacggcagacaggatgatcaaattgttattgaaccgcccttaccttcccgaaggaaggaacgaaagctaccgcaaaaatgccgaggcgctgctcaccgtgagcga

SEQ ID NO: 336 - DNA, 1935 bp, Unknown
  16S sequences of unknown bacteria
aagtctcgggcggacgctttaatgaaaagccgggaatctcactcccgagaaaagtcatcgctgttatatcagcgattatctcgatagtcatcgtctttttcgcggtgaagcagaccgatctcggaagcgtgctcgacggcggaacgactggacagctgatttcagcggcgtctctcgcggtgtcgctcaccgtcttggcgttcgcgctcggcggcggcagggacagattcgcggctgttccggcgagacggcactcgaaaaggtcgctcgtcctcgcggggatatctgtggcgctggttctgccgacgctgattctcggcgggattttccttgacgacaggaagtattattttatctctctcgctgtgctcgtcgaggtgatggcggcgttcttcatcctttttgaggggcgcagaccgaaatcgcgggagatcgcggtgatggcggtcatctgcgcgctcgcggtcgcgggaagggcggcgttcttcatgctgccgcagttcaagccggtcgcggcgatagtcataatcgccgggatgtcgctcgggggcgggagcgggtttctcgtcggggcggtcacgatgcttgtgtcgaatatgcttttctctcagggaccgtggacgccgtggcagatgttcgcgatggggcttgtcgggcttatcgcgggcggactatccggatttctgcgcggcgggaaggggagactctgcgtgttcggggcgcttgtcaccattgttgtctacggcggactgatgaatctctcgtcggcgctcatatgggcgagacagccggacatcagagtgatactgacatattttgtcaccggattccctatggactgtgtccacgcggcggcgacggcgctgtttctgtggttcggcgcggagcctatgtgtgagaagctcgaccggcttcgcgtcaggtacggattgtttgaatagaaaaaccgcgggacgatcagacgatcgcctcgcgggatttttttctttacttttcttctatttcgatttcagctttcggaatgtctccgactccgttcagaatatagttcgggcggtacgggaacttgttcatcgtctcaatcgacgttacgccggagagcacaaggacggtatcaagctcgctctcgattcctgcgatgatgtcggtgtccattctgtcgccgattatcgccgcttccgcgtgatggcaggcgagcgttttcagcgcgtggcgcatgatcagcgggttcggcttgccgatgtagtacgcgctgcggttggtcgccagctcaatcggggagatgagcgcgcggcaggcggggattattcctctctcgcccggcgccgtgatgtccgagttcgttccgatcagcttcgcgcccttgaacaccagctcgacggcgcgctcgatcttctcatatgacagcgagcgtgtctcgccgaacacgacgtaatccgggttgtagtcgttcatcgacagaccggcgtcatagagcgcgttcacgagtcccggctctccgatgacatagacgcttccgcccggacactgcgacgcgaggaacgccgcggtcgcgagcgcgctcgtgtagaagtgatcctcggagatgtcaagccccatgcgcccgagcttctgcgccagctcacgcggggcgcgctcggacgagttcgtcaggaacaggaagtccttcccgttatcaacgagccagcggtgaaattccggtacgccctcgagcaggcggtttccgtgatagatgacaccgtccatgtcgcatatgaaggcctttttattgtggagagcttcgagattcgtgatcattttttagtcctttcgggttaattgatttcttctaaactgtagataaacttgtcaatagctttcgcgatttttatgcggttcatctcgaaacgcgccgcgaagccgttcaggatcgcgtcgtcataatcaagaccgccc

SEQ ID NO: 337 - DNA, 7338 bp, Unknown
  16S sequences of unknown bacteria
ccggcagccgccgctattcggcgtgcggtatcaatagcataagcgtgcggtaagctccgctttgcagcactaaactcttatccccgtatgtgtttatcatactgaaatatgcggtgtccccgcaggagagcgcaaagccatctttacggctgcccacctgttctcctgcactgcgcacgctgcgcctgtctttaacaatgaattccccttctgtcataatatgttcgcttatcatcagcggaaaagcgccttcggcactatacgataaaatttgcggcgctctatcggcagaatatataccatactcgctcttaaattctacaagctcaagcgacggtattacttcagatgcaccgagtgattttaatgccgacactgcggcgccgtttacgacattaagtccaaagcctgccgtcacacggcagcctgctcttacgaattcacacagccagccgagattgccgacagctatttctttcccgcctgctttatcgcttttactatcgctgtttctgcgcaaagccctcgcgatttcatcaaaatggtctcttacgtatctatcctctgctcccatagtgacattcgatatgtaaggaattattgatatttttttgccgcgtctgctatcttcttctgcacatatactataaagaagcgcctcgtacctttccgagcctctttctatacacttttccatatagtctttaaccggaacaagaacacatatatcatcagcaatttctgctgctgattccagtgcgcgcctgatctccgcaatcgtttcgccgcagaatttatgtacatatatataagtgcgcttagcgctttgcacatttccgcagatcatatatgatgcctcgtttttcaccgaattcaggcacgcagcaggcaatattctccttccttgctcgcgttttctttctgtcagcattgcaagcgcttctcttctcatcgcgtttatcgccgacataggaatggatatattagaatccgtattgacataaatctcgtcagcaaaaaatatactgccgcccgtctttgccagctgcgcccttatgcgttctgccgtcacaggtctatttactgcggcttccgtcatacactcagattcaacgctcacttctataacgtcattatctaactcttcgatttttacgctgcccgtttgctctcctttatctttcggcttttccgatactgtgagcaccgcccgcgcgcctattcttgcggcaaatttcatagaaacagcgctgcgctttacagtcagctcatttccgtccttgtcaagcatatatgaaagtgctgctttttccatcagcgctctgtccgttatcttatacaccgcatcacctgtgcgcacgcttccgcgtatatcacctatgataaggtgcttttctccttcgccgctgcacatctgcggcaattcttttatatatgtaacgacattccccggcatatcatcattccgtatctctattccgtcaccgagactgatactctcgcccttgctgagcacaatttccacaagatcgcccttgcttcgcacagggctgcgcttaactacgctgcctatttttacaccctgatgcttagaaaggccgcccgacatcaattttttacccggattttcgtgaaaatatccttccgtaaacccgcctctgttaaatatctgcttgagcatgcgtctgtcatcgtctgcgactttatagaatccctcacgcatgtacatatctatatattttctgtaaatcgaaacaaccaaagcgacatattccggcgatttcatgcgtccctctatcttaagagaagctatatcgcagtcaattaactcgcctagaaaatccacagtgcagagatctttaggactaagcttgtatgaagtgccgattatgcctgcgctgctctttttcatattttctgccgcctctacgccattgtttccttcatatcggccttttatattcacatatggcagtctgcacggctgtgcacaggctccgcggttgccgcttctgcctccgcgcattctgctcatttggcattgtcccgaaaagcagaagcacagcgcgccatgcacaaacacttcaagctctgtttcaagccccatttcctttattgccgcctgtatttctctcatatcggcaagcgagacttcgcgcgccagcaccactcgttcaaagccaaaccgtgctgaagcaattacaccttccttactgtatatcgtgccctgtgttgaaaaatgcagcggaaaatcaggcatcgcctcacgcacaagcgcggaaaaccccagatcctgcacgatgagcgcatctacgccaatctcataaagatattttgcatattcgagcgccgcctccatttcatcatcgaaaatgagagtattcatagttacatagagcttaacatttcgcagccgacagtattcggcagcctctttcatttccgagttatcaaaattgcccgctccagcgcgggcactgaaattcttcccgcccgcatagaccgcgtctgcgccgctgttcaccgccgcgcgcaaatgctctatcgtgcctgcaggcgcgagcagctccgttctcttccttgatattccttttacagtcaaattattttccatttttatgcccgtttcggtttaaaattctcctttgtatataatactatcattaaaaggaggacgcaagctatgaataccataaaagaatatttcaaaaacgaaaaagctgcttctgcaattctgttcattgcgataaacgccgccgttctctacattctgtacttttttatcaagaatctcggctctgttttagacgctgttcattccgttgtttccagcctgttttcggctttttcaccactttttacaggccttatcatcgcttatcttatatcgccgcttgtcagttttatcgatataaaattgacaaggcgcttctgttttgctccggaaaatgaccccataaagcgcgagcgtatatataagcgctgctacctcatcagcactctgattactgtagttctgattttttcagctgccgcggcaatcatttgcgcctttgccgttctgattgccggaagcctcgatatcggcagcttcagtgaaatgatttccgtagtatacggttatttttctgctgtaaaaagtacagtttcaaactatatctccgctcttcccgacggcagcatcaaagaaacagcttctgccctctacacttccgcatattcacagcttttcaaaagcttttccggcggcaggctgcttgaaaacctctcgcagataggcagcacagccctcaatatcggacttggttttatagtaagcatttatcttttaaaggataaatcgtttttcaagcacctctggcgcaagctacttcatctgcttcttccacagaagcaaaacgctgtattcactgagattctgcacgacattgacggcgtgctctcgatgttcatacgcggcgctgtcatagacgcgctcattgtggccctgctttcttccctcgcgctctctctttacggtctgccgctttctgtattcgttggctgctttgccgggattaccaatataatcccatattttggtccggtgctcggtatgataccggcttttgctgccggcgcgctgacagaaggggtcggtttcggcgccggcgccgttatcattctctttattgtgcagcaattcgactgcaatttcatatatcctaaagtcgtaggcagtacaacaggcctgcaccctcttttcatacttctttctgtaagcgttatgggctactacggaggtatcacctatatgatacttgctgttccgcttgcaggtattataaatgttctcataaagcgtttttttatttctttttaatctgattttttatttaaaaaattttagcataattttgggctaatttgctgtttttccttgcaaaatctttacttgtttgctattattaaaaatgttgtctatattaaggaggtacatcatatgctaagcagctttacaagccaattaaaatcagaattcaaaggatataacaaggcaaaatttacaaaagacctgatggcgggcattaccgtcgcggccgttgcccttcctctcgcgcttgcatttggcgtaagctcaggcgcagatgccgcggctggtcttataacggcaatcatcgccggttttgtaatgagcctgctcgccggcggttattaccagatatccggacccacgggcgcaatggcagctattctcacatcacttgtcataaaatacggaataaacggtgtgttcgtcgctaccttccttgcaggcgttctgcttttcgcagcaggtgtcctgcatctcggcaggctcacatcgttcatccccgctcctgttatcacaggcttcacatccggaattgcggtaataatcgcacttggtcaaatagacaacttttttggcactgtaagcgaaggcgcctcagctatagaaaagctgggaagctacatatccctcggctttaagccagacttcctttcggtgggcattggcgcgttcgtcgttgtttttatgctcattttcccgaaaaaactaaacgctgttattcccgcttcgcttctcagcatcataattacgactgctgtctgcatatttgcggatctcaatatcgcctctgtaggcacaattccgcaaacactgctgccggaaagcagccttaaactctcagtactcaatttttcaaacatctcgcgcctcattatgccggcgttcagtatcgcagccctcggtatgatagaaagtctgctatgcggcgccagcgccggtcaaatgacaggtgttcgtcttgacagcaatcaggagttgatcgcccagggcataggaaatatgcttcttccattcttcggtggtattccggcaacagcagcaatagcacgcacgagcgtagcaatacgttcaggcgcgcagacaaggctcacaggtatatttcactctgtcggccttctcgtctcaatgttcgctcttgcccccgttatgtcaaaaatcccgatgtcagcgctcgcgggcgtgcttatggtcacagcgtggcgaatgaacgactggaaaaatataagatacatattctctcacaaattcaaaggcgcaataatcgagttcatcgcgactatgttcgcaaccataatattcgatctcaccattgctatcgcgatcggcgtactcataggcctcatcttcctcgtactcagactttcatttatagaaatcaattatgaaaaggttgataccgccaagctcgatatcaaagacgcggagctcatcgaacgctataataacgccattgtcgcttacataactgggccgatgatttttgccaatacgcagagcattgccgatatcgaagctcatatcgaaaacgcagacacgctttttctctctatgcgcggtgtgtccaacattgatatttcatgcgcgcaaacgctgcgcactcttatagaatcgctgcgcagccgcggcatagatgtcgcgctctgcggcttaccggcaaaggcctacgaaatgatgaaaagaacagatcttgataaatttatcggcgaagaaaatttctactggagtgtcgccagcgcactcataacaaagcgtcctcttccggattgcagaaagcgcatagcataagtaagatgctgcacataatatctgctttttaactaaaatgtaaaatttagaacaaaaaggagcgcgattccacaagtgaatcacgctccttttatattcttttatgcaatttatacctttgctcttttatcgcttattcgactgtctccaaatcttctgcgcctctgccgccttaatgagctcgtctctgtgctgaggatgtgcaagaccgatgagcatttccgttctctcccatgacgaacgtccggcaagattggcaatgccatactcagttacgagatagaaagcctggcttcgcggatccgttacaatagagccgtcggagaatgtcggcttaaatcttgactgcagattgccctgcttatcagtaaacgacgaagtcatacatataaacgccttaccgccctttgactggaaagcacccgtcagaaaatcgagctgacctccggtaccgcttatatgccttgtaccgccgctctctgcacagatctgcccgtaaagatcaacagctatacagttattgatagatacgaagttatcatgctgttttattacatcaggatcgttgatgtacgaaatcggagccgtaacaacacccggattttcatttgcccagtcgtaaagatcctgtgagccgatagcaaatccaaacatacctttgtatctgtttatcgtctttttcttgtttgttattcttcctgctttatacatatcaaggtatgcgtctacgagcatttctgtatgcataccaagatcctttaaatcagacttggcaatcatctgaccgatagcgttcggcataccgccgatgccgagctgtatggttgagccgtcaacaagctgctcaacaacgatcttggcaatagcctcatcgacgtcagtcgccgccgggctggcaagtgtcggaagcggatcgtgcttgccttctactatcatatcaacttcagatatgtgaataagctcgtcaaaaccgccgtacacgcggggaagagcttcattgatctcaagaattatgatgtctgccttgtcaagagtttctctcgcaatcgagttgtttacggagaaattgaaatatccgtgattgtccataggcggtacggccatcatagccacatttacatcgagatacttagtgtagtaaggacctacatttctgtacaccatcggtatgtaattgcagaggcctctgtcgcagagctttctctcatacccggaacagtgccagctattatatatgaagtgttctctctcgggatcgcattcaacggtctgcatcggctgcataatcaaatgtcccctgatttttacatctgtaagctcatcttttctctttgcaagtgccgcatcaagaagctgcggaaaagcaagacccaccgaataatctacccagtctccgctcttaactgcttttacagcctcttccgccgtacgaagcttattcttatattctgctttgaaatccatttatcttttctccttatttaatataactaaataaattgtacatacttatacaattatataatatatggaacttatctctttcgtcaatagctttgatgattttttaacaaaaaatgcgccggcaaaaccggcgcaaattttcatattaacttgacgctattccgcaaatctgtaataatactattcctctacgatatccataacatcaattttgtcggcaaagtgaagcgtcgctt

SEQ ID NO: 338 - DNA, 2637 bp, Unknown
  16S sequences of unknown bacteria
aatttctacaagccaatgtctaccagacaatagggctagcgccctccgggggcccgattctttcttctccagcgaagaaagagtcggggaagaaagacgccgccaaaggcggggggcggtccggccgcaagcgtccggccctagcatttgctttgcaaatgcttttttgattgaacgcgaaaggggctccaagaccgcccctttcacacgatccctgccaggagctcgcctgggctgcgtccgtcatcgacgccgcacactgtacggggtaccaggcagatttgtgcgtgcatccgtgccctggcagccggtgtgcagaccgcttgccgctttgctgtagcttacgaggatacgggggtggcttgggggccaccgtggtcagcagcctgcggcgtcgaacggagtcacgctgctcgtaggcactcgcagcggtgcacaaattcttggttcccctttcaggggagcctttggctggtgcggcgcaccaggtgcagtgcagtccttcggtgctttgcattttatgacgaaattttaagatttctgtgaggcttttttagatttctctccttgccgggcggggcggatgctggtataataatacccgatcctgatgccctgcgcaaagtgcggcggggcggaaatgagcgttgcatggaatttacagaagttttaaaaatatttttgacggcgatgctgcctgtcgtggagctgcggggggcgctgccgctggccatcgcgaagggaatgcagccggtggcagcgctggcgctttgcaccgccgggaatctgctgccggtaccgtttatcattctctttgcccggcggctgctgggctggatgcggcggtttgcctggctgcagcggttctcaaactggctggagcgcaaggcggagcgcaacagtgcgcggctggcccggggcgaattcctggggctgatgatcctggtggccattccgctgccggggacgggggcctggacaggggcgctggtggcttccctgctggggatgcggctgcgcagcagcttgccggccatttttctgggcgtcgtcatcgccgggtgcatcatgctggcactgtcactcggcgtgaacgccgtcatttagccggcctgtggcgcggcggaaaggagcgaagcgggttgcggaagctttcctatcgcaataaagtacacttgaagcagactgcgaaggcggtcggcgtgcttttgctcgtcctgctgctgctgggggggctgtatcttatctatatgcagcgcttcgtcgtctatcaccgcgacggggtgacatttgatttttcaaaaaccacggcggaaattcccctggcggatgctgacggcagcgacaccccggcgctgcaggaggttgagatccattatatcgacgacgctgccaccgggacggcgcagcgcatcacgggctattacgtcacggggcagatgctgcgcagcgacctggaaggcgtccaggcggcgctgcaggcgctgcaggagccctgcagtgtcatgctggacctgcggggtaccagcgggaaattctattactcgacgaagatttccggcgcggagacttcggacctggacagcgcggcggtggacaccctgatctccgacctcaagggccggggcttctccctgatcgcccgcatcccggcctttgccgacacagcctttgctctggcgcatatggactgcgccctgcagctttccagcggcgccctctgggccgacagtgacagcgtctactggctcgacccggccagcgccacggtgcagggctatctgcagcaggtctgcaaggagctctcgagcctgggctttacggaggtcgtcttcgacgacttctacttccctaccagcggcaatatcgcctacgaatccagccagacgaaggcggagatcatccaggacgcagccacggcgctgcgcaatgccttcgccgccagcaatctgcacatctccttctgcgtccaggacgcggcggcggcgctgacgggcgtcaccgggcggctgtacttcgccggcatccggggcgaggacctggagaccatcgccgccgcggcggcaggaagcgtcacggagcctgcggcccagctggtgtttttgacgacatcgcgagacacgcggtttgacagctacagcgtcctccggccgctgctggaggaggagacgccgccggatgcgacgagcttgccgccggagtcgggcgatacaagcagcgacggcgcgtcgggggatggggcgacgcctgatggggcgacgaccgaaccggatacggggacggaataatgcaatttgaatggatcgcacgcaccggcgggggccggtgcgtgctttttggtttggtggattgtggcgtaacgatttacttccgtggtcgcttttacggtggacccctcagacagcttcgctgccagctcccctttcaggggagcccttggctggtgcggtgctgcaagtgcatacgcgcagcggggctttggttgatgctagaggccaccgactacggtggctcccaagtcaccatcgcagttcgtaagcgcaagcggagcggcgagcggtttgcttaccgggtgacagggtacggatgcaggcacaaatctgcctggtagccgggacagtgtgcggcgtcgatgac

SEQ ID NO: 339 - DNA, 29405 bp, Unknown
  16S sequences of unknown bacteria
attcaatcgtttttcggcatacagtcagtacccggttctttctctcccatggtgaggggacagccggactgaaacgaacaaaaaggggaaacagggatccatccatccgaatagacacaagggaccatctggaaaggagcagacatgaatagaagaaagctcaaaatcgtcagccttctctcggcgctgaccctgctggtcggtgcctcggccggcgtgaacgcgggagccgccccccaggaggagaaccgtctcgccgcgccgcgtattcccgcccgcgtcgtctcctccggcaccgtcaccatcgaacccgtcggggagccccgcgtgaaagacgaatcctgcgccctgcccccggacacggtgatcacttcggctaaccttactcaagtgtttcgctatttggggctagatgaacagacgatccttcctttggatcaaaccgacagtacggagacgcaaagtatatcaacagttggagaacttgagtctattcttatcaacatagaaactatacaatctgcatatagtatgaatgaacctgaactacaaatggatagaacgccatccatttctccgcgtggtattggtatgggttccggaaacattcgattatctgatacaaatcaaataagttcaacatactccctcacatactcttgctccgccaattatgaccgtggcaaatggaccctagtaaccggcggagatgtcagcatatccgagggctctgtcgtaattggcacaaagcataaaatcgacagcaaagattatatccactgtcaaatattgtctgaccaaaccaccatccgaatggattccaccattcatgtgggagcctatatcgtcattgccggtatcggtctgttccgcacgaatagttcaaaaatagaaggaaccaattactggtatatccggcattataaataaattttttgtcttcatattcgcctgtaaagctgcggggaggcttattgtgcttgaattcatcaaaatggtgctgatctcactctgtgtgattgtgttgatcatgctcggcatacgaaagctgtccgacgtatgcgacttgaccggcctttttcgcaaagataaatccggccgcggcaaacgccggtagaatcgcaggcaacgatttaaggcgggtaagggatcttacccgccttcacgtatgggaacaggtgtaaaatgatgaaaaaaacgcccgcatggatcgccatacttttcgttttgtttctgtccggctgttccctttccggttcacgtgaaaacgcacttttcacatacgcgaaaatcgaatcccggaaaagcgaacagctccatacatacgattccccctataccctgtacctgaaaaatgccgacgacacgtatacgatgtttgtgttcgcgtcacccgtccagttttcggaaggcgacggacgctattccctgatcgatcccaccctcgtcgaatcctcgagagaggggatcgcctttgaaaacaaggccaacgccgtcaagacctctttcccggacaaagcggacggcgcgttccggatcgagcgcggcgagacgtttttggaactccggttccgggacggcgctcttcccgccgagccggccaaaaaagcggcggtgtccacgttcgccggggaaccggccgacgccgccatctatgagcaggagggccggagcatggcggtttatccgacccgtaccggtttccacctcgaggtcacctgggacgatgccgcgaaggccgcggacatccccgtgcagatcacctccagcgataccgtccagacctacggcggaaacggcacgctggtgttccggaaaaacggtcaaatcggcgccgtaatcacccatccgctgcttttctctccgggagaggaaacgccgcggtgggatatcgccgggggcattcggatcgaggattcgtcccaggggtgcttcaccttcatcctgccggaggacagggcccgggaagggccgctgaccgccctcctctccttcgatctttacgaaaacaagctccccgacaccggcgccgtatccgcttatcccgataccaacgcctatctcagccccgtcagcctggtcggcagccacgcgcagtggggtaccggcgtccagtatatccggttccggctgcagtacttttgcaagctgaatccggaggatatcctctctgcctcgtatcatttgcgggtcttttccggcagcgggctcgaggagctcggcctatataaaatggaaacaaactggtccagcaccggcctgacctggaacacccgcctgcccccgggcgatctggcggccgaggccaggccctccggaaccggagagctggtattcgacctgaccgattttgcaaaggcctgtttcgccgacccgacctggatgacggaatcgaagggcttgctgctcaaagccgcttctccggagagcggatatgcggtctgcgcctctcacgatcatgcgctttatcccccctatctgcggatcgaactgcgggatctgccggaggagatttatgtgcgggacaatatcaacgaagtcgaaccctcttgaaactcataggagggttccgctttttgcctttcgggccccttttccccggcagcctgtgtccggcgaggcctgcgtttcaggcagccagaaaacgccgtgcagagggataaagggcggcgagggcgcctatccggtgacgacgaccgcttttgagctgaggatgaagtctctcgatacgtccgcacgccaccttcgtctttcgccgacccgaaactgggaccttggccataggtgcggacgattgcggcactgtgccggtgggaagaaaaggccgtgcggggtatccgggattttccaatggaggatcctaccctgcggtttgatccgttccggtatctgcaagatcaccggacaaaaacaccgagggtgaaagctgtggctttcaccctcggtgtttttccgctgtatataaatggcccctctcagaacaaccccgcaatattgaacgccagggtgccgaactgatacacgataaaagaggccacccaggccacgccggtctggaacgcgactgtcccaatcgcccatttccaggaattcatctcccgccgcatggctgaaaacgcggcgacacagggcatgtacaggagcacgaacaccataaaggacagggcggccaccggagtggcgaacacctcctggagcaccgccgtcatctccataccggtgggcagatagaggatcgtcagggttcccaccaccgcttccttagcgacgaagcccgacacgagcgcgaccgaggcctgccagaatccaaagccgagaggcgcgaaaacgggcgcgatggttttgccgatggccgcgaggatactgtccccggtttggtcgggcggcagcatccggaggccgggactgaaagactgcaaaaaccagatcaccaccgacgcggcgaggaggatcgtccccgcccgtacggcgaaatccttgatccgctcatacaggtgccgccacagcgtcttgagcgtgggcaggcggtaaggcggcagctccatgacgaacggcgcatgcccgcctttgaggaccgtttttttcagaaacatggcacagacgatggccacgatcagcccagccgcgtaaatcccaaaaaccaccaaccccttataggcggggaaaaacgcggcgatgaacagcccatagaccggcatcttggccgagcaggacatgaacggtgtgagcatcatggtcatgcggcggtcccgctcgttttccagcgttctggccgccataatagccgggaccgagcagccgaaccccatgagcatggggacaaacgagcggccggacaggccggttttatgtagcagcttatccatgatgaaagcggcgcgggccatatatccgctgtcctccaggatggacaggaacaaaaacagcagcaggatctggggaaagaaggaaacgatcgagccgacgcctttgatcaccccgtcgcagaccaggctgaccgcccatcccgacgcgtgcacactctcgagaccggcccgcacaaagggtgtgaagcggtcggtgatcagcgcgtccagtccttccgtcatccagcttccgaggggcccgaaggtgatgaagaacaccagggccatgacgccgacaaacaggggcagggccagatatttgttggtgacgaccgcgtccaccttgtccgacagagtcagttcccccggtgctttcaggcgggtgacgcattcctcgcagatcttgcagatgaagcggtatttctggtccgctataatcatgtcccgttccccgtagtggctttccagggagcgtacgatctcgtcgatcaggtgcgcctcgccgtcgctgagctcgagcgcctcaatggtgggggtatcgtcatcgatcagcttgaccgccgaccagcgcaaggccatccctttttccatacacttgggctcgataatgtcctcgatgcggaggatcgcctcgagaacccggccggtataaatttcgtcgatcacataggtggaacggtattcgctgccatgatgttcccgccgttcatgcagctggtggctgatatagggattcatcccgtacttgtcgttgatccgttccgccaggcgctgttcgtcaaagggggcgagcacggcgcccgcctggttttcgccggtatggtgggcccggtcgatcaattccttgatcccccgtccccggctggccgccaccgggatgaccgggatacccagatggtgttcaagcttctgcacatcgatctctatcccccggctcttcagcatatccatcatattcagggcgatcaccatgggccgccccaactccgcgagctgaagggtgagatacaggttccgttcaatattggtggcgtccaccacgtccacgatcacgtccgggttatcgttgatgacgaaattccgcgtgaccatttcctccgccgaatagggagagagggaatagatacccgggagatccaccacggtaacatcttctccatgggttttcaggcgtccctccttcttttccaccgtcacacccggccagttacctacatactggttggagccggtcagctcattgaacagcgtagtttttccgcaattggggttgccggccagcgcatatacgtgtttgctcattgttatcgaggcctctcttttggtaatatcgtattacgctgtttcatatccggggcggcgtttcctgtatttccaccgtgatttccctggcctccgaccgtcggatgctcagctcatatccccgcacgttgatttccagcggatcgcccatcggcgccgccttgcgcaggatcaccgtcgcaccgggagtgattcccatatcgatgatccggcggcgaagcgcacccgcacagccgagccccgtcaccacggccgtttctcctatggccatgtcatttaccgtttttttcaaagcaattcccccgtttttgccaccgtttatatatataaagtttagcacaagggccataacacgtcaacgcgaaaaacaacaccttttgacccttttgtaccatcggtaagttccccaaatcccattcgaaattttttcacaatattccacaacttttcacaaggcgaaatgttgacaaaaaatacattttttggtattattggtctggaaaggaagaaaaccgacaaaatccgccgacaaaccccgacaaaaaggaggaatccgccttgaaatccaccggtatcgtccgcaaaatcgatgacctcggccgtatcgtcctgcccattgaactgcgccgcacactcgaggtcagcgaacgggatccactcgaaatctttattgaggataacaccatcattctcaagaagtatcagccggcctgtatcttctgcggcaacgcaaaggatgtcgtcacctataagggacgcaatatctgtccggcctgtatcgaggaaatctcgaagaagctgggcgacgaataagtcgcaaattgcaaaaaacctccgtcagtcttgccgatgacggaggttttttcttttttggggtatcccacacgctttttgacatccgatccggaaccggccgtcatcttctattgaagcctgcccaatggaagaagcctgtccccaagagggcaggcttcttccattaaacggcctcttcgtcaacggagctgctttgcggcccggcggactggtgctccccgtggggagtaccaagacgtgtcgcttctctgaatattgactttatttctatccacactcccctcgcggggagcgacaatgtgaaactgatcggcaatgtcgaacgcctctatttctatccacgctcccctcgcggggagcgacgttcttccgcctttatctcatcggctccttcggtatttctatccacgctcccctcgcggggggcggccttttacccccgacgaggacagtagggaatcgctatttctatccacgctcccctcgcggggagcgaccggttttcccgctggcatccgtgctgtagttgtaatttctatccacgctcccctcgcggggagcgacgaatatgctataaacacaccaaatggagacgatgatttctatccacgctcccctcgcggggagcgacatagagacggcctcactgctgcaaagccgtctctatttctatccacgctcccctcgcggggagcgacaagcaatgaggggattttcaataatcatcgtaagatttctatccacgctcccctcgcggggagcgaccaggctatgaaaccaataaacacaatccagatatcatttctatccacgctcccctcgcggggagcgactgacaggattgaaaaaacaaggcaaactatacttatttctatccacgctcccctcgcggggagcgactatgtaaagggtagcgctcccctttacgacttaaaatttctatccacgctcccctcgcggggagcgacgtgacgttatggttttttaaggagtgatatgatgatttctatccacgctcccctcgcggggagcgacctttaaaaactgaaccaaaatcatgcgcttcatcaaatttctatccacgctcccctcgcggggagcgacccggtttttgctctagcgttttttattcggcttggatttctatccacgctcccctcgcggggagcgactgacgttatggtcttttaaggagtgatataatgatttctatccacgctcccctcgcggggagcgacgtattacatttggtgtataataaagacaataaaaatttctatccacgctcccctcgcggggagcgacaggagacaaaggcatataaccgaaatacggagtgatttctatccacgctcccctcgcggggagcgacgggccttttccaaaagttcctgaccatgattattatttctatccacgctcccctcgcggggagcgaccgtttttctggcatgattcgtgacgcatattatcaatttctatccacgctcccctcgcggggagcgaccccggtgtctccagtccatcttaattgatattttcgatttctatccacgctcccctcgcggggagcgactacggctatcttggacagggggataactcgatatatttctatccacgctcccctcgcggggagcgacgcgaagattacgaaaaaatcttcggaaccccagacatttctatccacgctcccctcgcggggagcgacagcaaaaacaaataaacctcccacctatttttgcgtggaaatgacaaaactgtcagtcccattactgtataaacgataaatccacgctattccatatataaaaatgcccatattcagagatacacggggtgcgaagcttcctgtctttttctgtctgcttatatgtcgcacagaatagaaaacatatgcgtcgaattggcagggcctataaaatcaggacatcatcctgctgataacgcggatgccgccccacgtgttcgaccctattcttataattattacccaattgataaaagcgaagactgtcttcctccggatcgatcatggcggaaagcccggccttaaatacagcaaactgcgcggcatccaacaagcattcaaaaaccgaattctgtaccctctgtccatgattgacgcacgatttggccacctgacggaggcgtctgcgtcctgctgcagtctcggtgttcacgtcatacgtgactaaaaccagcatcacgtccctcctgcttctcagcgtctgtcctgcatattccgtttgcttgcttttatttccaaaaaaacggtgggtacgaatcgagatccccacgcagcgtgcgggccagaagaagcgcctgtacgtgaggaaccagaccccaaggcagcttttctcccaggaacggatgagtaatcggctcctgcttcctcgtctgccaagcggacaaaaactcccggcggccctcgtctgtcagaagtaccgcgccgttttcctgcttatgcagatgtttggcggtcagccttttttggttgacgcaggacagcacaaaacggtcggcaaaaaccggccgcaattcctccatcaaatccaacgccagactgcggcggccgggacgcagccgatgtaaaaagcccacgtacggatccagccccaccccctccaatgcggcggtacaatcgtgtgccagcagggtataggcaaacgagagcaatgcgttaatattgtcgagcggcggccggcggctgcgcacagtaaaggcaaacgcctccctctgctgcaggatcagttcgccaaacccgtcaaaataccgctgggccgcttccccctccaacccgagcagctggcttaaatcctcgcatgtttcgataagcggcaacgcagccgccatctgggccgaaagccgtttgagcttatctgccggcaccctctgcggatggtcacgggtagcgcgctccaatatccagcggctgttgtacacttttcccagaatgaatccccgggcataccggcagctgccttccccactgtccgccacgcgatgctgctgcctgcgcagcagcacattcccccgttcttccccaactgcacgggccagaaaacggccgcgaggcgaaaaaaagcataaatcgattccgtgtccggcacaagcccccatcagggacgggctggcgccgggataggtaaaacagaggatgctctccagcgtatgcagtggaaaacgcgcggtctcggccttttcacggctgacgacgacattttccccatccagggtcaggtagcagtcctctgtcaaaacaaacagcgtattgagcagatgtctcatggcagccccacctctccctccggcaccgccacctcgtccacatgtccgtggatatacgctgccgcgtccgcccgcctgtccagcccaggcaggcacagccccctgagagagcaggccttgcagtgctttcctgtgcgcactttcggcgtatatccgcgcgcgaagaagcggtgcatctcatccgccatatcctgcgccgcccggcgcagctccggcgtgaaaggaaccggctccctgtgtcttgtttcttcataaaacagcgcaccggcggggatttcgcagaccagcatctcctccaaagccatggcctgcgcgcaaagctggagcctgtcggcatcgctttccttggttcggccgtgcttatactccaccggcagcggcatccacaggccctcacggccccataacgggaccccggcgggatcggcccggaattccaccacatcgcaaacgccggacagccgcagccggtgggagacgacctgcattccgcgcaccaggagccggtccctccgtttttcagacaatgtatcgtcatggcagcgggcgtgttccagccgcccctcggcggtatggaggttttcactccactgctgctccacgtggatgagggcccattgacggcggcaaaaacaaaagtgctggatacccgaaagcagcagatagtcttccgtgccggccgccatcaggccatcctttcacaggtgacccctgccggcagctccgacaccgtgacggtataatccgcaaaggcgcgcggcagcgaaatctccggcctgcgttccaccttgaccgcctcaaacagcttgtaagccggggcattgccgagctcggaatcgtggcggaacacgatcagctcccgcacagccatcttaccgcgggctgcgctgcggtcgttttcaaacatattgagaatcgcccgccagagcagggccagatcctcttcggagaacccggtggttttgcgcgccaaattggccgacacatagccttcggcgcggtagaggccgtaaggaacgatgtatttatgccccatttcggtattctttttttccgcgtcagcctcagtggtaatcgcaacgcgggtgatcgtcacctcttgcggggtgatcggctccaccgattgcgcaaagcccagctgcacaggtccgcgcacctgtccacaattgagattccccttaacaaacgtggtcatcaccgcgccgaaggaccggatatcgaagaattcgcggcacatatagtcgcggattttacaatcgaggtcgggatcgcccttcctggctgccttcaggtcgccggtgacgcccagcttatcgagggcttcggcgtcgctccggttgaggggaacctgttccttgatgtagatgcggtagccgggcgcgtcttccatcaccgtttcgacatagttgcggattttgcgcttaagacatacgtcggtgaccaggccgcagccggactctggatctatgcggggcatgttgcccgcgtcgggatccccgttgggattgccgttctggacatcgaacaaaatcacgaaatcatagcggttctggataggtcctgtcatatcactgttcctcctttttggtataacgcttttgcgtctgatggtaatacccgatctgaaaggccccctgctccggcagggacagacgggccggatagggttcccggatcttctccatcaaggacctgatctgtttatcgaaatacaccgacttatcggtagaatacttgccggtttggccggatgctaatgattcggtctgtttatcaaaatgcacgggtttatcggacttcaatttgcgcagatgcttctgcgccaggctcaaaagccgcgggaataccactgccggcgtagacgacgccgagctgaaatatgtatccttgatcgtgacggtgatatcgggattggcggcgttctgcaccgcctccagtacagagaacagctggcccagcacatagggcagataccggctttgttcgttgagttccacagtcaaaacctcctcgggacatccgtcgtttttgttctggcagtagtacgctttgagaatggccgcgcggccgcgcgtaatgtcccgttccgcgcggatacgcagcgtgacgccgtgcaggagagtggcgggatacggcgtgtttgtcagcaccgcccgcaggacatcgccggccatttggggcatgggcctgccttccctggagttccggttgaccgtttcccacagcaggctccggaccgacagggtttcgcgtttatcgaaggaaggccgcacgatccgcaggcgttcataatgcgcccgcaggttgccggcaaagtctccaaaacggttctgccaaaagaaccgcaccgagaggcgggccgcattgggcgccagccccagcacgtaaaaccgcacctccggatccagcgtggtatcatcccattccaccgcctccccgcgggccagcttgccgagaaccgcctgcagatcgcgctgcggcagggaatcgccgtacagggcggccatgcccaagtcctggtaggcgctttgccctcccgcggcccagcagaccacggtgctatccccgatgtgctgcacgtgctcccggtcggtgagcaggtggttgagcgccgtggtgtaagcgaaggcggcgtaggtgcccaccggcgcgttggccccctgttcatgtccatacgagcagaaggcgtccgcattgaaagagaccaagggagcgccggccgaatgagcatcctgcaccccctgtatattcgggtgcagcctggccagcgccgtcctctgtcccgtaaccaggcaccggccggcgggggcgccgtccgtctgatcgtaacgggcctgccaacgagaacgcacttccggatcgctgcacaccggggcatccttataccaaaaaatcaggtttgcccctttcatcagttcttcccaggcttcggccagcgccggatgagaggcggctgcagccggatcccagttttcaaagaacgccgccaccgcccgggcagccggggaggaagccccgtcaagcagttccagatgcagcgctttgcttgcggcaaaacaggcggcggtgcgctggggcttgcccttgccgtccgcgccgagcaaatacccgctgttgtgaaacagaaaattggccgatatccccgacgcgtgcttacccggcatggggacctccatcatccggggagccatcaccgccttctttccccgcacctgttccgtttgcagcggcagcaggcccagcagcctgccgtcccccgacagatccagcccataggagaccttcgcccgcgcccaaccgggccggacaacctcaccggccgccagcagatcctcatagtgctgtaccaaagcctgcaggatcatcggaacacctcgcagtcctccgtgtcgagcacgccgttctcgagccgggcccggaagaacaaaggcgtgacaccggccggatcggtataatccatgtcatacagcataagacccagctcccggctttcctcaatggcggggaccgggccgccaggccaccggcggaaataggccgggaattcccggcatcccaaatacggggtgtggtaacactgtcccctttccatccgcctggtgacgatatcctgaaacttgcccggattatcgcctggagcggcgcggtcggtcatctcgaaacgcgcctcgatgacataatggacatcttgtaaaatgagcgcggcccgctgggtcatatcctgggacgcggctatgtacagttcccggccctccccctgcatggcgttgcgtgccgccctgtacggcgccttgcttttgatctcgttgcggcggatgttggtgaagcggatgggcgacaacacatggattctgcggatacgccacttcaggccagggtgataaaaaaccgcttccaccattcctctcgcagcggaaggggtagggacatcgtacgaaaatcgctccacgtgcagttccggcctcgaaaagcaggcataccgcccccacacttccaattggatcacaggcattctcccctttctgtcttgaatttccggattacgcgaaaaacccgattcccatcccaacatccaggggaagcccggtatgggtatcgtagcagcggggatcggccagcacgagcacctcttcgtcgagccgttccagcagccccgccttttccagggcctgccggtgatccggatagacattcaccccataccggcccagccggcggaaaagcgcacggctgcgccgtccctgccgcagttcctccaccaaggccgccccttcgtccaatgggatatataccgtgacggccggcgtttcgatcagctgaaagcgcctggccgccgtggcaaagggaaaaagacgattgtccaacccgcgcgcaaacccatccacaatgcccttctcgtccagcgccgcttcccccttcagtgtccggtaaaaggtaaaatagcgttcaatcgcctctgctccggccgggtcgtcaaaatcgcgcagtacccgccgggcagaggcgatgttctgggcaagcatcggcatgggcggctctttttccaggcgaaaaacgtaaaccgggctctcctccgccgtccgccctccctcccggttgcagcggccggcggtttgcaaaatggaatccagccccgccagttcccgataagcctctgggaaatccagatcgacccccgcctccaccaatgaggtggaaaccacccggcaaggcagccccgccttcagccgcgctcggatttcatccagcagccgtttccgatgagcaggatacagcagggtggtcaggcaatatcgcccctcttcttccagggctgtgtacagctcctgtaccgttttgcggcggttgagcacgcacagaacctgccgcgcggcgtttagccggccggccagagcctcccgggtcagctcccccaaatcccgcaggcaggtacggcggaaaacagccgcctgccgttccggcgccggacaaatttcgcggatcggcagatcgggggccagatccccaaacagcggttccagtgcgggctgggtggcggtgcagagcactgccgccgcaccataatggcgcaccagctggacaatagccgccacacaggggcgcagatagggcaccggcagcgtctgggcctcgtcgaatacaaggacgctgccagccatattgtgcagtttccggcagcgggaagggcggttggcgtacagcgactcaaaaaactgcaccgccgtcgtcaccaccaccggcacgtcccaattttcggcggcgagcgcctttcgatattccgccgggccgtccccttcccccgtggcatactccgctcccgcatgatgctccagcacattttccgtccctaaaatttcagtgaataccgcagcgttctggtcgatgatggaggtataagggatcacataaatgatccgctccatccgctgcgcggctgccatggacaaggcgaacgccagcgacgacaccgtcttgccgcccccggtgggtaccgtcaaggtgaacaggcccttttccgcgttccgcccagcggccaggcaggcgcgcagaatagcgcaccgcctccggttcaaatcggttttggcctcccaccagggggatacatacgcctccagcttctggagcaggcgctgcggcggttcatatccgccgcgcgggaccggcgccccgttcataaaggcctcggtatccaagtaatcggcgtctaccaggcaggaatacagcattctggtataaaatgcgcgggtaaaggaatccggaggcaatccatccggcggagaagccgtgggcaatgacatctcggtacgccagcggtcgcagggatctaccggaagatgtacccggccggtcagagtggtccggtcggcggtatcgcgcggactgccgccgtcgggcaggccggcatgatgccccgcaacggcaaaggccacctccggctgccgtcttgcaaaagcctctttcgctccggcggtggagtggtccaccctctccgtgctgccggccaaccgccgttggaaagccgcactgtatttcccgatgtcatgcagcattccggccagatatgcctgctccgccgcgccaaaagctttcccaaaacctgccgccagcaccgccgtgttatgcagatgctcgtatacggtctgggtacgtgtaccatcctcgctgacatgcgcgtaagcatgggctgggggcgctatatccatacgtccatcctcctccgggccgcctggctttcagcaacggcaaatacaggccacttttggcatttttctcctctggacgttgtactctttcttataagataccataattctcccaaatactacaatatttatttctatattttataatatgtttttgttatataacttgtcccgcgggatttttctcgcggggagagactctccctatcgcgctgcctctgccggaaacccgacgtttccaatctttatggagccttaatgggaaacggcgaatgctaacaccaactttatcttcttcatgttatgctgaaaccggtgcagagaaaggcaccaaacgattctcaatcagggaaaggatgcaacatgtatgaagccgctgatatttgagggatccgccgtggcgttggtcacgcccatgaaggacgacttttccgtcaattatgacgagttggaccgtctgctggatttccatctggagaataagacggatgccgtcgtcgcggtaggcacaacgggggaatccgccaccctgaccgacaaggaacatattgaggtcatcgccttttgcgcgaaaaagctgcacgggcggctgccgttgatcgccggcgcgggaagcaacaataccgctcacgctgtcgaactatccaaggcggcggccgaagcgggcgcggacgcgctgctgcatgtaaccccctattacaacaaaacgtctcagaccggtttgtatttacatttcaaggcctgcgcggaagcaacccggctgccggtcattctctataatgttcccacccggacgggtatgaacatcctgccggagacctatctcaagctgtcgcggatcagtaacatcgtggcggctaaggaagccagcggtaacttttcccagatggccaaaatctccgccctctgcggggatgacctgacgctctattccggcaacgacgaccaaatcacttcggcgctggccatcggcgccaaaggggtcatttcggtactggccaatattgtgccggaggctacccacgacatctgccagagctatttcgacggagattccgccaggagcgataccctgcagcttacatatctggagctgattgaaaacctgttccgcgatgtcaaccccatcccggtcaaacaggcgttgaacaacatgggctttgaggtgggcaagtgccggctgcccttgtgcgatatggacgcggcagcggcggaacagcttctcgcctgtatggcgcggtatggcttggcacagccgggcaaacggattggtacggtgacggtcaaacgggcaccggacacccttttgtggcggaagaaccactgaaatcctgcatcctaatggaatcttaacatcagctccggaatcctaacaccatttttattggccaagtgatacccttgacagggtaaggaggtgcttgcgattatgggcatcataatcggaatcgtcggcgtatgcgccgcggctttactggtctactatttttatatcttaatgaagggggatgcgcagtaatatgggagcggtattgcagtatggcctgtatctggcggttctggtcctattgggcattccgctgggtgcatacataaaaaaagtcatggatggcgaaaagaccttcctttcaagggttctgacgccgtgtgaaaatctcgtgtacaaagcgatgcgcgtcaaaaaagacgagcagatgaactggaagaaatacctgctcagcgtgctgctgttcaatggtatcgggctggtatttctcttcctgctgcagttgctccagggcgtcctgccgggcaacccgcaggggctgcccggcgtcaaatgggatctatccttcaacacggcggtcagcttcgtcaccaacaccaactggcaggcgtacagcggtgagaataccctgagctatctgacccaggcgctgggcctgacggtgcagaatttcgtctccgccgccaccggcatcgcggtattattcgctttgatccggggctttatcaaggtcaagaccgacgggctgggcagcttctgggtggatatgacgagaatcgtcatccacatcctcatcccgctcaatctggtcatcgccgtcgccctggtgggaggcggtgtcattcagaatctgaaaccggctgagacggtttccctgttggagcccgtcgcggtgagcaccgaaaccttcgcggtagacgaaaatcagcagaggatcgaaaacgccgtcatcgaggagggaaccgggacggttaccgttgacggcaaaacggtggaaaacgccaccgtcgtcctggctggtgatgtcctgggcagcttcaagcaggacagcacggttctgaacagcgatgtactgcccggcgccgaaattggcgatgtttccctggatgagcataaggctacgattacctttgcgggccagaccatggcggtaagtctcgtcaccgagcagtttgtccccatgggtccggcggccagccaggtggcgatcaaacagacgggcaccaacggcggcggttacatgggagtcaactcggcgcacccgctcgagaatgccaatcccttcaccaatatcctggaaatgatttccctgttgctcattccggtggccctctgcttcacctttggtaaagcggtaaagaacaagaaacagggaattgccatcttcatgtccatgttcattgtcctggtcctggctttggggatcgtggcttacactgagcagatcgctacgcctcagctggcgcagaacggcgcggtggacctctccatggtggaccaagccggcggcaatatggagggcaaggaaacccggttcggtattgcgacatccgcgacctgggcaacctttacgactgctgcctccaacggctcggtcaactcgatgcacgacagctatacgccgctcggcggtatgatcccgatgctgctgatgcagctcggcgaggtcatcttcggcggcacgggctgcggactctatggcatgctggccttcgccattctgacggtgttcatcgccggattaatggtcggacgcaccccggaattcctcggcaagaagatcgaaccctatgagatgaagtgggcggtgctggtctgtctggccaccccgatcgccattctggtgggcagcgggctcgcggtggtctggcccggtgtgagcgacagcttgaacaaccccggtgctcacggcctgtccgagatcctatacgcgtattcctcagccggcggcaacaacgggtcggcgttcgcgggctttaacgccaatacggtattcctcaacctaacccttggctttgtgatgctgtttgtacggttcctgcctatcatcggcaccatggccatcgccggcagcctggcggctaagaagaagatcgccactacagcggggaccttgtccacaacgaatgccatgtttgtgttcctgctcatcgtcatcgtgctgctcgtcggcgcgctgagcttcttcccggctcttgccctgggcccgatcgctgagttcttcagctttgtcgtgtaaaggaggtttctgttatggcatcgaaaacaaaaagtgcgtttgccgacaaaaagatgctcggcagagccgtcaaggattcctttatcaaactccatccgaaaacacagatcgggaacccggtcatgtttctggtatttgtatccgctatcctgaccaccctgctgtggatggcgtccctgttcggcatcaaggacgcggatgcgtcctccggttatatcctggcaatcgccgtcattctgtggctgacctgcctgttcgccaactttgccgaggccatctccgaaggccgcggcaaagcccaggcggactccctgcgggcttcccgtaaagatgtggaagcccacaagatcccctcggctgcggaaaaagagaccatcaccgctattccctcggcacagcttcgcaagggcgacattgtgatcgtccgcaccggagagcaaatccccggcgacggcgatgtcatcgaaggggccgcctcggtggacgaaagcgccatcaccggggaatccgccccggtcatccgggaagcgggcggtgaccgcagcgcggttaccggcggcaccaccgtgctgtccgactggatcgtggtgaggatcaccagcgagccgggcgaaagcttcctcgacaagatgatcgcgatggtcgagggcgcggcccggaaaaagacccccaatgaaatcgccctgcagattttcctggtggccctgtccatcatcttcatcctggtgacggtgtccctgtacacctactccatcttctcggcggagcaggcggatatgcccaatccgacctccatcaccaccctggtggcgctgctggtctgcctggcgcccaccaccatcggcgctctgctctccgccatcggcatcgccggcatgagccggctgaaccaggccaacgtcctggccatgagcggccgcgccatcgaggcggccggcgacgtggacatcctgatgctggacaaaaccggcaccatcaccctgggcaaccggcaggcctgcgattttattccggtggacggggcttccgcccaggaactggccgacgccgcccagcttgcttctctctccgacgagacgccggaaggccgcagcgttgtggtgctggccaaagagacgttcggcatccgcgaacggacgctgcaggacaaggggatgaccttcattcccttcacggccgccacccgcatgagcggcgtggactttgacggcaacgagatccgcaagggcgccgcggacgctatgcagaagtatgtaacccagtacggcggctcctacagcgccgaatgcgacgatgtggtcaaggccatctccaaccagggcggcacacccctggtggtggcgaaaaaccataaaattctgggcgtcatccacctgaaggacatcatcaaggacggcgtcaaggaaaagttcgccgacctgcgcaaaatggggatcaaaaccgtcatgatcaccggcgacaatccgctcaccgcggccgccatcgcggcggaagccggagtggacgatttcctggccgaagcgacgccggaagggaaactccaaatgatccgggacctgcaggccaagggccatatggtcgccatgaccggcgacggcaccaacgacgccccggccctggctcaggcggacgtggctgtggccatgaataccggcacccaggcggccaaagaggccggcaacatggtggatctggactcctcccccaccaagctgatcgacatcgtgcgcatcggcaagcagctcctcatgacccggggcagcctgaccaccttctccatcgccaacgacgtagcaaaatactttgccatcattccggctctgttcatggggctgtatcccgggctgtcggcactgaacatcatgagcctgcattcccctcaaagcgcggtgctctccgccatcatttacaacgcgctgattatcgtggccctgattccgctggccctcaagggcgtcaagtatcgggaggtatcctccggcaagctgctttcccgcaacctgctgatctacggcctcggcggcctggtcgctccgtttatcttcatcaaactgatcgacatgctgctcgtggcgctggggctggcgtaagaaggaggcggtatgacagcggcggcgtatgcatacacagcttctgaacggctgtcatatcgcccgtcctctgcgggatccgccatatgatccgactttaaggaggtttttatatgaaaacattgaaagaggtcttgccgcgggcagccatcatatttgtgattttcgccatccttaccggcctcgtctataccggtgtcgtcaccggaatcgcccaactgtttttcccgaatcaggccggcggcagcatcattgaaatcgacggcaagaaatatggcagcgccctgctgggccagcaatacaccgacgacgcccatatgtggggccgtatcatgaacatcgacgtcggcacctataccgataaggatggaaatcccgtgctgtacgccgggccttccaacaagaccccggccggcgaggagctggaagccctggtggccgaacgtgtggaaaagctccgcgcggccaatccggatatgggagacaccgccattccggtggatctggtcacctgttccggcagcggacttgacccgcacatttcccctgccgccgctgaataccaggtagcgcggttggccaaggccaacgacaggacggaggacgaaatccgtgatatcatcaagacatgcaccgacggcaaattccttggcgtcttcggtgaggaaaccgtcaatgtgctggagttcaacctccggctggacggcatcctgaaataatcctggtttagcgccctctgcgctgcggtaccaagggtacggccgcagaggacgctctgctttgggcgcaggcaagcgcattctcacggaattctcacaccggagctgggatcctcacactcctctcacaggatagctgctatgatatagatgtcaaaagaaacaagcgtttcaaggaggtcatctatatgatcagacagattgccgagaccggcaaaaccgttccgctttgcgatgtcatccgtcgcctggtggaaaacggtgcgtttgataaagcggagcgggaggccgccagagccatgagcgaagcccctcatgcgcccgaaccccacaacctgatggggattatattggaaaatgaaaacgaccatatcggcgccatgaagcattttcgcgccgcctgggccttggatccgacctatctccccgcccggttcaatatggagcaatacggccgcttttccgctgtcgagcgcgtggacgcgtatgacgaaagcgactgtacggtggaagacgagcaccacaccgaaacggcgaaatggcatgcagggacagtggcataagacacaggaaaccccagcggggcggcagattgccgcccctgcctttttaatgggaaagaattgtttttatcggcgctttcgagtatactatagatgcatcattcggaggtacgaataatgaatgcctttatcgaagcaaaaacagccgctgaaaagtggaagataaccgtccgccgggtgcagaagctttgcgatgagggccgtattccgggaacgtgcaaattcgggtttatgtggatggtcccgggcaccgcagacaaaccgccagatggacgccgccgtataaaggaggggatgatatgcgcaaagatcgaaaacagcggatgatccgccatctgtacagcgcgctgctcagcatcgtcttgattgcggcggctacggcggtgggaaccttgttccgggcggcaggattcccggaaaccaatatcgtcatcatttacatgctcgcggtactgctgtgcgcgcggtttaccaccggctttgtctacggcctggcggtttcggtgatagccacggcggctttcaatttcttctttaccgcgccatatcattcccttcaggtgtacgatccggattatctggtgacgtttgccgtcatgaccaccgtctccctcctcaccagtgccctgacctcccgtgtgaagaaaagcgtgctggagatcgccctgcgggaaaaggaaacccaggcgttgtatgttctgaccaaccgcctgtcggaaacagaaagcacggaggaaatcgcccgggtgaccgtcgagagcatccgcgacgtgttccagacgcgcgcggagctgatctggtttgacgattccggcatttcggaaacagccctgatgcagcggctggaggacaccgacggcgactgcctcactgacggcgaaaactgtatatggccgatcaacggccgtgaaagccggctcggtcttttgcggattccggcggaggcgggacagcagcttggaaaaaatcaaaaaaagctcctgtggtccatgctggaatgcgcggccctcgccgtcgatcagttccgggcggcgcaggaacggctgcggtatcgggaggagtcggaacacgaacggtaccggggcaacctgcttcgggcgatttcccatgacctgcgcacccctctgtccggcattatgggaaccagcgagatgatccgggacatgtcacgggaggacgatccccgtcacgcgttggcccaggggatctgggacgacgccgactggctgcgttctctggtggagaacatcctgaatctcacccgtctggaggatgggcggctagtgctgcaaaaacagccggaggccgtggaggaaatcatcgcaaacgcgctggagcatatcgccaaacgggcgccggagcgggaaatcggcgtggatatcccggaagacctgctgctcgttcccatggacgccaggctgatcgtgcaggtgctggtgaacctgctggacaatgcgatcaagcatacggcaccggagcgggagatccgcattgcagtacagcgggacgggaccgacgccgttttctgtgtggccgaccggggcgatgggatctccccggaggatttgccgtatattttccggaccttctatacgtcacggcacaaccgggccgacgccaaacgggggatcggcctgggcctggccatctgcgacgccatcgtcaaggcgcacggagggaccatccgggcggaaaaccggacggacggcggcgcgctgttccgtttcaccttacccatggaggtggccgaaaatgcgtaaccttcgagaaaccatcctgattgtcgaggacgacgcgcagatccggaattttatcagctttaccctgcacagcgaagattatgcctatgaaacggctcccaatggaaagaccgctatgcagatgctggtctctcggcccattgacctgatgctgctggatttagggttgccggatgtcgacggcatggatatcataaaaaaagtacgggaatggtcggagatccctattatcgtggtgtcggcccgggaccaggataaagagaaggcgctggcgctggatatgggggccgacgactatctgacaaagcccttctcctcgaccgagctgctggcccgcatccgtgtggcgctgcggcatatgtacaagcagggcggcggcaaaacccaaaccctgtttcaggtgggtgagcttcagctggacgcggaaaagcgccgggtgtttctccggggggaggagatccatgtcacaccgatggagtactccctgctgacccttctgttcaaaaaccagggaaaggtgctgaccaccgccgtgattatccgggaaatctggggccccggatacggaaacgatactcaggcgctccgggcgctgatggcggggctgcgccgcaagctggaaaaaaacccggccaagccgcggtatatcctgactgaaatcggtgtaggataccgtctgacagacgaataacggatttctttatgcaatcttaatgcggcggcggatatgcaaacgccatctttatcccgtttgttttacaatgagattagatacaaattcagaaggcgggaatcctatggacgaaacacgtctcgatcccgacgagctgctccgggtcatccatcatgaggagagacgcaaaggccgggggcatctctgcatttttttcgggtatgcggccggggtagggaaaacctatgccatgctgacggccgctcacgcggccaaacggcagggaatcgacgtggtggtgggctatgtcgagccccacatgcgtcctcagaccacggcgctgctggaagggctggaggccctgccggtaaaggactgccctcatcacaacatcacgctgcgggaattcgacctggacgcggcgctcaagcggaaacccgggcttatcctggtggatgaactggcccataccaacgcagacggctgccggcataaaaagcgataccaggacgtggaagagctgctggccgccggcatcgacgtctacactacagtaaacgtccagcatatcgagagtctcaacaacatggtggcgtcgatcaccggcgtcattgtacaggaacgtatccccgacaaggtgttcgacagtgccgatcaagtcaagctagtggatatcgagccccaagagctgctggacaggctcagcgaaggcaagatctaccgggaggcgcaggcccagcgggcggccaccaactttttcagcatcgagaacttgacggcactgcgggagatcgccttgcgccggtgtgccgaccgggtaaaccagctgtcggagaacgcccggatcaagagcaagggcgactattacaccgacgagcatattttggtctgcctctccccctctccctccaacgccaagctcatccgcacggcggcccgcatggcccgggctttcaacggcagcttcaccgccctgtttgtcgaaactccggcgtttcccactatgtccgacgaggataagaaccggctgcggaacaatatccacctggccgaacagctgggtgccaccatcgaaaccacctacggcgacgatgtggcgctgcagattgcggaattcgcccggctgtccggggtatccaaaatcgtcatcggccgtaacaacgcccaaaaacgcttccttttcagcaagcccaccctgaccgaaaagctgatcgcctattcgccgaatctggatgtctatgtcattccggacagtacggcgcggatttaccgggagagggagcgccggcaccgggagcgtcagaagctgctgccggcggatattctgaaaacgctgttcgtcctggccgccgcgaccttcatcggcttcggttttcaaatgctgggattcagcgaaagcaatatcatcacggtctatattctgagcgtcctcatcacgtcggtgattaccagccggaggatttacagcctggcatcttcccttgtcggcgtactgatcttcaatttctttttcacagcccctcactattccctgatggcctatgacagcgggtatccggcgaccttcgtcatcatgtttttgtccgctttcatctccagttccctggcggtaaggattcagaaaaatgcccggcagtcggcggttgccgcctaccgcacaaaaatcctgctggacaccaaccagatgctgcaaaaagccgggggaaaagcggatatcgtccaggtcacagccggacagctgatgaagctgctgcatcgggacatcgtcttttatctggcggaacgggacagactgggcgagcccgacgtcttcatggacggcgcgggcgctcctgatccggcctatatatcggaaaacgaaaaggctgtggcggcatgggttttgaaaaacaataagcgggccggcgccaccaccgccaccttgggagacgccaaatgctattatctggccgtccgggtggccggcacagtgtatggcgtggcgggcatcgtggtgggtgaaacgccgctggacgcttttgagaataatattgtcctctccattctcggcgaatgcgcactggctctggaaagcgaacaaatggcggtcgaaaaggaagaagcggcggtgctggccaaaaacgaacaactgcgcgccaacctgcttcgggcgatttcccatgacctgcggacgcccttgacctcgatttccggcaacgccagcaacctgctggctaatgaagagagcttcgataaggccacccggcatcaaatctacagggatatctacaacgattccctgtggctgatcaatctggtggaaaacctcctgtccgtcacccgtattaccaaaggggaaatccagctgcatctgacggcggagctgatggatgaagtggttgcggaagctctgcggcacgttggccgacaaagcgcggagcataccatccgtgtgataagctcggatgatctcatcctggcgaaaatagacgccaagctcatggtacaggtagtgatcaatatcgtggataatgccatcaaatacacaccgcccggttctaccatcaccatttccacagaaaaaagacaagataaagtcgttgtcaaaattgcggacgacggtccgggtgttcccgatgaggctaagccacggatttttgatatgttttacaccggagcaggcaaaatcgctgacagccggcgcagcctgggattggggctggcgctgtgcaagtccatcattgacgcccacggcggcaccctttcggtttcggacaacaagccccacggagctgttttcacctttactttacaggccgaggaggttgatttgcatgaataagccgacgattttggctgtggaggacgacgccgctatacgttcgctgatctccaccaccctgaaaacccacgattacaactatttgaccgcacgggacggccggagtgccttgctggaggcgtcctctcacaacccggacatcatcctgctggatctgggattgccggatatggacggcgtggacatcatccaggccatccggcagtggtcgggtgtgccgatcattgtcatcagcgcccgcagcgaggacacggataaaattaaagctctggacgccggcgcggacgattacctgaccaagcctttttccgtggaagagctgctggcccgtctgcgggtcactcagaggcggctggccgcgcagcagggcgcggcccacgaaacgtcggtatttgtcaatgggcagctgaaaatcgattatgcggccggctgtgtctatctgaacgaccaggaactgcatctgacccctattgaatacaagctgctttgcctgcttgccaaacatgtcggcaaggtgctgacccattcctatatcaccgattccatctggggaaaccatgtggacaacgacgtggcgtctctgcgggtgttcatggcaacactgcgcaaaaagatcgaacgcgatcccaactcgccccaatatatccagacccatatcggcgtgggataccgaatgctccgggtggaataaagagagagcaccattgatgtctgaagatagtatttgttcgccttcggtaagatggcttcatagtagggggcggtataggatgggaaaacttcacgagtgctttgaaaacacgattactaagattggttttacacatgcagagcttccgggagcattttttaatagtgctcccattggtatacggtttgaaatcggaggtaaagaaaacgtatatttgcctgatgataagggattgaacctaatttatgtgaaaaatgccttttatcgtgcaaaaacattatttgatggtttgccatgccgccccgtccttcttaggatagacaactatccggaagaagcagataggatcactctacaaacactttcacaggtaggattacctgctccagatgaaacaatcaaggaaaaacgtattgatgaaggggcctgcttttttcaagaacatttatactgggatttggcaaaaaataattgtcaaattgacaaattgcttttagaaattataaaaggcgatattggcggtttttcctgtttatgctccaatgtgtattttctgaatgccaaatgtgctatactctatcatttgtatgatgatagaggtgttgatattgttgcgaatgataagtattctttgttgcctttataccagaaatacaacgagtggattcttcagtacgataaagcaaaaatagaccaattatttgccaattgagcgtaattcgtatctgtcaactcctcgtttatcgggtagatttcataccacttgattaattttagtcgtaccacctgcgagacgtttgtaaagtcgcgtaaagactccctttgctggctgatgagggcgcctcccgcaaacggatttcctggattttggcggggcgaaaattagaccacttgccacctgatgacggctaaaatattactatacaggcaaaaaacacgtccggaggccaaggctccggacgtgtcatatcaatctgcaagttcagggaaagagccctgagaactgaatagagagagaagaagagaagagatgacgagcgtggggtgggacatccagggaaggatgggaccacccgaaaaacaaggtcaagccctcggtctattagtactgccaagctaaagacg

SEQ ID NO: 340 - DNA, 5891 bp, Unknown
  16S sequences of unknown bacteria
aggagtaccacgcctatttggtgcgcctacaggagcatttcgcgcgggaggacgccgccgccgccgcggagagagcgcggcaggcggccgagcatgttccggagcgaagggtgccggagttcgtgcgggagagattgaaacaactccgcgcccaagaggcggcgcggcgggcgcgggagcgcgcggaaagcgaggcgagctatcgaaaagcgcttgccgcctggctcggcgatacaagcgctgagaaagcggggtgctgcgcgtgaatggcctagaagccttccgccgcggcactccaggcggggctcgcccaaggcctgagcggctacaagccccgttcttccagcgcgcggatgcggcggcgggcgagcgtttgcagcacgatgagcgcgatcagcgcggcggcgaacaggctccagggcagataggggaagggcgcggcttcctcctcctcgtccgcgctggcggcggcgaggggcgctttcttttcgatggtggtggaaaggggcaggctggtttcgtaatattcgccgtaagcgtcctcatacgagagcgtgaccgtgccgctcacggggccgacgagcgcctcgtcgctggaaacgcggaaattggcggtggcgtccttgctttcgccgggcgcgagatcgcccgccagcacgctgccgccgctggccagccccggcacatcgaaggtgagcagcgcgttggaaagcggggatttgcccatgttcatgagggtgatggtgaagctggaaacgtcgccctgcgtcacgcgcacggggagcgcggcctccgaatgggcgaagcgcacgctctggcgcacgtccacggtgaatttttccgccaccgaagtatctttgcccgcgccatacgcgccctgcgcgcggatctccacgctgtgcgcgcgcggctcggcgtccatggccgcgcggatggggatctccacgagggcgctttcgcccgcggccaggcgggaaacgcgcacggtgtccgagcgcgcggggaacaggccgcccgtgctttccgcaaacacgatggcgatgttctccacggcgcgcgtggcgctctggttgacgagggtcaaagagagggtcgcctcctccccggcctcgatccacgcgccgtccccggcgcgaaaatccatcagcagcagttggggcacttcgccgttttcctgcccgccggtgatgacggcttccagggggaagcgcgcctccagcgcgttccccgccgcgtccacgccgcgcaccgcgatggaaaaggggtattcgccgttcagccggtcgcggtagagcggcacgcggaaggaaaacacccaggcttccaccgcttccccggcgaaagaatggctcttgcgctgggcctgcgcggcatggcccatggcgaagggcgcgctggcgggttcctcgcacacgagttcggcggtcagcccgcccacggcttcgtccgaaagcacgggcagcaccacgcgcagcgtgttgcccacctcttcgggcgaatagcccatgtcgtaggagcgctccatgccctcgtaggtgtgcgcgccatccagccaaagcccttcggcgcgcgcgcccagcggcaacaggcagcagagcaggaaaagaaaaagggtgcgcttcataaccaatcgcctcacagttcgcggatggattcgacgatgctcgcgcgcggaagtccgcgcagcctggcgcgcaggccgagatggcaggcgagcaagaccgcggccacataggcggcgagcagcgcgggcaggccccaggcgggcagggaagcaaagacggtgctacggaaatattcgaactggcacagccccagaagcagcgccgtgctgagcgcggctccggccagcgcgcccgcggccagcaggatgcccgcctgccgccggtacaggcccaggatggcggaaagcggcgcgcccacggctcgcagggtgccgatggtgcgccggtccgcgcggatgcggccggagatggcgttgtccatcatgctcagcgcgatggccgtgaacagcaagagcaccgtgcccgcggcgagcagcaggttgcgaatgatctcccgctgcgcgcggagggaggcaaactgggaatcgtaccgcgcaccctccacgcgggaggcgatttcgcgcagcgcctcatcgatctgcgcctcggtttcggtatcgggcgtttgcgcgagcgccacgccgaattcgctgtagccgttcgcgtacaggccgagcgccctaaggcccgcgtgcgtggtgatcacatcgccctgcccgcagccatagagtatagacatgcggttagcgtccgccaagtttacggtcgcgccgatgacgggcgacgcgtcgcaccgcttgagaccggcggcggaaatggattcggccgggcggccaatctggtattcccgggtatacagttggcacaggggcaatttctgcctcacttggaacgtgtcgttggcgaattcgcggtattgcgcccccggctcgagttcggcaaagggttgctcggaagtgatggtcgccgttccgcctccgggcgtttcccactgctgccggtagagggtatccggcgcgactacgatcacctcgcggcccgtgttcagcgcctcgatgtcgatttcgccatgtagcacctcccccgcataggcgaggatgcgctcctcgggcagggagatcacctccacgccgaagagatcgccctcgatgcccagctcgttcttcagagccaggtacgcttcgcgctcttcgatttcccagccatccgaggtgggtgaaggtgcgtccaggtatgcgttgcgatggggggtgggccgcaggtagcccgtcacctcgtccagcaccaggttgcacgccgccctctgtgcgcaatccacgcgcgccacatagggcagcgacaggatgtctgcacggtcgctctcggtgaagcggggctgcagggcggcttcgtcgtaatattcctcgtggccggaagaataaacttgcagctcgtaatcgtattcccattcgttgcccagggaggtgatggcgtcgtccatcaccaggtacgcgccgcagagcaccaggaggcacagggcgagcaggatgggcacgcccgcgctttgcccgcgatggaggacgagcgcgcggcgggcggcgagcgattccacgcggaagcgcttttgcgacttgacccgcgcgcggtgcgcggcgcgcagaaactgcgtatcgcggatggcctgcatgggcgaaacccggcccgcgcggcgcaggggaatggcggcggcgagcatcacgcacagcacggagaaggccagcgcggcgaaaagcagcgcgggcggcgcgtaaagcgcgccccgatccagcaggcgcagcagcagcgcgacggccaggcaggaaagcgcgatggcggcgggcgcgcacagcagggcgagcagcagcgcttcgcggccaaagatgcggcgaatttgccggcgggtagcgcccacggcgcgcatcatgccaatctgcacgctgcgctcggccaggttggcggcaaaggcgttcacgatgcccatgcccgaggcaaaaagcagcgaaagcgccaccacgccgatggcgagcagcacgggcagaacctcgtcgaacaaagcggggtccagggaaatctggtaatcgtacaggcaatacagcccgggaacggcctgtccgatttgcgcttcggtgagcggctgcgcgagctcgagcagcaggtgccgggcgggcagcgagccgggctcaatctcctccgccccgctcgccagcgcggcgggaaagcgcgtgtagtgcatttcagaggtcacgcgcgagatttccagatgcgaagccttttccgcgaggatgccggtgagcgtgaaggtgcgcgtcactggctcggaggcgagctgattgcgccccatcaggggataaaaatacagcgtgacggcatcgcccacctgcgccgcgaggcgcaggcggctcagggcggaggcttccagcgcgatttcgcccgcctgctgcggcatgcggccctcgaggcacgcgggatgcgccagcgcggcggcggtctcgtcgtactgcccgaaggtcacgcgcgcggcgtctgcctccggggaggcggcgatttcaccgaacacctcgaccgtgcccacgcgctgcgcgatgccggtttggaggatttcttcttccgtggtatcggtgtcaatcagggcgatgtcctgctcgcccatgcgggcgcggtagtcgtcctgcatggtctttcccaggctcgcggaggcgagcacgagcgccgtggcgaagaacacggccagaaaaatgccagaagcgagggaaaaatagcgctttttctgcccgcgcaggctgcccagcgccatgcgcgtcatggtgaggcggttgcgcttcacggggaatcaactcctttgcggcgggaattacagctcccggatggattcgacgatgctttcgcgcggaagtccgcgcagcctggcgcgcaggccgagatggcaggcgagcaagaccgcggccgcgtaggcggcgagcagcgcgggcaggccccacactggcaggacgcggaaggtggtgaacttgaagccgctgtacgtgaccgcgaagatggccgcgctgagggcgaacccggccagcgcgcccacggccagcagaatgcccacctgccgccggtacaggcccaggatggcggaaagcggcgcacccacggcccgcagggtgccgatggtgcgccggtccgcgcggatgcggccggagatggcgttgtccatcatgctcagcgcgatggccgtgaacagcaagagcaccgtgcccgcggcgagcagcaggttgcgaatgatctcccgctgcgcgcggagggaggcaaactgggaatcgtaccgcgcaccctccacgcgggaggcgatttcgcgcagcgcctcatcgatctgcgcctcggtttcggcagggggcgtttgcgcgagcgccacgccgaattcgctgtagccgttcgtgtacaggccgagcgccctgaggcccgcgtgcgtggtgatcacgtcgccattctcgtagccatagagcaatcccatatcgttggcggttgcccagtctacggtcgcgccgatgacgggcgacgcgtctctgcgcgccagcgcgccagcgcgtatgttccaatcccagttgtagccgagcttgtattcccgggcaaacaactggcacaggggcaattcctgccccacctggaacgtgtcgttggcgaatttgcggtactgcgcctccggctcgcgctccgcaaagggctccgtggcgtaggaaatccacaggccgccgcggacgggctgggttctttcatacacgcaatccggcgcgaccacgatcacctcgcggcccgcgttcagcgcctcgatgtcgatttcgccgtgtagcacatcccccgcgcaggcgaggatgcgctcttccggcagggcgttcacctccacgccgaagaggtcgccctcaatgcccagttcgttctttagggtgaggtatgcttcgcgccgttcgctgctccacgcgctcccggtgggctcgtccagatacgtgtggagtgcggggtcgggccgcaggtagcccgtcacctcgtccagcaccaggttgcataccgcccgttgcgcgccgtccacgcgcgctacataggggagggaaaggatgtccgcgcggtcgctttcggtgaagcggggccgcagggcggctgcgtcgtaatattcccaggagtcgaaagaatcaacggttagttcgtagtcgtattcctgttcgatttgcatgacggcgaggttgccgcccaccagcaaatacgcgccgcagagcgccaggaggcacagggcgagcaggatgggcacgcccgcgctttgaccgcgatggaggacgagcgcgcggcgggcggcgagcgattccacgcggaagcgct

SEQ ID NO: 341 - DNA, 31920 bp, Unknown
  16S sequences of unknown bacteria
ggaccggctgaagcattttttcaagttccgaacctattatacaattaaacacccatgataacaaccggaaatccaaggttcgaaaaaaatttacattcttccgggagaatccccggaaaaatccgctctctgcgccattttccaccggctgatccggtccggggacacctctgcgcggctccggcgcgggtgcggatttcacactgaagagcgctgccccggatgcccccgggaaacaccgccagccagaatgccccgctcgctcaaaatgggcaggcgtgcggcacaggcttccccggtaatgccttaaatcgcacagagttcagggctctcaggcttaattttccccgaggaggcctaaatcacacagagcccggtagagcatctgcaccggcaggcccatcaccgtgtagtaatccccccggatgccggtgatgtaccggcaggcatagccctggatgccataggctcccgccttgtccatgggttctccggtggacacataccactcgatctcccggtcggtcatgggggcgaagtgcacctcagccgtgctcaccagtgaacggctgcccgtcggcgagaggatctgcaccgcggtgtggacccggtgctcccgtccggacaggcgccgcagcatggaaacggcctcctcccggctgtggggcttgccgaggatctccccgtccagctccaccaccgtatccgaaccgatgaccgccgcctccgggaaccgggacgccacctcggacgccttcttctccgccaggcgggccaccagctgttccggcgagagggtttcagtgacatgttcatccgcaccggacacctccacccggaaatccgggcagcagagtcccagcagttccttccggcggggcgaacccgatgccagtatgatctccatatccgttccctcctcagatctttttcagtgcccagcggtagccgaacagcgacaggataatgcagccgatctgggcaatggaaagccccatctccagaccaaaggccacccgtaccaccgccagatccagataggcgggattggcagtgggaatgccgatggtctcactgtaagccagccaggagagcatgggcactccggctgccgccgacgcgatgagcgaacccaccatggcaccagccaggataaagaaaagcagcaggatatttttcttcatgatctgtatctacacctcgattttatgtcaaaacatacggtcagttccgaccgctggaaccaaagcccttttcccctcgttccgaactgcccagatcgtcggtgagggtcagttccggggtcagcaccggcaccaccagcatctgggcgatgcgctcgccgggctggaccgtatagggttcgctgccctggttgcgcagcggcactttgatctccccccggtaatcccagtcgatgacgcccaccgcgttggcgggcacaatgccatgcctggcacccagaccgctccgcccgaataccagaccggctgtctggggcggcagggccacgccgatgccggtgggcagcagcttcgactccccgggctggatcacctccggctgggacagatcagcactcaggtcatagccggcactgccctcggtggcccggcggggcaggaccgcagtttcagtaaatcgcttgatgagcatggacttcctccttcgatccataaaaaagcccatccgtcccggagcggttcccccggggacggacggacctgactgtcaatttgattctgtccggacttacagcacggtccggtaatagagcccacgggtcttttccgacggcgctccgggcatgggtctgccctcggcatagctctgtaccaccgcttcgcactgggcagccgattcccgggtaaaccacagggtcaggaaggagagcccttccagctcgccaagacggtctgccagccagagcggtacgctgttgtaaagctcgctcacctgcctggggtgaccgtcatgccgtccgcagtccacagtgaagcggacccccttgcggtcggtgaggctctcatagccccggcacttgccgcagccgatggctgccttgatgggacagttgcgcagtgccatcagcggcagatagccataggccaggattccctggggcaggaagccgcccaggctccgggcccgggtcaccggcagttcaaagctcagttcggtatcagtaaggcccagcgccgcgtattcctgcaccgccgccgaattggtgatgttgaggctgtaaccgcccaccggcgaaagcccggcattccgggccatatcaatggcgcccaggttgccgcaccaggcccgggtcacacccagttcctttgcctgacggagcacttccagcaccgcgtcggtgccctcaaagagcagccgggggatctccacaatgagctgttccggctttgccttgcccgacgcgactgcctccgcaatgtcctcatagggcaggatcagatccgggcaccgggcagcgatctccggtgtgagctgggagagccgcagccgggcccgcagggtggggatcttccggtcccgggtgcgggggaaggcccgctgtgcccggtcggtgaaggcatgggactgcacatcgctccgggcagcggtgagctgctccagggcctcccggcgcagggcattgagctccgaagccggaatcatcagcccatcgtccagatcgcagtccatttcgtccgcatagaagggagtgccgccggtcttgcccagattctgggctgcccgctcgggtgtggtgggcttgttgatggctgtctggggcacactgccctccacagtgaaggtgtgtccgtcccggtcggatacggtcaggcgggtgggctgtgccgcacgggcctccagacgcatggacaccggcaccagcggattttcccggtcatagagccgggccagttcgcccagcacgcccgccgccgaagtgacatcctccttctggcggtagccgaacatctcccggtcgatgcgtccgtcaaagtagcccttggtgaagccgctccgggaaaagacgctgcgcagggtttcaaagtccaccggacggccctcgcaggcagtgcggatggcactcaccgccgccgccacatattccggacgcttcatgcggccttcgatcttcagcgaggccacgcccatttcggtgagctcggcgatgcggtccgccagggacagatccttcagggagagcgcatagggtttgccgccctcagcctggaaggtcagacggcagggctgggcacagagtccccggttgccgctgcgtccgccgatcatcgaactgagatagcactgtcccgacaccgacatacagagcgcgccatggacaaacacctccacttccagcggggtgttttcacagatatggcggatctcggcggcggtgagctcccgggccagtaccacccgggaaaagcccagctcctcacagagccgtgcgccctcgaggttgtggatgctcatctgggtggaagcatgcaccggcagggtgggagcgcactcccgcaccatccgggccactgccagatcctgggtgagcaccgcgtccacaccggcttcggcagcggtgcggatggtctccaccgcctcatcgatctcgtcctcaaacatgacgatgttgatggtctggtagacctttacgccccgcagatgacagtattccactgcccggcggagttcctcggcgtcaaaattgccggcattgcggcgggcattcatacccttgccgcccagatagaccgcattggcgccgcactgtaccgcagcgatcagcgaatcaaagctcccggcaggtgccaggatctccggatgcttcattctcttctctccttacagcttggtctgaccgtcctcagaaccgcccagcatttccagacggcgcttcaggcgctcattttcccgcttggtttcgtccagctcgatccgggccagagtggcatcttccagataatcggtgagctgggtacgcatattgtcagcgctttcctcgctctttttataggcattggcatagttgagacagcacagcaccagtgcatcgttgaggctcacccggtcattgccgtccatcagctgacgcacctgggcatcgatctcccgtcccagggacagcacccgttcttccccttccggggtggcgattacataacgggacccggcgatttcaattcgtaccttgttgaccataatcttctcctccacatacgagatgcaaagccgttttttgccggaaaacgactgtcagctcaaaatctgctctccttattatatactatttttctccggcaaaaaaggggctgtttcctgcttttttcggaaattcttcccgatcccgacaatttccctgcagtaaaattcttcctgcctgtcactatatgaatacacaatcgcctttttggaggaggaatgaccggatgaaactgtttcaccgtatgatgatgctcaccctgatcctgtgcctggtgttcggcctgggcggctgtacacaggagaactccccgtccgaaccggagcaaagctccatgcagacggtggaacccccggaagagcccgggacagaacccctgacctttgaaaatgccgatctggggatcgcttttgacctgccggacagcctgcggggacattccaagatcatggtgggggaccgggacgccggggaacaccgggtggataccgtgaccgtctactatatggagagccccgaacggcaggagaaggatattcacctgctcaccgtggagctctggcctgccggcgcctgggacgacagccagtccaccggtacccccatcggggaatcggcagacggacgcaccgctgtgctgcacacgctccaatcgaaccccttcagcgaaggggacgaggaatatgagctgttccagaccctgggcagcgagatcggcgtggtatccgaaaccttcgccttcaccaatgtgggataatgccctgagaggacagctggtaccggcagctgtcctttttcttttgacgtggatgtggtacaatagtcccaatgaaacctctggctcatctgaaccatcgaaaggaaggaataactatgccgaacttcagatccattctcccggcagagctttcgggcaatgccatccagcgcatctccaaacagtgggcccttgcctctgcccaaaagccggacggtgctgtcaacaccatgaccatcagctggggcggtctgggatacctctggaatcagccggtggcattcctgtttgtacgcccccagcggtatacctatgaatttgtggagtccgcagatggattctccctctgcttcttcccggaaaagtaccgcaaggaactgcagtactgcggcaccatttcgggccgggacgaggataagatcgcacactgcggctttactgtggcccatcaggacggcgttccctatttcgaggaggccgaagctgtgctgatctgcaagaagatctacgcccaggatctcaccggggactgtgccctttcggagctggtgaccaatcagtatcccaccggcgactatcaccggatgtatgtgggcgctatccagaccgttctggtgcgggacgatgcgtaaacccgcccgggtctgcctgctggatgaactccggggactggcagtgctgctgatgatcttctatcacggcgcctatgacgctgtgtacatcttccggtttaccggctccggctggttcaccagtgcccccatggacttcctccagtggtacatcgctgtgagctttatcctcatcgccggcattatgggacggtattcccgcagcaacttccgccggggtgtgaaaaccttcctctgcggcctgctggtgaccgccgtaaccctgctggtcatgccctcggaacgcattctgttcggcatcctgcactttctgggcgccgccatgatgctgctggggctctgtgaaccgctcctgcggaaaataccggcagcggcaggtgtactgctctcagcggtgctgtaccttgccaccgactccatcggacagggctggatcgggctggggcccttccggctggaactgccccggacgctctatgacgcgggctttctcttcccgctggggctgcacccattgatctttgcctcggcggactactatccgctgctgccctggatcttcctgttcctggcgggctactggctgggcgaggcctttctccagcaccgtgccccggagttctgctaccgggaacacctcccggcgctgggctggatcggacggcacgccctcattatctacctggtgcatcagccggtggtctatggcgtgctgtggctcgccgactggcttctctgataaaacccccacttctgttccgctgggacaggggtgggggtttctcgttattccctgcatattccgggactgcgttctcccctttgcggaaaatttccggtggaaagcatcgttgccggagcgcaaaaaagcccgtccgttcccctgatcggggacggacgggcttttttgttctgtttattccgggaaagggaatcagccgttctggcgcttgtcgatcacttcagggctgaactcctcaacggtcttttcgttgacggtgagctcgggcagggctgcgatccactcctgtaccatggcgtcaaattcgtcagacttcatctcctgcagcaggctcgacttgcgggcagtcagttcgctgccgtccgggtccagctccagcttctgcactacataatagtagttgtcgctctcgataatcttgacctcgcccactgccatggcatggctctcggtccggtatacctccggcactgaagtattgttgatgcttaccacattgtcatactcggacggatcggtctcttcctcagcagtttcctcgccgtcggtggtctcctcctccgaatcctgctcctgctcggcttccatctccttgatgatggtgatcatatcctcgccgttctggagccgcgccagagccgcttccgcctgggccttgccgctctcgggcagggtctcgccctcctccagctccgcttcggctgctgccagctcgtcctcggtcatggtgtccacgctggtcttggcatagcttaccgcacgggtacggtcatagttgtcgttaaagtactgcttatactcctcctcggtgggagccagctcgccgccttcgccatagaagtgctggaacaggtcaccggtcttggcagtgtactccagcatcttctgataggaatcccggttgacacccatcagggtataggattcaccatagctcttccagacgctgtctaccatgctctggatattggtgttctccgcctcggtgagtgtaagacccagttcatcaaacttgagggtcaccgccagatactgcttggtgaggttcatggctgtatcccgaatccactgatcggcagtcttatcctcgatggaactttccagcagggtatcaccaccggtggcatactgacctgccgcactgtatgctgtatacatattctgtacatagatgccggtgggtacttcctgattgtcatcgccgtacttgagaatccagctggtgctgcccagagtacaggccgacaggctaaaggacattgccgcagccagtgccacggcagagagtttcttcatcatcattcgttcttccctccagtcccatacaggaaataatccttctgtttgtgggactccgatatttttgcaggcagaaaaatcctgctgtcccggcgcagaatgccggattttcatacaagtgctattctaccacaccacagtggaagaagtccaccggcagagggtaaaaaagcatgaactttcttttaatttccagccgccggagccggcagggcagattccatggctgccagagcttcctcaatggcggcaatgggattctgtccggccttgggacgcaccagatagtagggcttctgacccgaagcacccaccatgacccgtcccttgagggtggaggccagtcctgaagccagggtcatatccacccgctcaggatagaggaacataccctgatcccgctgggcgatctcccggatgcccagagccgcggcccggccccggaccagtgccacatcaatgagcccctgtacggccttgggcggatcgccgaagcggtcgatgagctcatcggtgacatcaaaggcatcgtccttattctggatggcagcgattttcttatacacatcaatgcgctgggacagccccttgatatagctctcggggatatgggcgccgatgttgagatccaccatgcactcggcactggtgcgctcgggggcttcgcccttctgttcagcgatggcctctcccagcagccgcaggtacatatcatatcccacggcctccatgtgtccgtgctgctgggcgcccagcacattgccggcgccgcggatctccagatcccgcatggcaatgcggaagccggaaccgaaggaggtgaactccttgatggcggaaagccgcttttccgccacctcggtgagctgcttgccccgggtgaaggtgaagtaggcataggcccggcgggtggagcgtcccacccgtccccggatctgatagagctgggacagtcccatgcggtcggcatcctcgatgatgagggtattgcagttgggcacatccacgccggtttcgatgatggtggtgcagaccagaatatcgatctcctgatccaccagctgctgccagatgcgggagagctgttcctcgctcatttttccatgggcggtgacgatccgggcatccggcgccatctcggcgatcttccgggcacaggcgtcaatgctctccacccggttgtggaggtagaatacctgtccgccccggcgcagttcccggcggatggctgccgccagaatctcccggtcatattccagcacataggtctgcaccgggtgacggtcctggggcgcctcctcgatgaccgacatatcccggatgccgctcattgccatgttgagggtccggggaatgggggtcgccgagaggttgagcacatccacggtgtggaacatctccttgaaccgctccttatgcgccacaccgaaccgctgttcctcgtcgatgatggcaaggcccagatccttgaactgcacatccttctggatcacccgatgggtgccgatgacaatgtccaccaggccccggcggatatccttgacgatctcctcctgctgcttgggggtacggaaccgggagagcagttcgatgcgcaccggatacccctccatacgctgcaggaaggtctggtagtgctgccaggccagaatggtggtgggcaccagtacggcgcactgtttgctgttcatcacgcacttgaacgccgcccggatggccacctcggtcttgccgaagcccacatcgccgcagagcagccggtccatgggctggggacgctccatatcgtgcttgatctcatcgatgcagcggagctggtcatcggtctcctcataggggaaccgggcctcaaactcccgctgccagtcgttgtccgggtcaaaggcatagcccttggcctgcatgcgctgggcatagagccggatcagctcatctgccatatccgccacagccttcttgacccgggccttggtcttgctccactcggcggagttgagcttgttgagccggacgccgccgtcctctccgccgccgatgtacttggataccagatccagctgggtgaccggcacaaagagcatatcggtgccggcatagcggatcttgatataatccttgaccaccccgtggatctcccgcttgatgatcccctcgaacacgccgatgccatgggtgacatgcaccacatagtcgccgggagtgaggtctgccagcgagcggatggggtcggatttctgctttgtcttgcggcgcttttttagggaagcgcccacccgtccgtgggtgaataccgccagtctgatctccgggtactcaaagcccgcggacaggctgcccggcagcacatagacctttttaggggtcagggccgggagatcggcggcatagtcggcattgtagcccttgcccaccagatcgctggtcagggcccgcccggccttctcggtgcccgctaggatgcagacggtatagctgctgtccagataggcatccaggtcctcggtgaggtgggccagttcgccgccccacaccgccagctggacggcatcaatgttgtagagccccttgaggggaatatccccgatgctccgggtaaaggtgtccataaagagggtgggacgcactgccgcttcctcggcaatgcggtcgtaatctatgaggtaccggtcgcagccctcaaacagcacgccctcctcaaagagcaccttcatatcctcggtcatcaggcggttggcgctgcgcagttcctcccggactcccgccggttcgcacacaaagagcggcgcgtcctcgggaagatagtccagcagggtgcagcggcgctcatagagcaccggcaggtatttgtcgatgttctggagggtcagaccgtcccggagcttgcccacatcgctgagcagatgctccttggccggagccgaatacttgccccggagcttcctggcccgggcttccagatcatcggcaaagctctccggggagtcgtagagcacttcccgggccggggtgatcatacagcgcttgcagttgtcctcccggcgctgggtgtcggtcttgaatacggcaatgctgtcgatctcatcgccccagaactccaaacggaagggatcgggcatgtggggcgggtagaagtcgatgatgccgccccgctgggagaactgccagacgccgtccacctgatcccggcgctcatagcccgcagccagcagccgggcgatgacctccccgggagagatggactgaccggcggtgagggtggtgcagtgctgccggagggtttccgggggaatggtgcgctggagcgctgcctcgacagacgccaccaccaccatttcctccccccaggccagggattccagcacccgcagccgggcaaactcatattcccgggatacaccctccacctcccggaaggagaactcccgggcgggaaagaccacagccttttcctcgccgtaaaaacggttgagatcctctgccatccgcacagcggcaggttcgtccggggtgagcaccagacggctgcccccggtgagcgcccaggcaaaatgcaccttgtggatctgggaaaggccggttgccagcatgggggtcacaccctctgccaggttccggcggatctcctcaaatgaccccagccgctctgccgcagtcaaaaagcccttcatctcgtctcctccctcctttggagtctctcattcctcacaggaatttgcgcatcatcttgtggggctgaccctcatcatagatcaggtccccctcttccttgtagcccagtgcctcatacatcttcatggcatgcagctgggcggagagttcgatctctttggcgtccaggccgcggagatactcctccagctcctggaccgcccggctgcccagccgatggccccggcgctccttgagcacagccacccggcccagtacccagacgccgtccggcttctgatagctgcgggcagtggcaatgccctcttccccgtcatagatgcacagatgcaccgcatcggcatcgtggtcgtcaaactcgttcttgtagccctgttcctccatgaacaccgcagtgcgcaccttccgggcgccggggttctcctccagggtacgggtgatccgtgtggtgtacataaaaactgcctcctcagctgttgtagcggttcatggcctcgtccagccgcccggctacaaacagccggacaatgtcatcacagtggctgcaggcctgttccagtgcttcgccctgttccttggtgaaccggcccagcacccaatctgccagatcatagtcgggatggggcttttcccccacgcccagcttcacccgggcaaaatcgtcccggcccagcagatagatgatattcttgagcccgttgtgaccgccggcactgcccttgcggcggatgcgcagccgtcccggtgccagggagatgtcatcacagatcaccagcagtttttccaccgggatcttgtagaactgcatggcatcccgcaccgattcgcctgagagattcataaaggtggacggcttgagaaatgccacccgatgcccgtctatgacagtatcgccgatcaggcccttgaatttcaggcgtttgatgtcgaagcccagtttttctgccatgatgtccatggcaatgaaaccggcattgtgacgggtgcattcatattgggagccgggatttcccagccctaccaccagatattccggtgcctgaccggcagtggttttctgtgaacgaaacagcatctgttttcctttcctgtgggcaaaactttttctcgagacgccgcaagggcgggatggagcgatctccaccccgcctgcagcggatattgattgatggaagcgtcccgtcttgggaacgcctgaaaactcagttaaagaggggagataccggctgatcctcatagatgcgctcaatggcatcggcaaagaggggagctaccggcagctgaacgatcttcttgcaggagttgtcgcgtaccggaatggtatccagcagaaccatctccttgaagacgctgttctcgatgcgctcgatggccgggccggacagtacgccatgggtggcgcagccgtatacttccttggcaccgccgcgctctaccagagcagctgcggcattgcagatggtaccggcagtatcaatgatgtcgtccacaatgatgcaggtcttgccctgtacatcgccgatgatgttcataacctcggacacattgggacggggacggcgcttgtcaatgatggcaatgggagcgcccagacggtcggcgaactttctggcacgggtaaccgaacccaggtcaggagatactacaaccagatcctcccgggagaagtccttgaacttttccacgaagtagggagccagaagcggaacgccctgcagatgatccaccggaatatcgaagaagccctggatctgtgcggcatggagatccatggtgagcacacggtcagtaccagcggcagtgatcaggtctgctaccagcttggcagagatcgggtcacggctcttggccttgcggtcctgacgggcatagccgtaataggggataactgctgtgatgcgtccggcagaagcacgcttgaaagcatcgatcataatgagcagctccatcaggtgatcgttgaccgggctgcaggtggactggactacaaatacatcggaaccgcgtaccgactcgttgatggaaaccgcgatctcaccatccgagaaggtcttgacttccgcgtcgcccagaggcaggcccagatgccgcgcgatctgctcggcaacatgcggaacggagttggctgcgaaaattttgatgtccttgccgtgtaaattcatctttcatttctccctcttttatattcactcccccggaggcggaccctccgtcccggcggttgtgatccctgttgatttttcccaccggatttaccggcggtattttcccttttccctggcccagccgggtctggtctcctgacgggcccggcccacagccagcgcgtcatcgggaatatcctcggtgacggtggtgccggcggcgatcacactgcccgctccggctgaaaccggtgcgatgaagttggtattgcagccaatgaaggcccggtcgccgatccgggtgcggaacttctgtttcccgtcatagttggcggtcaccacgccgcagcccacattgacttcctttcctacatcgctgtcccccaggtagctcagatgggccaccgaggtcttttcgccgatccgggagttcttgatctccacaaagttgccgatcttggcgccggctccgatgcggctgccgggccgcagacgggcatagggcccgatccgggcgccgcccgccacctggctgtcctccccggtgctctgttccacccgggcgccctcgccgacctcacagccggtgagcatggtatacggcccgatcagacacccctcggcaatgcggctccggcgcagaatgcagccgggcagcaccgtggtatcccgtccgatgaccgtatccggacagatcaccaccgaatccgggaaggggatattcactccctgatccagctggcgttcgatcacccgcttccgggcgatctcattgagccgggccagttccttccggctgttggcgcccagaatcacatcggggctctccgcccggtaaatccctgccggacggtgctccgatacggcaatcgccaccgtatcggtgagatagtattctccctgggcattgtcggtgcccagtttattgagggcgtccagaaggaacgccgcctcaaaccagtaaattcccgagttgacctcctggatcagccgggtcttttcatcggcgtcccgctgctccacaatggcccgcagtccgccattctcgtcccggataatccgtccgtagccggtggggtcctccagccgggctgccaccaccgtcaggtcatgtccgttctcccggtgctcccgcagcgccccccggatggtctcctcatccacaaagggcgcgtcgccgtacagcaccagcaccgaacagtcccggtgctcctccagaaagtccgctgccatcatcacagcgtgtccggtgcccagcttttctgcctgttccgctgtacggcagccctcgggcagcactgcccgcacttcgtcggcatccggagccaccaccacacacagctcctcaatctccgcaagccggcagctgtcaatgacccagctcagcatcggcttgaacagtacttcgcacagcaccttggggtgacgggatttcatccgtttcccgtcccccgccgccagaaccagcgcgcaggttttatccatttttcataacacctccacagagagtatatgaaccgccggatttctcatgccgcacgatcttctctgcctttattatcgcaatatgcgccgtttttttcaagaggttgcagcgaacccgtcaaatttccggacaatttccccaagaaacgccccggcgcacccgctgaattgtgaaattcttcacgccttacagggtgaagagcttgcggctgttgtgcatggaaacgctcatggccagtccgatgcccagataggttgccaccaccgaggtgccgccgcccgagaagagcggcagagtgacgccgatgaccggcagcacgctcaggcacatgcccacattcatcaccgtctgggcggcgatcatcgaaaagacgcccacacagatgaaccgtcccagccggtccttggcccggcggcccacctgcagaacccgcaggcagagcgccgaaatgatccccagcaccgccagacagccgataaagcccagcgcctcaccgatgaaggagaagatgaagtcattgtacatctcggggacatactgatgattcccggagaagatgcccttgccccagagcttgcccgaacccagggcaatgcgtcccagccgctgctgatagccgctgccggtggggtcgaggtcggggttaaagagggtgatgaagcgcatgcgcttgtcctcgtccatgaggccgtaccagatcaccggcaaagcggcgatggtcaggccgccggcggtgaggatatacttccaggccaggccggcggaaaagagcatgccgcaggcgatgaacagaaagacgatggcagagccatggtcgccctggagcatgatgagcagcaccggagcggcggcatggcagagcaccgggatcaggacgcccggctgattgaggttctcctccaccttctggaggtggtaggcaaaggtgacaataaaggagagcttgagcagctccgagggctggaaggtgagccccacaaaggggatctccagccaggccatatcgtcggcacgcccgatgccgaggataaaggtgagcagcaccaggaaataggcggcaggcagatggaaccgccacagatccgccatggtctggtagtcgatgcgggagatcaccaccatggcgcagcagcccaggccggcggcaatgatctgtaccacaatccggctgggctgtacatagcccgaattccagatgccggagagcagcaggacactgaaggcggacgaaaacagacacagcccccagatgatcttatcggtgagtttataatagcggacgacgccgctccagatttttttcatttgttccctccacacccggacagaagccgggaacgggatttttccctgtccttttattataagccccgcacctttccggcgcaagccggtcaagggagaattcacagtttggatacagctgacggaaggtgtttcctttcttgtatgggagccgctttcgtgatataatatcccaaaagcggatattacagttctttccggaaaatcccgggaatctctcccggcttttccgccggatattccagcagcctttcggatgaaagggtttccagtgcctcagtgaaaaacagtcagaaaacaaaagaaacgcaaggaggtcaaacgaaatcatgctcagtgacattgaaatcgcttccgcagccaagatgctgcccatcgaccagatcgcgcagtctctcggtgtgctgcccgaagaactggaaccctatggacgctataaggccaagcttgccgaaagcatctacaagcgtctggctgaccgggaaaacggcaaactgatcctggttaccgccatcaaccccactcccgccggtgagggcaaaactaccaccaccgtgggtctgggcgaggcgatgccccgcatcggcaagaaggctatcatcgccctgcgtgagccctctctcggcccggtattcggcgtcaagggcggtgctgccggcggcggctattcccaggttgtccccatggaggacatcaacctccacttcaccggcgatatgcatgccatcaccgccgccaacaacctgctctgcgccctcatcgacaaccatatccagcagggcaatgtactgggcatcgacccccgccgcattctcttcaagcgctgcctggatatgaacgaccgtgccctgcgccacaccatcatcggtctgggcggcaaggcaaacggcacccccagagaggatggcttccagatcaccgtagccagtgaggtgatggcgatcctctgcctggctgcgaacctgcccgacctcaagaagcgtctgggcgatattctggtggcctatacctatgccggagatccggtctactgccgggatctcaaggctgaaggttcgatgaccgccctgctcaaggacgccatcaagcccaacctgatccagaccctggagaatacccctgccctgatgcacggcggtccctttgccaacatcgcccacggctgcaactcggtgcgtgccaccaagctggccctgaagctggcagactactgcatcaccgaggcaggcttcggctccgacctgggtgctgaaaagttcatggacatcaagtgccgcatggcggaactggcaccgtcggctgtggtgctggtagccaccatccgtgcccttaaatacaatggcggtgtcgccaaggccgatctctcccaggagaatgtggaggcgctgaaaaagggtctgcccaacctggaaaagcatatcgaaaacatgaagaaattcggcgtgccggtagtggttgccatcaaccggttcggcaccgataccgatgccgaaatcgctgttctctccgaggccatggagaagaacggtgtagccttctcgctgtgcgaacactttgccaagggcggcgaaggtgccatggacctggcagaaaaggtcgtggctgcctgtgaggagccctcggacttccaccccatctatgagctggatcgtccggtggaggagaagatcgaaaccatctgccgggagatctacggcgctgccggtgtggaatactccgctgccgcaaagaaggccatcaaggacatcactgccctgggcaagggcggccttcccatctgcatggcaaagacccagtactccctgtcggacaaccagaagctgctgggccgtcccgaaggcttcaccatccatgtgggagaagtacggctgtcggctggcgcgggcttcatcgtcgtccagaccggcgacatcatgaccatgcccggtctgcccaaggtaccggctgccaatcagatcgatgtggacgaggacggtcagatcctgggtctgttctgatttttcccaaatcaaaaggagcgtaaccaatttgcagaaattcatcagttcctccccggcggagaccgaacagatcgccgcggagtttgcaaagaccctccggggcggcgaagtgctggctttccggggtggactgggcatgggcaagacctgttttacacggggacttgccgccggtctgggcatcgaccccgccgaagtatccagtcccacctttgccctggtcaatgaataccggggcggtcgcctcccgctctggcactttgatatgtaccgggtggagagctttgacgccctctattccaccggctttttcgactatctcgacctcggcggcgtcctggcgctggagtggagcgaaaatatcgacggcgccctgcccgagggcactatctacatcacctttgaacgcctcggggacgagagccgttccatcaccattgaaggaggtgccggaaagtgaagatctttgtactggatacctcctccaaggcggcttcggcggcggtatgggaggacggtcacctgctggcggactgctggcagaacaccggacgcacccattcggtcaccagccttcccatggcagaaaatctgctggcagactgttcccgcaccctggaggagatggatgccctggcagtcacagccggaccggggtcctttaccggactgcgcatcggtatggcaatggtcaagggcatgggctttgccctgggcaagccctgtatccccctctccactctggaggggctggcctggaatctccggggctggcccggactgatctgtccggtgatggatgcccgggtgggacaggtctacaccgccctgttccggtgggaaaacgggaaaatgcaccggctgatggatgactgtgccattgcggcggacgagctgcgggaacatctggcagaatatggggcagaaccgaaaattctggtaggcgacggagccatgctctgttataataaatttgaaggacagctggagaacctctccatggcgccggatcatctgctgcatcagcgggcaggagccatggcagagctggcggcatcgctgctggcagagggcaagaccgtttctgccggggaactggcgccggtctatctgcggctgccccaggctgaacgggagctcaagctccggcagcagaaaggcgagtgagggtttatgaaattggcacttggctgtgaccatggcggttatctgctcaaggaagaagtaaaaaaacacctggacgaaaagggcatcgaatatgtggacttcggctgccacagcaccgaatcctgtgactatcccgatatggcggatgccccctgcaaagcggtaaccagcggcgagtgcacctttgcgctgctgttctgcggcaccggcattggcatctccattgccgccaataagcacaagggcatccgggcagcctgctgctccgattgcttcagtgcccgtgccacccgcatgcacaatgacgccaatgtactgtgcatgggcggccgtgttgtaggtcctggtctggcctgccagatggtggatgagttcctgtccgcttcctttgagggcggacggcatcagcgccgtgtggataagctcactgccctggaacagtaattcctgtatgagaaaaggcggttccgtcttttgctgataaacctatatcgagaggagttttttatatggctattacccccttcattgcggaccatccgctgatccagcacaagctgaccctgctccgggacaagaacaccggctccaaggaattccgggaactgatcgcagagatcaccatgctgctctgctatgaagcaacccgtgacctccccctcaaggaagtggagatcgaaactcccatggctgtcactaaaactcaggtgatctcgggccgcaagctggcctttgtaccgatcctgcgtgccggtctgggcatggtggacggtgttatgcagctggttcctgctgccaaggtaggtcatatcggtctgtaccgtgaccccgagaccgccctgccggtggaatactactgcaagctccccaatgacattgccaaccgtgaagtcattgtcctcgatcccatgctggcaaccggtggttctgccattgatgccatcacccagatcaaggcccggggtgtcaagaacatcaagttcatgtgcatcattgccgctcctgagggtctgcgggctctgcaggacgctcaccccgatgtgaagatctactgcgcttccctggatgaccatctggacgagcacaagtacatcattcccggcctgggcgatgccggcgaccgtatcttcggcaccaagtaatccctgtcgtgaatcagaaaagcggaggaaacttcctccgcttttttcttttatggcatggctcccattcccggctgtgtgatgtggaaacgtccatagccccacagcgccccagctatggactgtgcggtttccgggacggcacagccataaagcacaagtgcctccggcaggctctggggaaaaaagccctcagctttcccagcttctgcgcagcaaaaaagggaggggcattcctgcctctccctttgatcgtccgggtgatcggcttagccgttatacagctcgccgaaggtcttgaactcaatattctcgatgatgacatcatccacgggcatatcgttcgcatcggtttcaacgccggcaatggcatctaccacatccatgcccttgatcacctgaccaaagacagtgtgacgataatccagccagggagtaccgccgatctcctcatacttggcagcaacctcatcgccgaatacatcgggcagatccttcatctggctgatcagcgacgggtcggtgatgttggcctgtacgatgaagaactggctgccattggtgttttcaccgctgtttgccatggacagggcgccgcggaagttgtgcagttccttggagaactcatcttcaaacggctcaccccagatgctctgaccgccggtgccgttgccgttggggtcgccgccctggatcatgaagccatcaatgacccgatggaaccgcaggccgttgtaatagcccttttctgccagggtagtgaagttctccactgccttgggagcctgttcggggaagaacatgatctgaatctcacccatggaagtggtgacaaccgcaatctgtgcgtcgtcagcaggttttgtgaactgaagcaatgtggaaccctcctcaaaaagataatccgagctgccggtggtttcagccgactggctctgggacgatgagctgctctggctctgggaggattcctcccccgacgggctgcaggctgtcaccagacccactgtcagcaccgccgcaagcagcaatgcaagctgtttcggcatgctttgaaattctcctctccatctgccatggcgcgctgattctgtatcagacaaacaccaggcttttctggaattttggtaccagaatattgtagcgcaaaagtcctggtttgtaaaagccttcccctgaaattttttgtaaataatttttggctgaatgttaaaaaagcacagcaaaaagccacctcatcatctggggtggctttttatatcgcaaagtctacattcatttatgatacctgtccatggtctgactgactaatcactccagcccgaccggactgcctcttttttcattcgtggttttccgttttacaattgggcttttgtttatgaatccttattatgatcggatcttatgcgttcatcggactcaccttgtatcaaattgtatccttgacttttgcttctttattattcacttgtccatggacctgaaaacattggcactctcataccgttttcaagttgtcgtgttcggcctgctctgccaggacatcccgactctctgttatcgggtcagcctgtgttctgtcggaccgctccttcggcaagctatggttatcacctgtggattatggggagatctgtttcactcatctgtttttactccccggatattgcccgttgcggctatcggtcagaacctgcggtgcaggcgtctgaatgcttcggttcctcgtacattggcgacgcctcctatcttttgttttccttctgactcttgctcggaagctctggttgctttccttgtctataatatagcattgttagtcgatattgtcaatagttttccacgaattttattttttatgtgaagtttcactgccagcactttgttattgacttctcatcaccggcgaattataattatagacagtgatacggaaacccgttccggatcacaagctcaaatgattgtttcaggagtacagaaatggacaatactatggattacggcgccgatatcctcaccctggtggatgatgacggcgtagagcatcagtttgaagtagccgataccatggactatgaggaccatcagtatatggctctggttccggtatttgatgaagccgaagagctcctcgaggacagcggcgaactgctggtcctggagatggtagagcatgacggcgaaggctacctggagcccatcgcagacgaggatctcttcaataccatcgctcatatgtttatggagcgtctggaagaggaattcgacttcgtcgaggaataaggcctgcgcgattcctgctgtgttcgcctataagctgttttatttaatccaacatgtttaattagggagctacgctccaccggcagacttcagacctcccgcccccagggcggaagaagggaggacgaaaccggcgggcaggcacccacctgtctttacgatgggttacaatcatcagcattacggcacagcgggtttcttttacctgcacacggtccccggtattttggcctgggaccgtttttctgtcttaaaaagccggcacagctgccgggaaaggagcatcaatatggacaactggctcgcacgcacccggctgctgctcggggacgaagcggtaaactccctccggcacagccgggtggcagtcctgggactgggaggggtcggcggtgccgcggcggaagccatctgccgcagcggcgtaggagccatgctgctggcggactatgacaaggtggacatcaccaacctcaaccggcagctcatcgctgtgacctccaccgtaggccatgacaagaccgaagcagctgcccggcgcctccgggacatcaatccggagctggatctcaccctccgggaaggccgtctcacccccgaaaacctgcccgaggtgctggactggcagcccgactatattctcgactgcatcgacaatgtcactgccaagctggcgctcactgtcctctgccgggaacggggcatcaggctcatcacctgcctgggcaccggcaaccgtctggacccgtccatgctccgggtggggaaccttccggacaccgccggcaccggctgtcccctctcccgcatcatgcgcaaggaactgcgccgccggggcatcaccgacctgaccgtggtctactccctggaggtgccggtggagcctgcgggcgtacccgccgccgacaacggacgccatccgcctgccagcatggcctttgtgccgccggctgccggattcctgatggcctcctatgcggtgcgggatctgctgggtctgctgccccctgccggacgctgatctgccggctttatacatcaaaaagactgcctgctcataaagaacaggcagtcttttttgtctgctggtcaattcccggtcactgtgaaatcacccgatccctggagcacaataccggctcccatgggcacagccgaatgggcatagacgccatacatctggctagtccccgaagccagggtcaatttttccagagtgacacttgcctctccatacagatttgcgatcgaaaggccgcccttcagatcggcgtaccagactacaccatcatccgaaccctgtgcataacctgtctcacgggagtgaatgttctcactggaaagagtcgtttctccggtcaccgagtcgattctgtaatcatcatagtaatctgttttttcaaatgtatcatccaccatcgcaaattcgctgccatcccaggacagagcaattgggtcctggaatcggaacaccggggtcgaatgccactcataggaaacctgtacattgagataatcctctccatcattggatattacccaggccaatcccagatcggaagccggaatctgaccataaggtatcggctgtccggcctgaattgcatagtcctgagatcgatcagtttcttcatcatagacgattatacaagccgcattaaaagtcagaccggaattatagtaaatggattccttcgccttcggattcatggcatccagcactgcctggggataacctcgagttaccaaagctgcatccatagcctcttctgacatagagcacggcgctggggaaatatctgcataagaaacggagccagaacacatcacgaccagaaccagtgccatgacaacgcttaaaatcccgtgtgttctcacaaatatcctcctttctcagcgcatacaacaccttcggtttttgcatcacccacaccggcatctccccatttgattttatcacactgcattattaaagtaaacccatgaaaaataagccccacaataaagaaaattctgcctccggcaaaaattccgcatagaaccagctttgccggtgaaactacggctgtgggaaaaatttcagagcgaaaggcaggcgatccccgatgaaactctcacagaaggcactgggctggctgggcggcggcgtcaccggactgctcaacgggctgttcggttcaggcggcggcatggttgcggtgccgctgctggaacacggcggcctggaacccgcccgggcccatgccacttccattgcggtgatcctgcccctcaccgctctcagtgccgggagctatctgttttccgggtcggtggatttttcggaggccctgccctacctcctcggcggtctgccggggtgctgggtgggcagccgtctgctgggcaagctctcctccaccgccctgagccggatcttcggggtgctgatcctgtttgcggccggaaggatgtggctgtcatagactggattgcgatcctggccggattcggctcggcagtgctggcctccatggggatgggcggcggcagtatcctgatcctctacctcaccctgatcgccggtgttccccagcgggaagcccagggcgtgaatctcctgtttttcctgcccatcggcgccgctgccctgtggctgcactggcggcagggacgggtggacaaaaccgccgtacggcagttccttcccaccggactgctgggcgctctgcttggcaccgggcttgccatgctggcggacgagagcctgctccgccggggatttgcggtgtttctgctgctcatcggattgcggcagcttttccccggtaagccaaagaaaaagaaaaccggaccggaagcataagtattgccggtctgtccaaactataaccggaggtgcagaatatgatgaatgataaaaaatcccctgtacagaaattcctggagggtaaaggcttctacattgccctggccctctgtgtggcgggtaccggcacagctgcctggctggcggtaaaccgcaccatagacgatattgacgatcagaaccagaagatcctggaatcccggccccagaccgaggattttaccgatcccggagaggtggacgccgaacagaacggtgtgaccatctcctccgagggggaggattcttcctccgatgcctcgtcctcgcgggagcctgccgcacagcccagcggcggttccgcctcatcggtgccgcagaacacatcggctctgcagttctcgctgcccgtagccggtgagaagctcaacccctattccgacggcaagctggtcaaggacgccactctgggcgaatggcgcacccatgacggcctggatctcaaagccgccaagggcaccccggtctatgccgctgcggagggcactgtggcctcggtgaaggaggacggcctgtggggcactgtcatcaccatcgaccatgccaatggtctctccactgtctactgcggcattgcggacgccgctgtccatgagggggacgaagtggctgcccgggaacagatcggcgcagtgggtcagatcccctgtgaactttcgctggaggatcatctccactttgcggtgcagaaggacggcaaatgggtggacccgctctcctcgctgggtctggcctgacccccaatacaaaaacagggaacccggaagaaattcttccgggttccactgctttttaagccaatggctcgatgtattctgagattattcctcgggggttaccttatcggaagaaatctcttcctcaggctcatcttccgcacccgtgggaggctgggagatattctcatccagatcgccggatacttcctcggcttcggagctggactcctcttcggagctgctctcctcagagctggactgctcagtctggctgctggactgttccggggtggacgaagaactattctgagtattgttggagcacgctgttacagccaaagccaccataagagccattgctataatcgcaaactttttcatactgttacctcctgttatctgcgagagattctttctctgcatcttcattgtcgctgataaatatagagtgccgttgtgtaaattgtaaaaaaactatgaattctcagcggcatttatcagttcatctgccaaagaacggagctcatccagggtgctgaccatgccgctgcgccgccggaaatccgaagcgccccgcacccctttcatataggcaaagcagtgccggcgcatctcccgcatagcggtgtattcgcccttgtagcggcaggccagctcggcatgttccagcatcactgccatccgctcacgcagcggcgggtcgggcagcagggtgccgtcctggagataggccccgatctgccggaacacccaggggcgtcccagagccgcacggcccaccatcaccagatcacagccggtctgctcatagagggctgcggcgctcagggcatcggtgacatcgccgttgcccaccaccggcaccgagaccgcctccttcacctggcggataatatcccagtccgccgagggctggtacatctgctcccgggtgcgcccatggatggtcagcgccgcggcaccggcctcctcacagatcttcgcgaactccaccgcattgacatggtccttgtcccagcccttgcggaacttcactgtcaccggacggtccacggcttccaccaccgcccggacgatctcccctgccagctccggacgcttcatcagggcactgccgctgccgcttccggcgatcttcggggcaggacaacccatattgatgtcgatccagtcggggttccaggccagggctttctgtgccgctgccgccaccagtttgggatcgtccccgaagagctgtaccgctccggggcgctccgcctcccccagacagagcagctcctcactcttgcggtcgctgtatatcaggcccttggcgctggtcatctccccgatggaacaggccgagccatacttccggcagatctcccggaatgcccggtcgcccacccctgccatcggcgccagaaccgcggtccggggcaatgtgatgttcccgatcttcaaattcccgtttctcctctcccatggacaggctgaaattcccgtcctgttttttctctccatagcggcaaaaggtgcaaatctgccgctgtttatgctataataggctggtgaaggtctccctgtccccctccggggacggatgcctttccggtcctgtttttatcggtctgtccccggcgccggtctgttccggcaggggtacaggttattataccatgaagcgtcagcgaagtggtataatcggccattgggacggaagcaggctctgcgcctgcggatcgtccggccataaaaataaatcgtaatagccgtccagcggctattataccatttagcgaaaggattttacaagtatgaagctgctcgccatcgactccaacagcatactcaaccgggcttactacggcgtgcgccctctcaccaccaaggatggcatctataccaacggcatctatggctttctcaccatctttctgaagatctgtgaggaaactgccccggatgcggttgcctttgccttcgacctcaaggcgcccaccttccggcacaagctctacaccgaatacaaggccggacgccatggcatgcccgacgaactggcaatgcagctgccctatctcaaggatctgctggagaagctgggctatccggtggtgacctgcgaaggctatgaggccgacgatattctgggcactctggcccggctgtgtgaggattcaggcaatgagtgcgtcatcgccaccggagaccgggacagcctgcagctggtgagcgatgccaccacggtacgccttgccaccaccaagatgggacgccccgaaagcaccttctacggcgtggcagaaatccaggagaagtacggtgtaactccccgggaactgatccaggtcaaggcgctgatgggagacagctcggacaatattcccggcgtggcaggcatcggcgaaaagaccgccctggcgctcatcagccagttccacacagtggacggggtctatgagcatctggacgaccccgccatcaagcccggcgtgcgcaagaagctggaggcgggagtggaatcctgccgcatgagcctgaccctggcggagatcgaccgcaatgcccccatcgaatcagatctgacccgctacattcccaagccccgggacaccgccggctgttcccggctgatgactgagctggagctgttcagcctgatgaagcgtatggagatccccggagttgccgagctggaagccgccggcgagccggtgcccgaggagataaagcctgccgccgcgctgcgcctctgcccggcttcggcagaggcggcagcccgtctgctgggcggggagaccccctacctgctgggccggtacgaaaacgatgccatcaccgccctggcgctcagcgacggcggggagctgctgctctgcaccgcaggggaaccggcctttgaagaggtctgtgccgccctctacggggcaaaggggcttattacacgggattccaagctgctctaccgccactgcatggcaggggagcacccgctgccccaggtgaagctggactgcgagctggcagcctatctgctgcgccccaccgccagcgactacaccaccgaccgtctggcggcggaatatgccgtggttccgctcccctgtgagagtgaggaccccctggcccaggagatggcaaagctgatccctctggccggggcactggaggcgaagatcgcccagcaggagcagcagtggctgctcaccgaggtggaacagccgctggcagaggtgctggcttcgatggagctcatcggcttctcgctggacaccgagggtctcaccgcctacggacaggagctggacacccagctcaccgcccgggccgaggagatctatgagctggcagggggacagttcaacatcaattcccccatgcagctgggcaatgtgctgtttgaaaagctgggactgccccacggcaaaaagacccagcggggctattccaccaatgccgatgtgctggaatccctccgggacaagcaccccatcatcgactgcattctggattaccgcaagctggcaaagctcaagaacacctatgtggacgggctcatcaaggtggtgggcgaggacggacgggtacacagcatcttcaagcagactgaaacccgcaccggacgcatcagctctgccgagcccaacctgcagaatatcccggtgcgcaccgatgtgggcagtgtgttccgcaaattcttctatgccgccggggaccgcactctggtggacgctgactactcccagattgaactccgggtgctggctcacatcgcccaggacgagaatatgatcgaaggcttccgctccggcgccgatattcacacccagactgccgctcaggtattcggcatgccgccggagtatgtcaccagccagatgcgcagccgggccaaggcagtcaacttcggcattgtatacggcatcggcgcctattccctctccaaggacatcggcgtcacggtggcggaggccaatgcctatatcaacggctatctgcgtacctatcacggcgtgcgtcagtatatggaggacaccaagcagttcgccaaggatcatggctatgtcaagacgctgtttgggcgccgccgggatctccccgagatgagcgccaccaaccgcatcaccaaggcctttggcgaacgggtggcaatgaatacccccatccagggcactgccgccgacatcatcaagatcgccatggtgcgggtctaccggcggcttcaggccgaggggctcaaatcccggctgatcctgcaggtacacgatgagctcatcgtcgagaccaccccggacgaaatcgataccgtcaaggcactggtacagcaggagatgtccggcgcggcggagctgtcggttccgctggtggtggatgtaggggtgggcaagacctggtatgaggcaaagtgatatggatacaaggatcactctcctccccatgaccgaagcttatgcccccggcgctgcccggctggatcagatcaccttccccggcgaagcctggagcgaagaagccttcctccgggaagcacgcacccccacttccttctatgtggtggcggtgctgggggaagaagtggtgggctttgcgggtatgcagcaggtgctggacgaggggtatatcaccaatatcgctgtggcggagtcctgccgccgaaagggtctgggacgggctatgctcggcgctctcatcgaccattgccgggagagcggagcttccttcctcaccctggaagtgcgccagtccaatgcccccgctatcgcgctctatgaatccatgggtttcctccccgagggacggcggaagaatttctaccgtcagcccaccgaggacgccattctgatgaccaaacgggatctctccctttgaaagaggtggaattgtttgaaaattttagccattgaatcctcctgcgatgagaccgctgccgccgtggtggaaaacggacgcactgtgctctcatcggtggtgaatacccagatcgaggaacacaaaaaatatggcggtgttgtgccggagatcgcctcccgccgccatactgaaaatatctgcggcgtagtggaaaaggcgctgtccgacgcggggctcgccctcccggagatcgacgccgtggctgtgactgccgccccgggactcatcggcgccctgctggtgggtgtgggctttgccaagggtctggctgccgccgccggcaagcccctgatcccggtgaaccatctccggggacacatcgccgccaactacatcgctcaccccgacctggaaccgccgttcctgtgtctggtggtgtcgggcggtcacacccatatcattgatgtacaggactacacccatttccatgtcatcggacgcacccgggacgacgctgccggcgagagttttgacaaggtggcacggtccatcggcttcccctatcccggcggcgtgaatatggacaaggtcagcggacagggcaatatccatgcctatcagttcccccaccctaaggtggacggc

SEQ ID NO: 342 - DNA, 3530 bp, Unknown
  16S sequences of unknown bacteria
caagcactccctgaattaccgtgggctggatacttaaacagcttttcaacctgcttaattcggcaggaatcggatattatgcggttgccattgcggtatttaccattctaattaacgcaatattccttccgctgaacatcaaacagcaaaagaccacggccaagcagaccgccattcggcccaaaatggacgccataaaggaaaagtgcggtgacgaccgtcagaaatattccctcgaggttcaggagctgaatcaaagagaaggaataagcatgatgggcggctgccttcctatgcttatacgtcttccctttttgtggggagtttggcgcgcaataagcaatcccctttcctacattcttaactggagcagcgaccttataaactccgcaaagggtctcctttcgggtcttgagggcgtcagcatcaaggcgggctatgaggaaatcggaattatcgacaacttcggtacaatcgtcggaaaggctaacgaacagggtcttaccgacattgcaagtcagtcggcggccgttgagagcttcaaaaagagctttaatcttttcggtatcgacatgacccgcattcccaccttcacgttgaattttgccgatccaggagttgacttcactctttggatcatcccattcctttcctttgcatcctccatgctttcgtcgattatatccatgagaatgcaaaagaaaatcaatcccgaggcggctcagatgggcggaatgatgcttttcatgcctcttttctccctctacatttccttccttgttcccggcgccgtgggattttattggatttgttcaaaccttgtgaacatggtcattcaggtcattctcaacaaaaccatgagcccctaccgcattatcgcaaaggatgaagcaaggtttatttccgaccgcaagaagaaagaaagcgctttaaaagccaaaaaggcttaaagcttaaaaactaccggaccagttccgaaaatacaagaggtgtaactgatgataaaggaagctatcgcaaccggaagcacggttgaggaagcaaaagagtcggccgcaaaggagcttgaggctctcggctttaccgacgatattcaatttgaaataattgaccttcccaaagcaaagaccttcggacttttcggcggatgccccgcaaaggtcaaggccttcgtggagattgaagaaaagcccatcgaaaaggtggaaaagtaccagcgctttgacagggacaaaaagccccagcgccccgtaagacccgaaaaagcaaagacggaaagacgcgaggagcccgacgaagctccccttcagaccgagcttaagcccttcaccgacgaaaccaaaaaggccgttgccgacaagggcgttgcatacatcacaaagctgcttgactgcatggatgtttcggccacggtaaagagcggcgaaaccgagtccggagccacaattatgcttgaaggcgataatctcggtgttattgtcggccgcagaggcgagactctcgatgcacttcagtatcttaccgttctcgccgcaaatcacggcgtagacggatattaccgcatcactctcaacaccggaaactaccgtgaaaagagagaaaaaactcttcaggctcttgcccgcagaatggcaaatcagtcgctccgcacccaccgcaacatgactctcgagcccatgaatccctttgagcgccgcattgttcataccgccgttcaggatattgacggtgtgacctcttggtcggtcggagaagaacccttccgcaaggttgtcatcggaaacaagggcaaccgcggcggcagaggaaattaccgttccgacagaggcggacgcggcggttatgaccgtcagagattccagtcccccgcccccacccgcgaaagcaagcaggatcttaacgacgctcccctttacggaaaaatcgaaaaataaaaattaaaagaggtactgttatgtacctcttttttgttttcgtcataatatggtattgataccgagaaactcggtaaatacagccttcaacacatttaaggaggaatattatggcagattgctttaaagacgcggtttgcgtcgattgcggcagggtctacgacagctgctgttcaagagattgccttgaagatcttagggtttatttgagtcccaatgatcaggaaacggccaacacaagcgccggcgcaagggtgcgctcctgcgaaataatcaatgtttgtattgaggtggagccggtaaccttcaaccgcggttattactcggttgacatgatgttctattttctgctgaacatcgacctgtatcccgccgcatcctcgacacccgccaatgtcaacggcgttgcattgtggaataaaaaggttattcttttcggaagcgacggtaatgcaaagacattttcgaatgtctacggagccgaccaatcgggctgcggctcatcggcttcggccaatttgccccgcgcctcggttcagaccgtcgatcccattatacttaattcttcacttctccccgtttgccgctgcgacggcgaatgctgctgcactttcccgaaatcggttacaagcatcgtgggagacattgccgacgaatcgaccgtgcaaaacaaggtggttgccactctcggactcttcacggttgttcagcttatcagaaacgttcaaatgctcattcccgtttacgatttctgtatccccgaaaaggaatgcacctccacaaccgacaatccctgcgaccttttcaaaagaatcaaattccctctcgacgagtttttcccgcctcaaagccttcccgacgaacagggcggctgctcggcctgcgataaggactgaaaaaagctccgatacctttcggcattatgcctttggtatcggagcttttaatttaaaaatcaggcgagagctgcgcccagctccttgcaggaatcaagagcgtcatcatcgggcgcttcgttaacggtcagacaatccgccgcaataacggcaccgtctccgatgcacctttcttcccagtttctcatccattcgccgtctccccatccgtaggaaccgaacagaacgatttttttaccggaaagcttggactcgcaggcctcgaacatgggcaaaaattcgctttcttcaagctcctcaacacccattgaggggcagccgaaggcaacggcatcgaattcgtccatcttatctgccgaaaaatcggcggcggtaaagctttcaacctcggcacccttttccttggctccgtcggctacggcctcggccatggactcggtgttacctgttccgctccaataaacaacagcaattttactcataataatccttctttcattatattttatttttgaaagctcacaacgagccgatcaaacgatttgtgtctgtcataggcattttcgtacactttcgtacattttttatactgcgcaaaagtacgtttggcaatgctttcgtcaccgtataccttccatgttccgacgcattttgcaccctttgcgccgttgtttataaatccgtccacatcctcgggcgg

SEQ ID NO: 343 - DNA, 32340 bp, Unknown
  16S sequences of unknown bacteria
ctgctttatttataataaaaatataataaaaaaggacggggcaaatattaccattgccccgttttgctgtatttttcaagtgttagcgtaaagaggaaacaggatggtaatttttgagtgatgacttttcatatttaaggataatataattgacttgtggaaagagagtaaaaatatacccctgtaatttttggagaaaagaaaggaggacaaatatgaaaaacagatttgtcaaacttacgctgatgctttgtgttattatgatgatggcagctccggcaagctcatttgcggcaagcagctgcggcaactccaaagcggcaaacagaagctgcgctaattatatgtcgctttttacaaaaagcaataatgattgtatgaatgcgctgctcaaagcttttggtctcaagataaagacgcctgccgcggatacaaatactgatgcaggtgcggacacgagcgacagcgcaaactcggaaaatggaagcagcaacagcacaaatggcagcagtaattgcggcaacatagatagcaacaatcagaattgtacgggtaaatggaattgcggtacaaacagcagcaataactgcacaggcggaaactgtgataatgacaacaatgactgcataggcggaaactgcggtaatacaggaaacggaaatggcgcaggtacaaacggcagccaaaatgaaaataaaccgtccaacggcggcagtgcaagcgttagctcgtatgctcagcaggtagctgatttggtaaacgacgaaagaagcagcgccggtctttcttcgcttactatgaatgcggagctctgcaaagtggcgcaagcaaaggctgaggatatgcgtgacaataattatttttcgcacacatcgcctacatacggcagcccgtttgagatgatgaaacagtttggtataagttactcagcggctggtgaaaatatcgccaaaggacagagaagtccggaaagtgttatgacagcttggatgaactcgcagggtcacagagcaaacatattaaacagctcatacgaacagataggcgtgggctattgcaccgatgcaaacggcaatacctactgggtgcagatgtttataaaataagagtatcgaataaataaaaacggaaatccccttgctcgattatacgggcagggggaattttctcctatatagctatatggcggattacctatggggaaaatatcaagcttttttaacctgtgtgtataactcaacaattttttataattttttgttgacaaacacaaaaatcattgataaaatatatgaaaacatacataggagtattttattatgaaaagcttcatctttaacgcatcatactattacttttactttactaagttcactgagtaaggtaatttgtgatgtgtaatgagcttatcctaaaaatttgcttttagtgccgcacagattgcctgtgcggtgttttctattttaagattaaatttggaggtcataaaaaatgatagtagtacttaaaccgggagttcaggaagaaaaaagaacgcagcttatcgagtggcttaagggaatggggctcggcattcatatatcggacggcgattatcagacggtgctcggtctcataggcgatacgagtaaagtggatatggatctgatcgagagccttgatatcgtagattctgttaagagagtgtcggagccgttcaagtgctgcaaccgtaaatttcatcctgacgatatgatcgtagaagtaggcgatgtcaaaatcggcggtggtaatttctgcatgatagcaggcccttgctcggtagagacagaagaacagattgtaggagttgcaaaggccgtaaaggcgtcaggggcaaatatgctcagaggcggtgctttcaaaccgcgtacatcgccttacgatttccagggcttaaaagataaaggcattgagcttctcaagatagcgagacaggaaacggggctccctattgttacggaaattatgagcgtttcggatttgcatcttttcgaggatgtcgatgtgctccaggtaggcgcaagaaatatgcagaacttcgatctgctgcgcgagcttggacagtttggcaagcctatacttctcaagcgcggtcttgcaaatacattaaaagagcttcttatgagcgcggaatatattatggcaagcggtaatgaacaggtaatactctgcgagcgcggcatcagaacttttgacgattacacgagaaatacgctggatcttgcggcagttccgatgctgcgtgagctcacacaccttcctattatagtagacccaagtcacgcaacgggtattgcaagacttgtgccgccgatggcactggcagcgacagcaggcggcgccgacggactcattatagaggtgcataacgatccgatacacgcgctctgcgacggcgcccagtcgctcaggcctgaagaatacgacgagctcgcaaagcagataatgaaaatcagggaggtcgtagcaaaatgatagtcggaatcgtcggtctcggacttataggcggctcgtttgccaaggcgtatcacgaagcgggctggaaggtgcttgcgcataacaggagccgctcggtgctcgattttgcgaaaataagcggcgcggtggacgatgagctcacgcatgaaaatatatcggaatgcgatctcgtgctcattacagtatatccgactgctgctgtaagctatcttgaagctgcagcgcctcacatagggaaaaagcctgttgtaatagattgctgcggcaccaagagagtcgtatgcaaagcctgctttccgctcgccgaaaaatacggttttacttatctcggcggtcatccgatggcaggaaatcaatattcaggctttaaatatgcggataaagatctttataggggagcaccgatggtcatagtgccttctgattttaacaatatagtcctcctcagcaaagttaaggagctccttgcacctgcgggctttggacagatatctgtaactacggcagagaaacatgatgaaatgatagcttttacatcacagctggcgcatgtagtatcgaatgcttatataaagagcccgacggcgactgcgcacgaaggattttcggcaggcagctataaggatatgacaagagtagcgtggctcaatgcgccgatgtgggcggagcttttcatggaaaacaaggactttttaataaacgaaatcgaaatgcttataaacaacttaaacgaatatagagaagcgatggaaaaaagcgatatggacgagcttatccgcattctggatgaagggcgcataagaaaagaggaggtggacggataatgtctgtaatccgcattaaagcgtccacagagtacgatgtgaatatagaaagagggttgctcgattcggcgggcaggctaatagcggaagcgctcggtaaaaagcaggccgcagcagcaataaaaacggaatgcgcttgcggaactgaagcggataaaaagcagaaagaacagggagcgctgggaacggcggcggtaattgcggatgatacggtttttgcactgtatggatcccgcgtctgcgactccctttgcaaggccggttttcgcgtagtcagttttacatttgcacccggagagcagtccaaaagccttgctacatatgaaaaaatattatattttctggcagaaaatcatattacgagaagcgactttcttgttgctcttggaggaggtattacaggcgatattacgggctttgccgcggctacatatctgcgcggcgtaaggtttgtgcaaattccgacgacactgctcgcggctgtcgattcatctgtcggcggcaagacagcgataaatcttggcactggaaaaaaccaggtggggtcgttctatcagccgacgctcgttatatgcgacccggacacacttaaaactcttccggaggatgaatatttgtgcggctgtgcggaagtgataaaatatggtattcttggaaatgagcccttttttcgtagcctcaaaaagacgcatataaaggaacaggaggaaaatgtcatagaaacctgcgtggctatgaaaagtaatatcgtagcagatgatgaatttgacagaggaaagaggcagcttctcaatctcggacatactatcgggcacgccgtcgaggccgcaagcgattttgccgtgctgcacggtcaagccgttgcaatcggtatggcggtgatagcgcgcgctgccgccgcaaaaggtttttgcactgctgagacgcgcgatgaaataatagaaatattaaatatgtatggattgccttcggcagcggattttccgctcgcagatatgtacagcgcggcgcttgctgataaaaaggtatccggcaaaaagataaatctgatagttccgcagagaataggcgaatgtataatagagacgacggacgcggaaaatttgaaggactggatgcgcgcgggaggtataaagtaagatgagcagtataatactggcaccgggaatgcgagagggaagtgtaaaaatcccggcatcaaaatcgcaggcgcacaggcttttaatctgcgcggcgctcggtaaagaggatactgaaataatctgcgacggagtgtctcttgatattgcagcaacggcaaaatgccttgctgcgctcggcgcaggcatagaacttgacgaagctgcaggacgtttttttgtgaaaccgattaaagctgctgatgtttttcgcggcagtgatgggatctgcgaacttaactgcagcgagagcggctcgacgctgcgctttttgctgccattagtcggtgcgcttggcaaaaaggcagtctttaatatggaaggccgtctgcccgaaagaccgctggcgccgtttgacgatgaactcagaatgcacggtatggaaataaggcgggagggcagcctgctttattgcagcggaaaattaaaagcggggaaatatactcttccggggaatgtctcatcacagtacatttccgggcttttgatggcgctgccgctgctttccgatggcagcgagcttacggttacgggtgcttttgagtcggaaggctatgtgcatatgacggaggaagcgctgaagctcgccggtgttaattttgaaaaagatggtcaaaattatgtgattcccggcgggcagagggcaaagcttccgcggataacagaagtcgagggcgattactctaacgcggcgttttttctgtgtgcaggggcgctttccaagcgcggtgtgcgcgtacttgggcttgccaaaaattcggtgcagggcgaccgcatggtgctcgatatcctcaggcgtttcggcgcggagattagggaagaaaatgatgcggtgacggttagaaagggcagtctaaaaggtatagaaatagatgcgggaccgattcctgacctgataccggtgctcagcacagtagcggcggtatcagaaggcgagacgagaatagtaaatgcgggcagactcaggctcaaagagtctgataggctgaagagcacaaggcaaatgctcacagcgctcggtgcggatattacggaacttgatgaaggccttctgataaaaggaaaggagctgctttgcggaggcatagcatttccggagaacgatcatagaatagcgatggcggcggctgtaggagcgtgtatttcggaaaatcccgtaacggtgcgcgactgtgaatgcacagcaaaatcgtatccacgcttttgggatgattttaagagcctcgcacttacatcgaaatgagtctttggcagtgacggaacctgcgcgagatgcgggaagtgcagaagaggcacatacagcggtctttcgctcagaggcgaataagacagcggatggcttagcctatataataatgaagtaaaaggagaatagaatgagcagcagctacggaaaagatatgcggataactatttttggtcagtcgcattcgcccgcgataggagtaacgatagagggaattcctgccgggcaggaaatagattttaacgagcttgccgtatttctcgataggagagcgccgggtagaaacgagttttcgacagcgcgccgtgaggcggacagacctgaattcatatccgggatcaaaggaaatgttacctgtggtaccccgcttaccgctataataaggaatactgacacgcgttcacaggactatgaggagcttgtgcgcattccgcgtccgggtcacgcggactatacggcaaatgtaaaatacggtggggctcaggattacgcaggaggcggacatttttcaggccgtatgacggcgcctctgtgcgttgcaggcggcatttttatgcagtttcttcgcagagaagggattgaaattatttcatgcattaagtctatcggcagtataagcgatgaaaacgaacttacggtgagtacggcgggcaaagaatttccggcagtgagcgacgatgcaggtgaaaaaatgcgtgccttgatagcggcggccaaagcggagggtgattctgtgggcggtgttatcgagtgcaaggtgattggagtgcctgcaggactcggcgatccgatgttcgatggcatcgaaaacagaatagcacaggcggtgttcggcatccccgcggtcaagggtatcgagttcggtatcggatttgcggcagcgaagcttcgcggcagtgaaaataacgactgttttgaaatgaaagaaaataaagtagtaacgaagacaaataactgcggcggcatactcggcggcatcacagacggaatgccagtagtgtttcgggcagcaattaagcctacaccgtctgttgccagagagcagaggacgctcaatcttgtgacgggtgagcaggaaattttgagagtcggcggcaggcacgatccgtgcatagtgccgagggcagtgccgtgcatagagtcagcggcggcgatagcagtttatgatgcgcttcttgcgcgtagaaaggaaatgaggtaaaaaataatggatttaagtgattatagggaaaaaattgattctgtagataaacaaatcgtaaagcttttttcagagcgtatggacattgcggcgcagattgcgcagtataaaaaggaaaatggaaaaccgatagcagatcccgtgcgtgaaagagaaaagctgtttgaaattgcgggagaaatgagcgcagatatgcgcgcttacgcagtatcactttactcgcttatatttgagctcagcagaagctatcagatgaggctgacgggagaggcggcgcctcttgcgaagaagatagaagaggcgatagagacgacagaaaaactctttccggagagcgcggctgtggcgtgtcagggcgttgaaggcgcgtattcgcagcttgcatgtgataagctttttaaaatgccgagtgtgctctatttttctaattttgaagctgtatttgcggccattgaaaaaggcctctgccgttacggcgtaattcctctcgaaaacagcacggcaggttctgtaaatatggtttacgacctgatgatgaagcataatttcaatatcgtgcgcagtataagacttaaagtagatcacaatctgctggcaaaaccgggaactaagctttccgacgtaaaggaaatctattcgcacgagcaggctataagccagtgcacgaagttcctcgaaggtatgcctgatgtcaaaattatctcatgcgaaaatacggctgtggcggctaaaatggtggccgattccgatagaaaagatgtggcagcgctctcgtcacgctcatgcatgaagctatacggtcttgagtgcattgaagctgatgttcaggacagcggcaataattatacgcgcttcatctgcatttccaagaatctggagatatatccgggagcggacagaacaagtcttatgatggtgcttccgcatgagccgggctcgctttataaagtactttcgcgcttctatgcacttggcatcaacttaaacaagcttgaaagccgtcctatgccggagcgcaactttgaatttatgttttactttgatattgaaacttcggtatattcgccgcagtttatgcagcttatgggtgaatttgaaagtatctgcgaggaattctcatatcttggaagctacagcgaggtgatatagatgcttagatgcgggcttctgggcgaaaagcttggacacagctattcaccggccatacatgcggagcttgcggattatgagtacaaactgcatgaatgcgcgccggaggatgtggaagcgtttcttacaggatgcggaaacgggtcggcgaagggaattgtatctggcagatgcgcttctgactgtgaaagcacggaatgcaaacatattgcggaatgggatggccttaatgtgacaattccttataaaaagacggtgataaaatactgtgacgagctttcggatacggcaagaaaaatcggcagcgtaaacacactcgtgcgcagggcagacggcagtatttacggtgataatacggatgcgtacgggtttgagctgcttgtcagaaaaagcggtatcgatgtacgcggcaaaaaggcgcttgtgcttggcagcggcggtgcgtcagtaactgtttgcagtgtgcttgcgtctcttggcgccgatccggttgtcgtaatttcgcgcagcggagctgacaactacgaaaatattaaagagcgtcatgcggatgcggaaattatagtaaatacgacgcctgtcggaatgtatccgcataacggagaagcgcctctcgaccttgcggaatttccaaggtgctgcggcgtgcttgatattatatataatcccgaaaggacggaactgctgctggcggcggagcgcctcggcattccgcatgcgggcgggctttatatgctcgtcgcgcaggctaagcgcagcagcgagctttttacaggtatcaggatagctgacagcgaaattgaacgcatagaaaaaaagctggcagcggcaatgaagaatatagtgctcatcggtatgccgggctgcggtaagagtacggtagcaggactcctcggcgcagctctcgggcgtgaagtatttgatgccgatgcgctggtatcggagcttgcggggatgtcgatccctgatattttcgcgaaatatggcgaggaagtattcagaaaatatgagactgaagcgataagagaactcggaaagaagtcgggagctgtaatagcgacgggcggcggctgcattacgcgcgcggaaaattaccctctgcttcatcagaacggagttatcgtgtggctgaagcgggatatttctatgctgcccaaggacggacggccaatatcgcagaagagcgatcttgatgagctttacgaggcgcgcagagagctgtacgcacagttttccgattttgcagcagacaacaatggcagcgcggaagctgcggcgcgcgcaataattcgcgcgctcatttgagcgaggttttattgatattcatatttttatgggggcagaaatgaaaatattagttataaacggaccgaatataaatatgctcgggctgcgtgagccgggcatttacggcagcggtacttatgaagcgctgctttcatttgtgcgcagcgtttgcgagaaagagggcatagaggtgtccttttttcagtcaaatcacgagggtgatatagtggactgcatacagaaggcctacggtgagcaggacggaatagtgataaatccggcggcgtacacacatacgagtatcgcgattctcgatgcgctcaaggctgtttccattcctgctgtagaagttcacatatccgatgtaaagagcagggaggatttcaggcaggtttcatatgcgggcagagcgtgcgtcaggacatatatgggtcttggatttgacggctacaaagaagcggtgttgtttttgaagcagtatctgaataatggagtttgagaaatggagcggaaacgaaagacgataagatatgcatttcaatcttctcttcctataatggcaggatatatagtgctcggtataggctttggcatccttttgcaaaatgcaggatattcgtggctgtatgcggtggtgatgagcattgcgatatacgcgggctcgatgcagtatgttgcagtggagcttttggcaggaggcgcgtcacttgcggcggctgcgcttatgactttttttgttaatatcaggcatttgttttatggtatttctatgcttgagccttataaaaatacaggcttaaaaaagccgtacctcatatttgcccttactgatgaaacattttcactcgtgtgcacgccgaatattccaggtgatattgacaggaacggctattatttttttatatcgctttttaatcagatatattgggtgatagggtgcgtgtcgggggcgctgcttggaaatatcataccgtttgatactaccggtgtcgactttgtgatgaccgcgctttttgtcgttatttttttagaacagtgggagagtgtaggaaaaattgcaaagaaagccgcacctaaaaatgaaagcacagatagtgcagcccaaaatactgcgaaaagccttgcattgcgaattaaaaatgggattatcactcatataccggcagtaacgggacttgcggcgtcgtttttgtgcctgcttatcttcggtgatgaggattttctcattccctctatggttttgatatcggcagtgctgcttgctgcacgcggcagacttgaaagaggtgagatgcatgactgaaactattcattcgtttcttttgatagctatcatagcagctgtaaccgcgtccataagatttatgccttttgtagtattcagaaaagacgcgccgcgcgtcataatatatctcggtaaggtgctgccgcatgcaataatggggatgctgcttgtttactgtctgaaaggtatatcgatatttacgggagcacacggaattcctgaatttatctcgatagcctttgtggtggcagtgcataaatggaggcacaatacgctgctttcacttattggcggtacggcaatatatatgctgctcgtgcagcttgtgttttaaagaaatatctgcacgagctcttctttcggacggtagccgatggcgctttcctttacttcgccgttctcaaaaagtataacggtcggaatactcataacaccaaacttgatcgagagcgcggcctcttcgtcgacattgactttgccgacctttatcttgtcgccgtactcttcggcgatttcttcaataacgggtgcgagcattttgcaaggtccgcaccatgcagcccaaaaatcaacgagtacaggcttgtccgattttaatacttcctcttcaaaattttccgatgtaatagtaatctctttcattataaaatctcctttcctaatcgcgctgcttatagtacagcatacagtggcaatagccttcaaaatcagggtcggctatttgatctcgaaattctttgcacatacagagattgtcctcgcttttttccagacggcaaggacagtagccgccgcgggcttcgaggccttctttaatagtctttacaatttcttcattttcattaagtaaaattttcatcgccaaagctcctttcttaagagctgtttatatcttatacaatgatgataccacataatttttattttaaaatacctaatcttatgataaaatgtatttaataaatgatgggaggtaaatacctatgttaaaaatagcactttgtcagatgatgtgttcgcgcaaaaaaacgatggaggagaacaaggcagagaactgggctacggctgcaaggctcgtagacgaggctgcggcaaacggagcgcagatggtggtgctccctgagatctggaattgtccttatacaaacaagtgttttgagccatattctgagactgaggatggcgagacggtaaagcttatgtcagaatgggctaaaaagaacgggatatatcttattggcggctcaattcctgaaaacaggaatggcaagatttacaacacctgctttgtattcgacagagagggaaatattattgcgaagaatagtaagacgcatcttttcgacataaatgtacccggaaaaattaaattcatggaatcggaagtgcttactccgggcgacggtgcaacggtattcgatacggaatacggcagaatgggagttgctatctgctttgatgtaagattttcagctttcatacagaaaatggcggatgacggcgccaagctcatattccttccagcgtcgtttaatatgacgacaggacctgcgcactgggatatctcaatgagaatgcgcgcgatcgacaatcagatattttttgcggcctgtgcgcctgcgcgctgcacggaatcatcatatgtaggttacggcaattcgtgtgtggcagatccgtggggtgattttattgctcacgccgatgaaacggagcagatactttacgcggatatcaattttgacaggatagaagaggtaagagagcagcttcctattgtgagaaacaggagaccggagctgtactgataataaatggcgcaaaatgaaagaatataccggtaagataaacgtatatgataagtgcaaatttgctgcctggctttaagaaaaatcacttttaatttataatgcattagtttataatgaaagatagtagattattatattttataatcaggaggaaagacgaatgaaaaaagtattagttgttttacttgcacttgttatggtattcagctttgctgcctgcggcggaggcggagatgatgctgataacaacaacggcggtgatgctgcaggaaattcttatgacagtattcctgatactatgacttcagatgacggaacatatgaagtagcgttcgtaacagatgttggccagctcaaggacaactcattcaaccagttcacttggaaaggtgttaagggttatgccaacgccaacggactttcgtacaagtattaccagccggcaaacggcaatgaagctactgacgcagacagacttgaagctatgtcctctgctgcggatgcaggcgcaaaagtagttgttgcggcaggattccttcagggtccggctctccagcaggctgctgttgcttatcctgacactatgttcctcttcgttgacggatggacgcttcaggacgatgaaggcaacgaccttcagaatgtagctgctgttgtttaccaggaagagcaggcaggatatctcgcaggctacgcggtagtaatggagggcttcacgaaactcggattttcgggcggcggcggcggaactaaccctgcatgcatcagatatggctatggatttgtacagggtgccgaagctgcggcagaagttaaaggtgtagatattgagatgaagtacagctgggagtacggctcatcgtattcaccgtcacctgaccttcaggctatgctcaatggttggtatcaggcaggtacggaagttgttttcgagtgcggcggatcgatgtatcagtctgcatttgcagcagcaggtgctaacgatgcttatgtagtaggcgttgataccgatcagtcaggtctctcggaaacggttattacatcagctatgaaagatcttgcgggctctgttgaggatgtactcgccgctttctatgcaggtaactggtcggattttggaggcaagtgcgtaactctcggtgctgctgagggaagagtaggcatacctacggacacctggtcgttccagaactggacggttgaagagtataacactatgtttgaagacctcaagtcaggaaaccttgttgtcgacaatacagaaatctctgatccaagcacagtatcgtgggatcacatcacattcgtaaactaattgatgataaatattaaatggttatcaatgaccgataataaaaggggggattatttattccccctttttgtaggtcataaggaaagagaaaattattatgccggaatatgtaatagaaatgaaccacattaggaaggagtttcctggaattgtggccaatgacgatataacgctccagctaaggaaaggcgaaatacacgcgcttctcggagaaaacggggcggggaaatcgacgcttatgagtgttttgttcggactttatcagccggaaaaaggtacgataaaaaaggatggacaagaagtaaagataggcaatcccaacgacgcgacagcgctgggcataggaatggtgcatcagcattttaagctgatagatgtatttaccgtgctcgataatattatactcggggcggaaacgacaaaattcggttttcttaagaaaaaggaagcaagggaaaaagtagcggagctttcggagcgctacgggcttaaggtgaatcttaatgcgaaagtcgaagatattactgtgggaatgcagcagagagtcgaaattctcaagatgctttaccgcgacaacgatattcttatctttgacgagcctacggcggtacttacgccgcaggaaattgatgaacttatggaaattatgagaggatttgcgcgcgagggtaagtctatcttgtttattacgcataaattaaatgaaataatggcggtatcggatcgcgtgacagtgctgcacaagggtaagtgcataggcacagtgaatacgaaagacgtcacgaagagcgagctctccacgatgatggtagggcgtccggtgcagcttgaaatcacaaaaggagaaagcaggcctactgatgtagtgctttctgtaagggacttgaccgtaccgtcaaaggtgcataaaaacgatgctgtacgcagtgtgtcatttgatgtgcgcggaggtgaaatcgtgtgtatagccggcatagacggtaacgggcagactgagcttgtgcaggggcttacaggtctcgaaaagatgagccgtggcagcattacgctctgcggcagcgatatttcaggcgcgagtataaggaagagaagtgtgactggaatgagtcacattcctgaggacagacataaacacggattggtgcttgattatacactggagcaaaatcttgtacttcaaaaatataaagacccgcaatttcagcgcggtgggtttattcgctttgatgaagtgagaaaatacgcggacaagctcatagaggactacgacgtgcgctcagggcagggagcggttacaacggcaagaagcatgtcgggcggcaatcagcaaaaggcgataatcgcaagagagcttgaccgagatgcaccgcttataatagcggtgcagccaacgcggggactcgatgtaggtgcgatagagcacatacacaggcagctcgtacatgagcgcgaccgcggcaaagctgtgctgctcgtatcgctggagctcgacgaagttatgagtcttgccgataggatactcgttatgtatgagggtgaaatagtcggagaactcgaccctaaaaagacagatgcgcaggagcttgggctttatatgtcgggagccaagcgcgaggaaaagggggagcaatagatgtataggctcgataaagagacaggaaagcagaaattttttgcgggcgatggtacaaaaagcgtaatttctgctttgatttcaatatttataggtatgcttgtgggcaccttaatcgttgtgtttgtcggacttaacagcgatggtatatcggctaagggcatactggagggtattaaactgatattcttagggctcttcagtacaggaagagatggaggcgacctcagtttcggctttaatgttgtaaacataggaaatatgctcttccgagcgacgccgcttatacttacgggactttctgtagcggtggcatttaagacggggcttttcaatataggtgcgccggggcagtatctcatgggtacggcggcttcaatctgcatagcgctttcggtaccgacaagctcggtgccggcgggtatcgtgtgggtgctcgcgttttgcggcggcattctggcgggcgcgctgtggggagccgttccgggggcgctcaaggcatttttgaatataaacgaagttataacctgtattatgactaactggattgcggccaatctcgtgacctggttttttgacaagagcaatcttaaaaatatgacagaggcaggtaaggttggatatacgtataagacttccgtaaatggcgtgcagacgccgggcttgggtcttgacaagatctttgcgggctctcaggtgaacgggggcataataattgcggtaattatgtatgtgatgatgtcaaagacgacattcggctatgagctcaaagcgtgcggcgccaaccgccatgcggcaaagtatgcaggtataaacgacaagaagaacataatactttcgatggtgattgccggaggtctctctggaagcgccgcggcgctctactggctctccggccatacggagttctactggtcgacgtatcaggcgcttccggcagttggatttaacggtatacctgtggcgctgcttgcagctaacaatcctatcgcagttatattcagcggttgttttatgtcaatactcaatattgcgggaatgcagctaaaaacgctcactgcgtacaatgagtacattacagatataataattgcgacgatagtttatctatcggcattctctatgatgataaagacgataataaataatgtgcagaagaaaaagagtgagaaagggggagaaaagtaatggtatttttaattcagcagacaatgatttacgctattcccctgatgatagtggcgttggcggggatatttgcggagcgcagcggtatcatcaatctcgcacttgaaggtataatgatattcggagcgttctgcggcgtgcttttcgtgagaataatgcaggagaacaatgtttttacacagcagcagggacagcttttgatggtagccgctatggcagttgcggcggcgctcggggctttattttcattgcttcttgctttttcagcgatcaatcttaaggcagaccagacgataggaggtactgctctcaatatgctggcgccggcattcgtgctctttttcatcaatcttctgacgcatcagacggcgatgggaatgtatgtcggggatgcagcaagctggtttatgataaagccgagtacattcgggcttccaagagatcatgactttggatttctcggcaatctgctgataaataaggtatatttgagcacatatatatgcctgatcttatttgtggtattgtcagttatactctataagacaaagtttggactgaggctgcgctcttgcggtgaaaatccgcaggcagccgattcgctggggataaatgtgtacaagatgagatatgcaggcactacaatttcgggtgcgctttctgggctcggaggctttgtgtatgcgctgacgacggcaaactgcgcttcgaccggtgaggtagctggtttcggattccttgcgcttgccgttatgatattcggcaactggacgccgctttcaacagcgcttgccgccgtacttttcggactttttaaatgcattgcggccacatatgcgagcatagatataaacggcgacggtgttgcaatgctggcgcagataggagtcagcccttatgtgtacaggctgcttccgtatcttataacgcttgtggtgcttgcgtttacatcgaaaaattcgcgtgtgccgaaggccgaaggcataccttatgataaaggcagtagatagtttgagaggggcgttgataatgaaaaatgaagttatgggtggaagtcggatgacaggatttatatttaatatcaggatgaaatgttttcttgcggcgtttgcaggtgcgcttgtagtttcactggcggcgtgcggagacgctactttggatgctaatttcgtgccggaaaatgtagatgtaataatggttacagatgagcgcggcctcggtgatatggcatttaatgatgaatgctgggagggctgtgagcgtgctgctgatgagtttggcataaacgtgtactgcatagagcctgagagcagcgagatgtatgcaagtaagataaacgaggcggtgggaatggagccgaagctcataatctgttcaggtgcggatatggagtatgcgcttatggacatagcagcgcagaatcctgagatgaaatttgccataatggatactaacgaaatcggtgataatgtcgcaggaataacattcagagatcaagacggggcatttcttgcgggcatagcagcggctatgagtacagaaagcaaaatcgtatcgttcataggcggcgaacaatctgtcgttgcggatgcgtttcagtacggattttcggcaggtgtggccacagtggcgtctgacatatatataaatacgcagtatgtaggaaacactacggatactgatgctgcgaggatgctggcgcgcgcgcatgaagcgctcggaagcgatgtgatatttcaggctgcgggggccgcaggcattgcagtgatagaggcggtgcaggggcacgaaggcgtgatggtaataggcactgatatagatcagtcgtatattgcggaagatacggtactgtgttcagtggtgaaaaaagccgatgtggcagttttcgatgtcatttctaaaatggtaaatggtacgtttgacggaagcgataccgtatatacgctcgctgacggagcagtcggaataagcgataatgccggaaacctcagcgaagatgcgcagactgcaatagaggaatatatggcaaaaataacggatggtgaaatagtagtgccgtacgactggcaatcgtggtacgattatacgcaggctctaagcagcggtggtgctggcgtgacagtggatgaaggtactgccggcgatgcagatgaaatttaaaagactttgtcagcaaaaagataagtcgtgaattttgtattatgggttgaatttaaggttggagttgagttggtgtgatagatagaagcaagtttttaccggtttcaagagaggatatggaggcgagaggctgggatgaagtggattttgtacttgtcacgggcgatgcgtactgcgatcatccctctttcggaactgctataatttcgagggagcttgaggcgcacggctacaaagtagcgatactcgcacagccaaattttcactcagccgaggattttaagcgctttggacgaccgcgtctcggttttcttataaattccggcaatgtagactctatggtcaaccactattctgtatttaaacgcaggagaaagaaggatgagtattcgccgggcggcaatgcgggcaggcggcctgacagagccgttattgtgtactgcaacagggcgcgtgaggcatataaaggtgtgccgattatgataggcgggctcgaggcatcgctcagaagactggcgcattatgattactgggatgacaaggtaagacgttctatccttctcgattccaaagccgaccttcttatgtatggtatgggggagcgttcggtcgttgagatagcggatgcgctcgattcgggtattgatgttgcggatataacttggattcgcggcacttgttaccgcggcaggatgagcgatatagaagaagaaatagagcgcgagcgtatgctggtaatgggcacagtcagaagcaatgatgctgcaaagataggaagaagtgcagcggcttttgataacagcgatctatcgggcagcattgcgggcggaggcacagtggtgctgccgtcatttgcagaggtgagtacagataagcgccgttactgcgatagttttacgatgagctatcgcaataacgactatattgcgggaaacaggcttgtcgagccgtacgaaaacaatgtgtgcgtggtgcagaatccaccacaggagccgctaagccgcgaggaattggatgatgtttacgagcgcagttatgcgggcacatatcatccgatgtatgaagcggagggcggcgtgccgggaatgaaagaggtaaagttcagcattgtgagcgtgcgcgggtgttttggcggctgcgcgttttgcgcgcttacttatcatcagggaagagaggtgagatcgaggagcgaggcctcaatcgttgcggaagcgaagaggctgacagagcttcccgattttaaaggatatatacatgacatcggcggaccgactgcaaatttcagaaacccggcctgcgaaaagcagcttaaaacaggtgtctgcaagaataaggactgcctgtatccaggtgtgtgtaaaaatatgaaggtagaccacagtgagtacctgtcgattctgcgcgcggtgagaaagctgccgaaggtaaaaaaggtgtttatccgttctggtatacgctatgattatgtgatggcggacaagagcgatgaatttttgcgcgaggtatgcaaatatcatgtgagcggtgtgcttaaagtggctccggaacatatttctccgaatgttctgcgccatatgaggaaaccgtcgaaagaggcattcactgcttttgcggaaaaatataagaaaataaacaaagagcttgggctcaagcagtaccttattccttatctgatttcgtcgcatccggggagtacgcttgaagatgctgtgaatttagccgtatttttgaaagaaacagagtttgtaccggatcaggtgcaggatttttatcctactcctggtacgctggcgacttgtatgtattatacggagatggatccgtttactaaagaaaaagtgtatgtcgccaagagtcttgcggagaagaagatgcagcgggcgttgatgcactttaataagccggaaaacagagagacggtgaaagcggcgcttaaggccgcaggccgcgaggatcttacggagtatcttctcggcaggaggtataagaaatgagtctgattgcgcagcttgcggacatacttgcggaaagcagggcagaatatgaagaaataatgcacggcagcgggagaaatggcggcagcggcgaggctgcttgtgggtcagattttcgggtggatgcggtattcggcggcgaagctgacgattggacttgcggctcgaattttgcggacttagccggcagtgcggcgcaattttgcggcaatgtgcttgcggcaggcgacaacacggtgtttatgcgttatcttatgcagaaaaaaaatatgacgggcaaggtgcagcttatatacatcgacccgccgtttttttcaaaagcaaattacggtgcggacattaagctgtcatctgaaaagcttggaaatatgccgacattgaagcagattgcctatactgattcgtggcaggaggggacttctgagtatctcaaaatgctgtgcatacgcttttatatgatgcgcgatttgcttgcggatgagggctgtctttgggtacatctcgactggcatatagtgcattatgtaaaagtgctgctggacgaaatttttgggcaaaagaactttataaacgaaataatttggaattataaatcgggagggagcagcaagagacactacgcgcgcaagcacgatacgttgcttttttatgcgaaatcgccgaagtattactttgaagcgcagaaggaaaaatcgtataatagaggatataaaccataccgttttaaaggtgttagggaataccgcgatgaaacaggctggtatacgatggtaaatatgaaggatgtatggcagattgatatggtaggaaggacttctgctgagcgcacaggctatgctacgcagaagccggaggcgctgctgacgcgtattctcgaaagctgcacgcgcgagggagatattgtttgcgattttttcggcggctcgggcacgctggctgcggctgctgataagatgagaagaaagtggatttactgcgatctcggaggtcttgccgcggcgtcggcaaagaagcggcttgctaaaagcggcagcagtttttcggtgctggtgcaggaaaacgtatgtaaagaagaaggcgtgatacggcacgaaactggtgaaacgcaggacggcaggcgaatttgcaaggtaagaagtgaagctgactgtaaagcggaagccgattatgaaattagatgcggagctgtttgcggcacctgcgatatttatgtgcgatctgagatagcagatgcgggcgtgctcggcagcatgcatacatatggcagcgcagatacgcttgcggaaacagaggagcaaggtgcggaaaatgcatttgccagcttggacacacttgaaaactgcttgcttacaatcgagcttacgagctactgtgtaaataaaaattcgcagataccggtaaatgaaaagaatttagagattttgcgcggtgcaatgaataaggatccgctcagattcatagatttttggagtgtggattatgcgtatgatggaaaggtgcatagggcggatgatattttttgccgtgataagggtcagctgcagcttaaggcggagcatattctgcggcggcacaggcagcagaaagacgcggtttgcggcgcggagcatctgataagtgtaagggcctgtgatattttcggcaatatggcggagcaaattttgaaaatatgaatttgtgcctttgcattggacgataatttatttagaatgtacgttgtttatcttttcaaataaaagataaatgcacgtaaatttagcggtgtttttattgttttctgaaatgaaatctgatatattaaatgaatgtggtgatgattgcatttacgcaaagatgctgaatataaaaatttgcgaaaagggagttttaaaatggataagagcgatgaaataaaaaagaagagatttaacaaaaagagtgttaaggactttttgtttgattttatgattatagttataggctgtatttccggcggcttttcgagcattgcgatcatgctgccgaatggtcttacgagcggcggaataacaggaatttcaagaatcattatgaattattgtgatataagtttttctgttctttattatgtagctgcacttacagttcttattctctgcttttttgtacttggtaaaaaagaggcgagaaatattgtgctcttgacgattttatatccgagtataatgtttgtgatggagcatattcccaatctcatactgctcgaggagacggatatgacgcttgcttccgtgtattgcggcgttttcggcgggttgagttcgggacttgttctttcaaggggatattcgtttggcggtacagacacgattgccaagatgattaagaagaaatttttgccgcagatagatctgagcaagatacttatggtgctcgatgcctgcatcataataggttccgggcttgtgtacggcagaaatatcgcgctttacgcgcttattacgacggtgatttcaacaaaggttatcgaatttgtgatgtttggactggagacgaaaatcgtaaaaatggaaataatttccaaagaatataacgaaattgcgcaatatataatgaccgatcttgaaagaggcgtgacgatcgatacagtaattggcgcatataccggtacggaaagaaagcgtcttgtggtattctgttcaccgcgcgagagtgttaaggtaaagcagtttgtggcaaagctcgacgatcaggcgatgataactatcatccatgttgataatatctggggtgtaggtaccgggtttaaagagattgggaaggaagaataacgattttaattttgcgggagatggcttctgatatctaaactcctatgccaagcagtttcggccgataaaggcaaaatggctgtcaaatgatggggcattttgaaaacctgaataatgtctttgatatttttgtgcggctgttgtataatgtagtagcgcatagtttttggggcattagcttaatggatagagttgcggcttccgacgccgtaggtacgggttcgattcccgtatgccctaccaaataaaaaaactctgaaaacgctgtattttcaacggattcagagactttattttttgattttgagcactatagcaaaaatactgtgttattgctgtgcttgttattttgatcagattttctgttcaaaaatcgggaaaaactgaatattgagagggctttggccggctcagcgtcataggaataattaacctgtggctttttttatatctgtttctgaaaaggaattcaataaatgaaactgatcgtccttatttattgatgtatttatacagctttagctaacctgaataatgcataattttgccattgctatttgttttgagcggcgtatataattgtattagtacttttacagaaattttttgagggaaactgctgtggaaattggcgaattgaccatttatagacttttttctcttatgcttttttgcgagaggtgaacgatatggattgtaaaattatggtgatagacgatgaacaaatgattttagatatgctgcgcgatcaatttgaactggaacagtatcaggtgattacggcaaaaagcgcggcagaagcaatcagcaaattgagtatgcagccgaatttaatcctgctggatatcaatatgcctgatatggatgggattcagctttgccaaaaaatacgcagcgatgtaacttgccccattttgtttttaaccgcccgtttggaagaagctgaccggatagcaggacttaaagccggaggagatgactacatcatgaagccttttagccttgccgaactgatggctcgcgttgatgctcaccttcggagagaggagcgtttacagcacaggataacgacacggttctttggtgaactggcgattgactatgcgaaacgaacgctgcgcatcaaagaacagactgtggagcttacaaaaatagaatttgatattgtggagcttctgtctatttatcctggtcaggtttttagtcgggagacgatttatgagcaggttcgcggattagatgggatggctgataataccgttgtcaaagagcatatccgtcggatcagaaataaacttggtgaggggtacattgaaacagtttgggggtgcggttataaatgggtcgcataaaaagttggtttttctccttgtcgctcaaacggacgtttatctgcctggtctttctcatggcgcttttggtggctggcatatctgccggtgtgatttctgcggggacatcggtgagaaatcgtttgcttgataccgttacagttcctctgtcttccattattcaacatgagagtggagcttttgaaagcgaggtattcgactctaaaaatatagttattgtcgatgaggatcaagtttttgtggatgaaaacgggcagcttgttttacggacaattgaataccggctgcaaaatctttcgcacaaggggcgcttgctctatcatagcatgggagtggctatggttgccgttccttgcttgctgtttgctgtggggacgcttctatgcgcctatctgttctatgcgatcaaattgaagaggcctttcgctttgcttatgcaaagcacggagcgtatctcccaaaatgatctggattttgtgattgactacagctcgcctgatgaaatggggcagctttgcagagcggtggagaagatgcgcttctctcttttaaaaaacaatcaggaaatgtggaaaatgatggaagatgggcgccagctgaacgcctccattgctcacgatcttcgtaccccgctcacagtagtaaagggatatacggagtatctgtcctgcaatgttcctctgggaaaaatcagcaaaacaaagctgatggaaacaattaataatttgacccaggccacggagcggatggaagcttatgtgaatcagatgcgcgatatacagacgcttgatgtggtgccgatcaggaaagagcctgtcagtctttctcattttctcgatcagcaaaaagaaaaatatacgatgctcgccggaaagcataagcttcgatttgagctcgtctgcggggaacttcctaaaagtccgcttttacttgataaaactcttatggagagaatggtcgataatgtgatttccaattcaatacgctatgctcaagggcaaatcacgatgggcgtgcaatggcaggaggatcttttgtctatttgcgtttgtgatgatggccccggattttcaggaaatgcgctgaaatctgcggcaacagcattttacaaggaaaacagcgagaacgaccactttggccttggcctcaccatctgtgatacgctctgccgcaagcaaggcggaacgcttgcgcttgaaaacgatgaaaacggcggagcttgcgtggtaatgagcatagcagcagcgcctgcagaagagacaaataacaaatgaagaaaaatgatagctctgttacaaaataaaggactacaggcatttataaataagtatttactgggcggacaaccaaaaacggatggccgctttttagttgttttaaaggagagaaaatatgaagcccaaaaataaaatctataaaaatcccctcaaaattgaccgttaatagacattttctttttatactcttactatcaaccgataaggagagtattttttatgtacaaatcattctacagatgtattgcggctatagccgtgagcttctgctttctggccgggtgcggcggaagcattgaggcggggcaaaagacagggggagcgaatgcagatgccggagtatccggcgatcctgcatctctgtttgatcaggcttcttcagcaatggaggtaggcagcttcagctacggttggccggatgagcgggatgtgttcacctattcaggtcaaccgctggagattcccttcagactgatgggaacaatggcagggaccccgcaggagatagggcttctgctctttgtagacggtattgcacagccctactgcgctgtttttgccgatggcagtgagcttacagaagcttatatgcagacgttcaggctggaacagggtgtggataacatttttgatttagtctttcagcctgttaccggtaaggctggggacaatctttctattcaagccgtcgcaattttagcgccgagctaccttccgcaaggagcagaaaatccaaactatggtttctatcactccgcgaatatcactatccctttgcgaattgcttttgagaaagacgcaccggcagagaaaaagaaggaagcggcaaacagctgcgagatcgttgacatacccaaatctattgctgacagcgatgagattttcgggcttgagaatagcagagatactaacagctatctgtcggtaatacctacagatgatgaaaacagttctgttatctatgccaaggatggcaccgcgacattcaaggttcgtctttatggcgggcctgaggctgatcacaatatcacggtctttgtcaatcatcagccggtgcagattgacaaagcggactatcttgcagttcgtacacaaaaagataaaatgctcgaagcgaccatcaccttagacgtatccgtatttggagagataggcacgatttatgcgattgcatcatccgccggcagagacagcgggctgaccgaaacggtaaaatctccatcagttttatttatcaataaataggataagcggtgtgaaaatcacgctggtgtgctgattttttcattttggtgctgacgctcaggaaggaggattgagatgaaacgatacaactatctgtttttgcttatgctttgcgtatcattgctcgcgtcctgcggaaacagcaaaaatcagatgccaaatagcaatagcgcggaaagctttggcagtaccgtatcagccatattcataggcgaggctaatacggctgaggctgatacgatgcgaagcagcaatgcggatttttatttggagccgcaatatgatgcaaagagcagcactttaattttgaaagatttgtctgcaaatatgacaaaggcatcgtatcattttgatggtgtgcagtcacttttgtcgattgaaaagataccgaatggcgtgattatgctggctgccgcgaaaggggtagagaaaagggcgcttaacggggtatccttgtcaacgaataccggcagtgctgacagcgtgatgatataccgctttgacgagcagctgaatttgcaggatagcttttgtacagacgatcctgacatatcatatgcgctccagaattatccttatgcggtttctccgaacggcgaggaactgacctgggtgcaggaagatggcatctatcggtatgctttggcatcaggaggccttaagcaggtatccttaaaactgccggaaatcgtctatttcgttcaggttaagtacagcgagagcggaaaaagattgttctactgcggcggcggagatcgggagggcataaccttatatggcgcgcttgatgcggagactggtgaagggacgctgtttgaggcgaaaaactttgaggtgagctctattgaagtaacgggagattatgctgttttgaatgcggcggttcctccgggtgctgtgagcggcaatgggcgggtgattttcattgacggcatgggaaataccgtaaatgagattacgctgcaaagccagagtgaaaacgaccttgctgtggtgacaaaggacgggaaaaatattgtgaccttacaggcaacggacagcaggagcggtgttctgcgctgctatgaagccgccagcagcaagctcaaattggagcaggactatttttcggaacaagagagcaagccgtatcttctgatagtgcaagagaaaactgtccaggcagttttttatacggagcagggctttgttctctcttctctcattaacctgctttaaggaggctgatatgaaactggaattagatgcaatcagcaaatcttatggtaattttagagcactcagcagtgtatctgcaactctggaagacggtatatatggactgtttggaccaaacggagccggaaagacgacgcttatcaatatcttgatcggtatactgccgtcaagcggaggaacaatccgtctggatggtaacgacaccgcaaggatgggacgaggctattttgatctgataggttatatgccgcagtactcgcagttttatgcaaatttcaccgtactggagtttctttactatatgtgccagctaaaaggggtaaagaatgccaaaagccgcatagaagaagtccttgcttttgttaatctctgtgattggcggcaaatgcggatcggcgcgttgtcgggcggtatgaggcagcgactgggcgttgctcaggctattttgaacaatccgaagcttttggttcttgatgaaccgacagccggtcttgatcctggggaacgtgttcgtttccgcaatttgctctctaagctggcaacaggccggataattattttggcaacacatattgtttctgatgtggagtgcattgccaaagaaatcctcttgctgcaaaagggtaaactggtgatgcagggaacgcctaacgagctggagcagagtattcaaggcaaagtatgggaactgacggtggacaggcaggtcgcgatgctgctaggcgatatgtattgtatcagcaatatgaaacagcagggagaaaattttcagctccgcattatcaatgatacgagaccgtattccggagcgactctcgcagagcctaatcttgatgatttattcctgcataccttcttccagaatagtaaggagcaagtatgaaatttttttatttagaagctcgcaaaggaattctgcgcagatccgttttattggcgcttatcatgtttttgtgccttgatattttgaagattgggcttaactatcattcggggatgatccgtgaggtaatcggaaacaccgagggaatgcataatggatttgcagcaatttatgataaggtgaaaggccctgtcaccgatgaaaccgccggatttcttgtgggtgaatacgagcggctttctcaggcagttgcagacgggacctatagccgcaaaccgcagaaaggcacttacagcggatacatttatggagattattttctgataagttcctatttttatccgcagatgtcctactttgtacagtattcagcccgcatgacagagcgtttgcaacaggaagcggataatttgaaattctatcagtcagtcggcaacaaatttatggccgcaaaaagctcttatattttacagcattatgcggacaggtcggttacatcgttctatctgatggacagctgggagtcattgcttgagtttaatttttcagatctgctcatcattttgctgatgattcttggcgttgctgccagctttacccgtgaaaaagaaacagggatgattatgctcttatcctccagcaaacgcggtggttgttctgtgcttgcagtcaaatgctgcgcagcagttttgtatgcgataggattgacgatcattttttcattgctgaacctgacggtctatgttgccatatttggctttcaaggatggaattgtccgctttatgccattgaagcctatcagaataccccttttagcggtacagtggggcagttttatcttttattatgcgggatgaaggcgctcggcttttctattttatcgctgataatgcttttgctgtctgcttgtttccggcgcacactatatccctgtattctcggcgcttctgccagtgcagcggccgcttatttatctggttgggcagcttctccggtttggtggaaaggcgttatgtcagcaatcagcccgcttacgctcacgaggggctgggatttatggagctgtctttgcggggagcggctcggcagtatttatttgccgcgtgcatttaccgttctgttcattcagtttgtttttgccgtggttttgctgtgggcagtcaggagaaaatcatgttaaaaattgaattgaaaaaactgtggttttatcagcacggtgttataattttactgttttcgctattggcctatgcgataatttgtctggcgtccggctttgacagtacgaaagcgatcgcgcagaatgaggcggcatacctatcgtatattcagaggtggcaggggaaactgaacgagcagaaggtatcagagatgcaagaagagtattacaggctgaatcacgctggtaatcaagaaatgcaggcaaataaggctgtatttatggaagtttacaatcagtactactatgcaaaggaggatccctcccgccgtttccttgtggatgaacggggatggaataccattttgacacatgacagtgtgaactttttgcttgtgctgtgtttgtcagcgttatgcgttcccgttttctgcggtgaatacagctgccagatggataagcttcttcgatcctgccgaaacggccgggagcaattggcggaatataagcttatgattatggcagcagcggcgatgatcgcagttctgttatttcaaggtgttcaatttttgactgttgcaatgaccgcaggattaagcggcttttcatatcctttgcagagcctctcattttttgagacttctccatatacgcttacaatcggccaggcgtatgtaattgtcgtgctgtgccggatcgctggcgcagcctggtttgctgtgatgaccgcgtttctttccgtttggtgcagaaaaaccgtgctgaccatattttccacgatcagtttatcgatttttccgcacctgtttggggacagtttttttaaatatgttctgccgctgccatccggcttgcttgcgggaacagggtatctgtggggaacgctgacagtacctcgctataacgatgattatacagaaatcaacgatgccgttattttccgagggctttcacaaaaagaattctgcgctctgctgggattgtttgctgttgttatcttaatcctgctgtttttcacggtgaggcggtatgcagggcgaaaaccgcaggcggtcattcgtatcccgatctgcgctgtgcttatcgtgtcgctttcttttctccttctgaccgggtgtgccggagaaaggaaaatagagagtgtctatgactttttcgggaacagcgactatggagagaacgcagattacacgattaagctggatatgctggaaaatacgatctatgctactatcaggcagagcggagaggcggtacttctaaatagaagcacctttcagccccagggagatatatttgctatatatgtgacagaaagcacctgctactatgctgtgcaaaatacaagcggtaccggtgaaggggtatgggtctacggcgttgatctctatgatttttcagagtggctggcttacagtaatgttccagacaacacggcagatttttttggcctttttaatgaaaatggaattgattgatcagctaatattcgatagtttttcagaaaaaatttcagttctgcagctaattatattgcctctaatctttgtaaatgagcagtctttgcgaattgcataacctgcataatcgaaagctaaaatcaaagtaagaaaattcccaaagaagtcactatcggaattctcgaatca

SEQ ID NO: 344 - DNA, 32759 bp, Unknown
  16S sequences of unknown bacteria
gatcttggcacacgcgtcagggctttgcgggcgagacggatatcttcacgaacagtcaggcgctgttctgtctcggcggcgtgtattacgcttctctcctgcgcgatatgaaggacgatttcggaatcatcccctacccgaagtatgacgagacgcagactgagtatatctcgtcggcaagctcgaacttcctgagcgtctgcgcggttccggtgacgaacgacgacctcgagaacaccggcgcgttcatggaatactacgcgtatctcggctatacggacatccgcccgcagttctatgatgtcctgcttcagggcaaggtcgcgagggacgacgagtcggtgaagatgcttgacacactgttcggcacggtgacatatgacctcggcggaatattcgatttcggcagattcggaagcgaaatcctcgagatgtgcaaaaaggaagacctcaatattgcctcgaaagttgagaagaagagaaagtcaatcaataatgatatcgacaagcttataaaggcaataaacgaaaccgaatgataattaaaagaccgtcacggcgtggcggtctttttgacgtcaaaacgctgtattcaattaccgtttccgaactccacacgtacaatccgcatcttcataaccccgtccccaaccttcgccagaaaccggaaaaatccgctgaccgacgggtctctcagatcgttgtacccgagcatatacccgcgcgaggacactcgtatgccgtggctccactgtgatatctcgcgtacagcgtcggagaccgcgaaatacgctccgacatcctgtatctcggcatcctttatccacgtcttaagcatcagcttaaccgctgacttattcgcggcgtcaaagacgagacgtcctcccggaaaagcctccgacattgcccgaacgagctttttcacctgttcgttcaggaaatagtagaacaccccggcggcaaagaagatcgttccgccgctgctgtcgatcttgtcaaaccacgacgtgtcgttaaggtcgcaggcgatattttcctccctctcgcccgccggaagcagctctttccgcacgcttatcacgtccggaaagtcaagattgtacatatgacattgtccgttgtcacagcgccgcccggtgtcgtcgagcccgcagccgaggttaaccaccgcagcctccggatgttccctcagatactctctgacctcatacgcgaggtcattctgccgcatcgcgacctcgagaaagccgaagcgctgcatcgcgctaccagctttttccgcgaggccggaaaaatcgtagtcaatctcgtcgatcagacggattgccgtctcgtcacggaacagggacggaaacagctcagagcacatcttccgggcgtaaagcggtattaccagtgtttcctgaatcgtgttcttttctatatgatatttcatagttttcaaagccctttcattttgtgtcctgcatcagaaacggcagctccggcaaagtgttcgtcccgataatcgacacgagcatttccgcgaatcccttcgggtcacgtatctgatactgcatatggttatatccgtcaaagaccgggaagttcccgtcagggtacgctttcatgacatccggacggtacttgaaatgctcctccgcgtttccgaactcaaagaacgtccggcgctggagctcggcggacagcggcgggaatggcttgtcctcaaggctgtcggcaagctgacggcgcagattcccgtatctcagcgccttccccgctgcgatgaaatacggtttgatcgactcgtcatcacaccacattatttttttcagagtcccgccttttgacaggtaaaggctctttatcgcgaggtacaggaaaggcgtcatcagccttctcgccgcaagaccaatccgcgcgaactgccctccgtcgaagaagacgtgatccaccggtattccggatcctgtcagaaacgccagcgcgagatccgcgccgatcgaggacgcgacaacgaaagcgagccgcttcacgtctttttcacgcagaaaattctcaatctgcctgacctcatcctccttgccgagatatttctgcccttcacagtaaacggtggaggtcggaaggatgcagaagtacctttcagcgagacatttagcgacaggcgcactgctcgccccggtcacacccatcgcgtggaagaacagtatcgccggagatgatacattaccatatgtttcaaacagcatatccgttattactccttttccttatcttcagaacccgaagagtgtcattattccggcgaaaatcgccgccgctaccgatgagcatacgattccgccgacccacttgaacgatttgtcgcgggagtttatgtacggcatcatgtcctccgttccggggataatccatgcctttgtgtgcccaacccaaaattcgtcgataagcaaacggtcgatcaggttgacgatcagcagaatcacggtcatctgccagcacatttcaaagaaaccgcgagccttgttcacaacgagaacgcatggcagcaggacagccagatacaccaccgtacagagcttcatgagaagcgcacgccggcgtatgttcttttcggtcgtcagcccgagctcaacgcagcgtttctgaacgtccttgtgataaagatgaaccatcccgacggcgccgccgcgtataccggacgcgcaggcaagaaccagcaatatgccgagcagtataccctcaagcaataaatgtataagaagcataatcttctcccttattctcttccgagtatttcgacgatcttcgaaaaatctttcttcgcctcacggaaatacggcagcatacagtagcagtgaaccatccccggtctcgcagtgaccgtgtacggcacacctgaacgctcacaggcggcggcaaagtccgggaacgcaccatagagcacctcgtccgagctgtagacaaaatgtatatccccggcgccggaaaaatccccgcgcgagccggatatcatgtaatccggaacattttcactgccgtgacgcatgaatttttcgacactcaccatgaaagtgtagtcaattgcgggatcggtttcgttgagcgctttcatacgcgccttttcctcgtcgttccacggcacctcgccgggagacaccgcgacgatatgcctcggctgcgggagcggagatccgagcgcgctgttgtgcgccgcgatgccgagtgcgagcgcgccgccggacgaaaagccgcaggtactgacgtttccgccgccatatattccgaccatctgccggtagcactcaaagaccatgtcgtatgtctcggtgatgcagtgatcggtgcagagcggatagcacgggaaccagacatccgagccggtctcaaggcacagcttccgtatgaccccgatatcacctttgtccggaccgatcatcatcccgccgccgaaaaagaacagtatcgcgcgttttgccggttcgggcttttctcgagctatcaggcacgggaaaccgtttatcacccgtttttcatagtgtgccttgtgatctgtcggcatgaagaacccgcggttcctgttctgcttttcgatcacccgcagaagctcgtcctccggaagcgcgaacaattttttcgtgccgagggccttgtatgcgccgcgaagcagcgctgccgcaatactcatatatatgccttttttcttaaagattttattttcgcgccgtgacgcagagccagccgcgcccgttctcatgtatctgtatgtcgcggaaaccggtttcctcaagcgtgtttttcagttcgttcccgtcatatattgtcatgcctgtgatcttatctgtccacttcttacccttgacgcggtcctcgcactcgttgcagatgagaaacgttccgccattcctgagtacccgccttatttccccgaagctcttccagaggtcaggccagaagtacacggtctcaaacgccgtgacaatgtcatatgccgcgtcagtgaatggcagctcaatgacgctcgcgcggactatctcacagcgcccgcccgcgatctccgcgcggttcaccgcccgggccttcgcgacactgacctcagagtagtccaccccgttcacccgcccgcttttgttcatacaaagcagcttctttatgttcgcgcccccgccgcagccgcagtcaagtatcgacgcgccgtcgtttatatcgagaaattccagtccccacacggcgaggaatctgtgcccgatattcatcgcggcgaccatgatctttccgccggagccggtcgggttgcgtgtgttgtcgataaaagacatcgtatctcctccatatatgaaagtcgaggttagcttaagctaactgatggtgtcacaaccgcttcacgcggctgcatcttatccattcttattatatcatctaattatgaataattcaatattttcgggtatttatccgcattttcgggtcacgagaagaccgactcaacgatcactcgcttattgtccggatatacccggtttttcagatacccgaaagcgagatcgaccgccgtgaatccctgattgtatatatcctgcgtgcagcggtacgcgatggtgccgtccggagtccactgtccctgctccggtcgtatatcgtggcagaagcatctgaccttgtctccgagcccggatttcttcagcgcgagcgaaagagccggaagacccatcggaacatacagaagcgattcccgatcgcccggaacaacatcggtcatgagtgacgccagatatgacggcaatgtcttcggcgaatacattctctcagggtcaagcggaagcgttaccgggctgtaaccgctcatagcgtcgcggaatccgtttatcctctccgatatgttgaagttcgacccaagcgacagcatgaaaatatcggggcgatacgcgaggtttctcatatatttcatcgcgtgctccgccatcctccgcccgttgccgtatgagtccgcgccgacgtagaacgcgttttgtatatcggcgtactccgagagcaggatgacgaaccgcgacgtgtccgcgcaaagcgccgagacgcgctcattcacggcatccgtcacggcggcggcgatgatcacgcagcgcgcgtccatatattcggcctcgtcgaggtaggaaagaacagtctcctcatcgtgcagacgcgagtaggcgttgcatttcacgacagattccgctccgggaccgtgtctcgtgatcgcgtcgccgatcccgcgccacattttctgccagaaaaaagacggcatatccgggattatgcagtataccgagcaggtcccggtcgggcggagctcgtttatgccctttgccgcgcgaagaacccgctgccttgtctcggtgttgaccccgaaacagtggcggagaaccttcgaaacggtagagcggctgacatcaagctcagaagcaagccgcgagagagccgtctcatcatatcggttgtctgacgtttgcatacgctgaagtcctccttcttatgttatcgggattatgaccaaaaatcatatggcgtttttggctattcagcacattaacaaaaacgaaacactctggtataatatatccataatcgattatagcacacttcgactgaaaagtcaatcctcaaaaaaacaaaaaggagaaaacacatcatgtctgaaaaactcagaataggcgtcttcggcggttaccgcggaagttcgatgatacaggtgctgctgcatcacccggatgcggagctcgtcgcggtctgcgacaaatatcagccgctgctcgacaaggcaaaggcggaagcagaggcggcggggcttaatatccgcgtcttcaacaatttcgacgattttctcgcgtatgacatggacgcgatcgtcctcgcgaactacgcgacagagcacgcgaccttcgccatccgctgcctccgcgccggaaagcacgtcatgagcgaggtgctcccgagcgagactatggcgcaagccgtcgaactgatcgaaacggtcgaggagaccgggctcgtctatacctacgcggaaaactactgctatatggacctgaccttcgagatgtggagaaaataccgcgagggcgaaatcggagacgtcacttacgcggagtgcgagtatgtgcacgactgcgcgtcctgctggctcgacatcacgtatggcgacccgaaccactggagaaatcacctttgcccgaccttctactgcacgcactcgcttggtccgatcatgactataaccggtcgccgtccggtgcaggtcgtcggcttcgaaaatccgccgatcgaggaattctatcacctcggtcacgcgggagggcacgcgtccggcatcgagatggtgacgctcgacaacggcgcgattgtcaagagcattcacggtccgctgaagctcgaaccggctcacaccgattacaaggtctacgcgacgaagggatatcttggcacatcagggaacaatgtccgcctgtacaaggaggggcctcagacatgccagggcgagaacacgtattacgagccggagaagttcgtctcccccgacctcgcgaagaacagcggcatggcgtcgcacggcggaagcgacttctacccgacgcacttcttcatcgagaagatactcggcagacaggacggaaaatgggcgatcgacgtatatcaggcggtcgacatgggaatctgcggaatactcgcgttcaggtcgatcctcaccgggaacaaaccgatgaaggttccggatctgagagaccccgcgcagcgcgacgagtggagacacgacaacgcctgcacaaacgccgccgttgccggagatcaggtcctgccctgctcatcctacccggagagaccggttccggcggaggaagcggcagcgaaccgcgcgaagtggcttgagacacattccgaagattgatatacccgaaaggagaaccattaatatgaaaccgcggaagaacagactgtacgccgccattcttatctccttgctcacactgagctcctgcggcggtacaatcagcgacacagagacagccgaaacaagcaatgacacgacagatgaagtcacgactgaagcggcagaaaaaccggaaataccggaaaacacgaactacgaagggtacaccttccgtatactgacccgaccaggaatgcgcctcgacgaggtatacgcggaggaagccaacggagatatactatcggattcaatccataagcgcaacagggaggtcgaggacaagctcgggatgaagttcgatttcatcgtcagcagcagcgactacgagacagacggattgagtccgatcctcgccggtgaggatgaatatgacgcgatatcgacctgcggacggttaagctttgtttacgcgcagaacaaggctgttatgaatatattcgacgtcccatatatcgacctcgacaagagctggtggaatgaggacatcgccgacagtctctcgataaacgaaaagctgtacggcgtttcaggcgatatctcatacgcgacacttgattcctcgttcggtgtggtattcaataagaagcttttcgacgactacgggcttgagtacccgtatgagatggtgctcgacggcacgtgggtgtatgataagtttgagacatacgcgcgaagcatcggacaggatctgaacggggacgggaagatggatatcgccgacgatctcttcggctacggcgcgcatatgtggatgggcggcgtcgaggcgctctacagtaccggcagccgtgtcgtcacgaccgactccgaagggtatccgaggctttcgttctacaacgaaaaagtcgtcgatatatacgacaggtatacggcgctcgtaagaagctcagagtgctgccacttacagccaatgggcgacgactatctgcgcgcgttctgctccgggcgggttggcatggcggacacaaacatacgcagtatgattgaggggcatttccgcgacgcggatgtcgattacggattcgttccgttcccgaagtatgacgaaaacgtcgaaaagtactactcgttcgtcgacgcaggtcagagtctctgggttgtgccggtgaccgtctctgactcctcccgcacaggcgtcgtgcttgagacgatggcatatctcggtcagaagtatataatcccggcttattacgacgtcacgctccagaaaaagtatatgagagacgagatgtcaatagaaatgcttgagattgtaaaggatggagcaacattcgacttaggatactacaacagcgagcagttcggcggcagcctggcgaacccgggagccgatttgatggcgaacaagacgatgaccataacatcgctctacaacaaatacgagcagtcggtgaatacgctcatcgacaagtcgatgatattctaccttgaggactgacaatgttccgagaggcatccggaggaaaatactatttactacgcacttataatgaccgcggtggtcatgttcggctttcagtttcttgtgagccagaaattcgtgaagcacacggggagcggcgcgcgcgccgctctgatattccagatcggaagcaatgtctgcggtctcatcgtcatatccgccgtttcgatgatacgaaacggtggtgtgacgctcggcggcgtgagcctgttcacgcttctgatggcgactctgtccgcgtgcaactcgatcgcctacacaatatgcagtctgaaatcgctcggacggataaatctttcgctctattcggtcttttcaatgctcggcggcatggttctgccgttcattctcggagtctgcttcttcgatgagggaatgagcttcgggaagctgctgtctgtggcgctcatcacggcggcgctcgcagtcaccattaaacccggcgagggaaagacgggtgtcggatactatataggcgtattcgtgctgaacggaatgagcggcgtcatatcgaagctctatcagtccgcgccgttcgaaaaggcggacgagtacggatatatgctgctctgcgcggcggtttccgccgttatctcggcggcggctctgctctttgtgaaaggcgagaacaagaaaccggacagagccgcggcgggggcaatgggcatctgcggaacgctgagttacgcgggcaacctgattcttctgatcgcgctcgcgcacgttccggcgtccgcgcagtatccgctcgtgaccggcggagtcatggcggtctcgactctgctgtgcttctttaccgacaagaaaccgactcaccgcgagctcatttcggtcgcgctctcggtctgcgggatattcgcgatgatacttatctgactttaataatccccgtcgaaagcaaataaaaacagcgactgacaaaatacggctgaaacatagccttattttgccagcgccgttttattattcattaaccatgtcaacctgattgtgtaagcatatcataaacaaaatcacaaatcacaaatcacaaccaatgccccaaaggatgcctggtttatgtcctccatttattttatggttattctcatcacgaatgtctcgctttgccgcggcgcgaggcggcggatgctgtctttttcatcaagcctgtccgaagctcccgcggaggacgctattccgttccacggttcaatgcagacatagtcggcgccgggctttgcccagattccgaggttgttccagctgctaagagagactctgaccgagtgcccgtcatggcggctcttcagcgcgatcgagtccgagcgcggattcttgaatatcagcgcgccgcggtcaaaaagctcacgcgtaattgggatgacccgcccgtgaaggtagtcctcgttcccgacgattatctcgtcgtcgagataatatctgtcgagatcctcgtccgtggagaattcaaggtaacaatcctcaaatttttcgttcccgaccggaaggcggaatccggtgtgctctccgagcgaaaagaacatttccgtatcgccggtgttccaaacgatccgccgtactatctataagcgtgtcgttctcaaacgagaagaccgacctcagtgaaaaataaaacgggtatatttcccgcagaccgctttcagacgaggagctgaatggcagttccaccgagctgtctgtctggtttgaaaactcaaaatccatatccatcgcgaatccgtgccgaggcatatggtagttcttgccgttatatgagtaggagtcgccgatctgtctgccgactatcggaaagagcagcggcgaaatctgcccccagaccctcgcgtcgcccgaccacagataatctgttccggatcgcataagcgcggtcagttcggcgccgtgacggttcaccaaagccgagagcgttctgttatttatacgcatgaaattcaaatcaaaagcttcctcaattaattgtcacttttattatatcacatttgatattatttgtaaagttatattacaaaaatataaagtgggattatattgagacgtcactgccataaaatgtcttgacaaacaggagattatatggtatcatatattattatagataagaaatgaaaggatagtttttgacgatggcaaccccacgcaacgctgattatataaaggactataaccggaggacatttctgcacattcttcgtgccgcgccgacgacaaggagctcgatcgttaaggccacagggctttccagaacggcggtctcgctgatagccgatgagctgcttgacgagggattcatagaagagatggacggcgcgcccgaaaatgcccgcaagaaaaagaattcatcatatctgagaatgcgggaagggcgcagcttcgccgtgggagcgtatctgaaccgcgatggatgcaccgccggaatagtcgatatctgcggagaggttgccgcgaagcgcagactgcatctctccgggttccgtgccggtgataagcttgacccgctggtcgacgccgttgacgacatgatatatgagagcggggtagcccctgagcgcatcataggtctcggactctcggctcccggacctctcgacgaaaaaagcggacggatactgaatccgccgcgctttgatctctggcacaataccgctattgtcgattatctcaagtgcaggacagatatgccggtgtaccttgagaacaacacatcctgtctcgcgagatacaattacaaaaagcccgggaccggaggcagcgaggattatatgctccttcttgttgacagcggcgtcggtgccgggattgtgtctggcggtcatgttctgctcgggcttggtgggtctgccggtgagttcgggcatatttcgataagcttcaagggagagaggtgcagctgcgggaattacggctgtcttgagacatacgccgcgataccggcgcttctgaaggggacttcgttcgacagttggaatgaggtggtcgactcggattccggtgaggcggcggacataatcgaccgcgagtgcgagtatctcgcgtcgggaatagtcagcgcggcgaatctcgtgaatattgataccgtgcttctcgcgggagatattctctatggcgtcgagcgcgtcatgtacaagatggaggacatcataaacagccggacgatccggagaaatattcagagaatcaaggtccttccggcgttctccggtcccgatatgaaagtgagggcggcggctgatattgctttcggaagatttctgatgatatgaaaaaacacggggctgtcgcaagtttggaaatcacttccatttgatggtcaatatgaacaattttcgaggtccataccatattggtaaacttgaattattgtgcataatgccatgaaaatggaaatatttcccttaaatgcgacagtcccttttcgtttttattcgaagcaagccagaatttcgttgtaatgagccgtgactctgtttatattcttcgcgtaatatgacgcgaaattcgggtcgttcgccatgacacagtaattgacaacgaagccgaaacctttccagccatcgaacacgaagccgaaatcgaatacgcgcttcgagatgatgaagtctatcatctctatcgattccttgtcgcgagcgccctttgttttgagtacggtttcgtagtagatcgggatcacatttttgtaagtttcggcacagagcgcttcggcaatgattcctgcccgatctgtgtcgacaacagtcttagggatggccattatcgtgacgccgccgtcgacgaactggatataatcgctctgctcctcgttaaatttcggatacggcagtatcccgtaatcgttttcgtaatcgcggagataggttattcccgactcgagcagcgcggtggcgaagagagtcgttccctcagccattttctcgattccggcgtagttgtcattgccggcggcgttcttgtacttcaagtcataaaatgttccctgattgacccggcagagacttattgcctttgagatgacatcagcggttctttcaacgtcgagcacaagctcgccgtcatgaatgatcttgacgccggacgtgaacagaaacgcgcacggactgcttgtcgccgtcgaatagccgtagaaatcctcgaagtcgcgctttccgtcattgttaaggtcggtatatacgtccttcgtgagctcggagagcttgtctatcgtccacttaccgtcgcgcaccagttgatacatatccggaagctgataggattccgcataaaccttgtcatagtagatcgagaaggttcgtccgatcgaggtcagagaaaaatcgccgacagcaaagaacgctttgccgttgtatgtcagatcttcgcgcgtgctcggtgaccaccacggtttctcgaagtcaatgtaatttatatcgtaccagtttgtgagaatacccgcagatacccatccgttagccgtcgtcgcgtgctgggtcagcagctggtattcgtcgtccccggcggtaacggacgcccgcacggcgcttgcgaggtcgccgtagtacccagtgataaagttgagcttcacgttgaatctgtcttcgaccgtcttgttgcgatgatatatagcgtcagacagcacgtcgccgttaagctcttcactgatgaatccgtcctgacaaaaggtgttgacggtgatgttgaaggtatctccgccgaagtccatctccggaagctcatcgtcaatcagtttccgctgatcctcaatcgagagctcagaggtgacagcatcggacgtcgtgtcactcgctgtcgtcccggacgcttctttcgtttcgcctccgcaggaaaacagtgccgaggacgcaaggatcagcgagagtatgaatgtgaatcgggttcttgctctgtttttcatcagtggtatctcctttattcaaaattccggaacgtcgatcggcaccgagccgagattcaccgagtccgccgagagcagacccgccgccgtccagttcgccgcgtcctcaaacgacaccggaaccggagtgccgttcatgacgcaatccgcgaatttgtccagcatcatcagcgcgccgcagtcatacagcgcgtatgtgtcgttgtcgggcagatcggcggcgtagtcgtccggattccagtacttcttccactcatccgtgacgaaatccttgaattcgtagacgttcttccactcgccgggcttgcagatatcttttatgaagaccttgtggaagtcggtcggtccctgcggcgcctgatagcagcctttcgttccctgaaagctgtagtaggtaacgttgtccgggcggggagagacaaagctcgcgcggagcctgatcagatgcttcttttcggtctcaagcatcaacgcgcaggtgctgtccgccggcatatcaaacgcgcgtccggacgccatgcaggatacctttgtcactttttcgttcatgatgtggaggagcggacctatcgtgtgagtgatgtacgggtgtccgcggcgtccgaaataggtcctctgacgccagccgcctatgttcgggaagagcgggtggtattcctgaaaatctttcaggtagtcgctctcggcgtagtagatctcgccgaacataccgcgctttatcatctcctcaactatcagaagcggacggatgtagcagtagttttccgccatcatgtaaacctttccgctcttctttatcgcgtctccgatacgccttatgtcgtcgagagtggtcgcgacaatgacctcgctcatcacgtgtttcccggcgttcagcgcgtcgacgacggtttcggcgtggacgtcgatcggcgtcgccattatcacggcatcgatatcatccgccgcgcagagctcacgatgatcataataagcgcggacgccgtattttccggcgaaacgatccgcctttgccttgtcaatgtcgcagaccgcgacgagttctgtgttttccgaggcgaccgaattcgcgcaatgaacgcttccccgctgtaatccgacgactccgacccgtagttttttcatgacttattatcctttctcacaatccgaaatccggaacctcgaccggaattccgccgccgttcaccgacgcctcggatagcagcccggctgccgtccagttgagagagcgcgccgcgctgaccggcggttcggtgttgtttataatgcagttcgcgaaggcttcgagcaggagcggcgcgccgatatcgaacttctcagtgccgttgtcctttgtgtcgtcgaagtggttttccgggaaaatgtcccactccttcggaaggaagccgcggaaatcgtagacgttgcgccactcgttcgggcggcagagaccgcggatgtgtatcttgtggaaatcggttggtccctgcggtccctgatagcagcccttcgttccctgaacgctgtagtaggtgtagagatcggggcggctcgagacgaagctgttgcggagtctgatcattccgccgtccttcgtctggagcatcaggacacaggtgttgtcggctgcaagctccgggaagctgtgcccggcggacatacatgtgaccgtcttgatgtcggagcccatcgtgaaacagagcggacccagagtgtgcgtgatatacggatgcccctgacgcccgaaatagacatctcgtctccacggctggagcttgtccgggaagccggggcggagctggaagtccatcaggtaatcgctctcgccgtaatagatgtcgccgaggagacccgctttgatcatgttctgaacgatggtcagcgggcgatagtagcagtagttctcctccatcatgtacttgcccttcgcggtcttcacggcgttcgcgatgcgcaggcagtcctccatcgtcgtcgtgcaggtgacctcggagagcacgtgctttcccgcgccgagagccgcgacgacatggtttgcgtgatcgggtatcggcgtcgcgaggacgaccgcctctacgtcagtcttcagaagctcgtcgagcgaataaaagacggcgggaatgttgttttcaagcgcgaatttatcggctttcgccttgtcgaggtcacataccgcgacgagttcgaggctgtgcgcaaagttcaggatgtgtctcgcgagatcagagccacgattaagccctacgactgcggtttttacttttttcatttttatgaccatacctttcgtactaacttacagttttgaggcggttttgaaagacggcttgtccgtctttcaaaattcacgaccccatgtcgtgaaagcctcaaaactgtttggtctgaaaatttattttcagactttctcccttcagattccgaattgtgacagataacttactgaagaggcgagtctctctatcgcctcttcgtctgagtcggtcgggtattccatcgagtagtagcgcgaatacccggcgtccttgaagatcctgatgaccgacgcgaaatccaccacgccctcgccgtagcgcaggagcgaattgtctttcacagcgtcgcgcagatgaacgtgcgcggtccgtggagcgtaaaccttcgccgcgtccagaagatcctctccggcataggtcaggtgcgcggtgtcaaacgtacacctgacgcgctcgtcctgcattgaccagtactcatcgatttcggaacgcttttcggcaagcgatttcttgtgcggggcttcaatcgagcagatcagcccgtacttgtcgccgaggtcggcgagctttgagttgaattcagcgcgctctttgagctgttcggagcgcccgatttccggtttcgggtttccgcagcagtaagtgacgactgccgcgccgagctcttttgcgagcgcgtagccgttttcgagctggttcacggtgaaatcgccgcttatgtttatgctgaccgctttcatcccggttctcttgaatattccggcgcagtctgttatcgacttgtcggtcgcgttcgcgatgtcgaagtgcggcacccagtcgccgaccgtgcagagttcgaccttgtcgaatcctgcctccgcgagcttttcaagagccttttcgagcgtgaacgtgcggaaagtcattgttgatgccacgagttttgagttgttcattgatttatcctcctaaatggttttcaaaagattgtctatcgtccccgacgcgagcatcagcgccgccgctccggcggcaatgccgattgcctgctgcgctttcagtttttctttgaagaaaatcagtccgcacagtgtcgaaatgagtatcaccgagccgttgaaggtcgggtagaatacgacgctcggcaattgccccgcgaggaagatgttcagccggttgtagacgcagccggcgattccgcaggcgaccaggtaaccgaccgccgaacccggtatcggcttcgggcggtgcttttccgacacggcgaacgacatggcggtgaagagaagcgccgatgtgagcgccgcggcgaacatcatctcgttgattttcgatgccgacccggagcgctgatgaagcttgaagattataccgaccgccgcgctgcacgtgaagaacccggcgcaccagagcttccatgatttttttgcgtggtcgtttttcggcgagacgacgagaaacagcgctatcatcagaatggcgacgccgacagtctgcaagacgttcgcgccctccccgaggacaaaaacaccgaaaccggtcgagataagaagtgacgcgcagccgatgaaggctgtcagggagaccggaccggtcgccatcgcctgcatcttgaagaacaggaacgccgcggtcaccacgccgtaaagcattccccagcagacgctcccggtgtcagatctcagtcctcctgaaatcatcgacgtcccaccaagcagaatcacccagatgccagagaccgccgcgttgaaaagcagcacgccgccgggactgtcgagcccacggtttccgaacttgtgcaggagcagattgtttgccgaggcgaacaggatcgacaggcagagcaaaagatatggctgcaatttatttctccttttctggttcgttgtttcaattataacagataaaagcgtgaaattcaaacctctcagttatcataaaagtactcaaatttatcatccggtgaaaaaaacgcttgacatacgcctgaaattggtgtataatattgaaaaacaatatggagggcgagtgagttatgccgggatctctcagttttgagaatatgcgtgggctgttcaaccgtgacgggtatttctttcagcagacgcttgggcggcagctcctgacggagccgcacagtcatgatttttacgagatgatttgtctcctttcgggctcctgcgtgcatatagtgaacggttttgaagtgaactgctccgagggtgacgttttcctgctgcgcccctgtgatgttcactcgttcagggatcagggcgatggaacgaatgtcgctgctctttcggtcgccaagcccgaggtcgaacagtttatcaccgcttacgggttcgaaaacgacgctgtttttgaccgtcaggagaccccgactgaggtgccgcgcacgatcgtcagaagaatcgagcgtcagggtttttccgagctgtgcgacagtgtgttcacgattccggaaagcagacagacgccgctctgccgcgtgctgctcggggagtttttcggacggtacataaaggaccgcgcgggaattgacagcgtgatgccgccgtcattttcggcgatccttgccgagatgaaccatttgccgaacgccgcggagggtgtgagcgcctttctcagactgtcgaatttcagccacgcgcagctttgccgcctgacaaaaaaatacctcggcatgacgccgggggagtatattaacagtgtgaggatgaaatacgcgtacgaaatggtaatgtccggcgagaaagactatgagacaatctgcgaggagatcgggttttcgagctatacgtatttctgccgtctttttgagaagacatacggcgcgacgccggcaaagacacggaatagctattattccggatgccagacaatatgagttattcatctgtgattgtagtattataaatcagattcacaaaaaacaaggaaatgctgatatgcgccccgaaagtcagaggcttaagggggcataattcagataatcatgtatccggcgtcattctgccgcttggacgtttatggtaataaaaccaccaaaaaagatcacgaaaaatatatgtgataaagaaggtccttcacgccgaggatcaaacgaatttttatgataaaggagatttctcatgacagaattcaaagtgaccgactacggcgctgtcccagatggcgtcactgattcgaccgcggcatttgaaagcgcgcttgctgacgctgagaagtgccatggaacggtgctcgttccgtccggcgattatatcgtcggcaaactcaggatgggggagggggtcgcgctgcgcggtgtctccggatggagcttccgcgacaacggcacggcgactcttcatctgcgtgactccgggtgcgactgcatgatcgatatgaccggctcgttcggcggcagcatttccgggctgtgcctcgacgggcgcgggttcggcgaaaatattcacggtgtcaaggtatactgggaaaagtacaatggaggcgcaaaagaggacactcccaccttcgatgactgccgtgtcggtcatttcagcggcgacggtattcacctcgagcacatctggtgtttctcgataaggcactgtatgctctgtttcaacggcggctgcggattatatatagacggctgggacgcgtttatcctcgacaactggttctccggcaaccgtaactgcggcattctaggcggaccgtgtgtcgcctcgatcaccgctaccggcaaccgcgtcgagtggaactccggcgcggggttcagattcctgcacggcgacagctataatatcaccggaaacttcttcgaccgcagcggcggaccggcgatctcgatgggcgacgagaccggagggtgcagcacagtgacgataaccgggaacatcttcagacgaagcggaaagccctgcgataaactgaccgacgaacttgacaactgccacctcagaatgacgaaatgcgaaaacgttgtcgtcactggaaacgcgttccgtctcggaagggatgacggcggcgtcggcgtcgacagtcccgtccactcagttgtcatgcgtgagaacagctacacgatactgaaggacaatgtgatgcaccacggacagctcggcgacgcgctcgttctcgacggaaataccgactgcgttattgatggaaatatcggataaaattacagagactgccggggaaacctgacagtctctgctttctgatcattttgttgcggaaacgagcgcgtcattcattatttttatgggctgtttttattcattttagcataatatatagcccattattgtgttggaattttaggtattcaatcatttgctttttcttgtgttgacattgtatggtgaatatgctatgcttaatatgcaataccaattcaacaaaatatgaggtgaatgatatgaaaagggttttcgttctttttctcttctcagcactcgcgatgaatttccttgccgcgtgcggtgacaccggcaagcaaacagccgatgaatcgaccgattcgctcgtcgaaaatgtttctgaatctaccgaaaagttgaaatcgaaccgccgggaagccgattttgataactacgttttcagaatcattacgcgcgacgatacaaatacgacttggcgcgtgatcgacgtcgttgacagcgaggaaaatatcggtgactcgataaacgacgccgtatacaaacgtaatatggctgtcagcgaggagtacaacatcacgttcgagcgcatcgcgaccatccacgagcagatagtcgcgaccgtcagcaagttggttctcgcgggagatgacacttttgacgcgctccagactatcctgacatatcagtctcagctcgccgcggagggctatctgaacagtcttgataaatttgatgacctgaagctcgacgagccctgttgggattcgataggaaacaacttcctgcggatcggcggcgagctctactccgcgatgggggatatcaatataatcgacaacgatgcgacgtattcggttcttttcaacaagcatctgatagcaaactacccggtgattccagatatttaccagcttgtccgcgacggaaagtggactttggataaattacacgagtacgcgcagctcgtttcaaaggacctcgacggaaacggcgtcatggagtgggacaaggatcagttcggagtcatcgatcagtatgaggtttcggaggctctgctgcttggatcgggtatgcgtgccgtcaaattcgacaaagatggctacctcgagtacaacctcaataatgaaaagatatcagatactttcgaaaaggtttatgagctgttctccgacgatacctgccagatcacgaccgacgctgcgaaatactcgtccgtcgctgacaagtggaacgtcatctcgcgcggcacgttcaagtctgaccgtggtctcttcttcataggtccgactgtcaatgtccggttgatgcgcgatatgacgagtgatttcggcatcatacccataccgaagatcgaagagtcgcaggaaacctatcatagtatgcttcagtcgaacaacgcgacttcgtactctattcccatatcggtttccgatcctgatcgctcggcgctgatacttgaagcgcttgccgaggagtcggtcgacacgctcacgcccgcgtattatgaaaacacgctgaaaagaaaggcgagccgcgactcggaatcggcggatatgctggatctcatctttgcgaaccgcataatcgaccaggcggacacctatgtaacgatcggaataaagtcgtttatcgaaggtcaggctgcggcaaaatcgaatacattcgcatcgtccgaagcctcgaaacgagcgtcgttcatcgaaaaaatcgacaaagtcaacgaagccttcaaaaagcttaaggataactgagtttataaaaatgacagagactgccggggaaacctgacagtctctgcttttttcttattttgtcaccgagctgatagcgtccttcatccgctttacagcctcgcgaacgacatcatgctgtgtgccgaggttcatccggacgaatccgtcgccgccctcgccgaacatttttccgtcgttcatgcggatacccgcttcttcaaggaagaatttctgcggatcgggcacgccgtgttccgccagtccgcggcagtcgagccacgcgagatatgtcccctccggatgtgtcagagtcaccggcgcgtcggttccggcttccgggaacgcttctttcagaatatcataattttcccggatataaccgacaagcgcgtcgacccagccgtctccgtcgcggtagacggcttttgtcgcggcaatcgagaatatgttgagatcggcgttgccggtcatctccttttccgcctcgaatttatcgcgtaagtcgtcattttcgattatgatattcgcgcctttgatccctgccatattgaatgtttttgtcggcgccgtgcaggtgatcgtgcgctccgccatgccgtcgagcgacgcgagcgggatatgatgcccctcaaagacgaaatccgaatgaatttcgtcgcagatcacactgacattacgcttcttcgcgagctttgcgacacattcgagttcttccttgttccagattcttccgaccgggttgtgcggggagcagaacagtatcgctttcgcgtctccgagcttacggtcaagatcgtcgaaatcaatctcacaatgtccattgttgtttctcagcggagatatgaccggaacgcgcttgttcgcgagtatggttgatctgaacgggaaatagaccggctcgaatatcagaacgccgtcgcccggcgcggtgagcacgcgtatcccggcggatatgccgtagatgactcccggcgcgttaacgacagcttctttcggaaaatcccagccgaagcggcgggaataccatccgctgacagtgctcttatagtctgcgccgtcgagagtatagccaaagatgccgtgcttcagcacatcctccatagcagcccgcgccgacggcagcattctgaagtccatatcggcgacccacatagggattacctcgcgtccatgcctgtccggcgggagcggttcgtatttttccgagccggacgagcggcggtcgatcttttcgtcaaagtacgcggatgtgaatctgtctgcggtgttctttttcttttccaaggtttctttctccttatgtgttttgatttattcgatcggtgttccgcgtgtctcaccgagttccggcgagtacatctcaccgttgtcgccctgatagagccgtatatagtctatggtgtatgtcacagggtattccatattgtcgtcaaccatcgcgccgtcgggtatccaggaagcctcgggcgtaaagaggaagttgttgaggattatgtagccgggagtgtggaaaccatccatgcccttgtacttgccgaaatctccggttttttccgttatatccatcgtgcagtagtcctcgccgtcgaccgagaacaccatcttttcctcgtcccagtagaagccgtaggtgtggtattcatccgagaggttcgaggtatccttgaaaacatacggcgtcttgcgatcatcgccgagctggacatgatagttgtcggcggtagagttgtaccatttgtggatgttcggaacgaccttgtcctttgagccgaaaacctcgaagatgtcgatctcagccatccagttgacgccctcgttgcgcatatcttcgcgttggaccatccagaacgacggccagcagccctttccgaacggaaccttagcgcgcatctcgaggtatccgtaacagaagttgcaggaatcgcgtgttgtcatcgacttgttcgtcgaatagggcttgccatcggagatcgaggtgtcctcctccttccatgagcggaggacgagatttccgtcctcggtcttgacgttgcgctctgtttcggagttgtacatatccgacgcgttcatctgcgcgcgctggagccacttgtcgcggtcgtaaagatcgccgtcgtagtcgaactcatcgttccagacgagcgtcatctcggggtagcgctctgagacaagcgggactttgtcgaaggtctctgaaatcgtgtagtcactcttgtattcggcgtttgtcgaaagcgaggagataaattcattagccgctccggcagccgcgacgtaatgtccgccggagataacgagatcgttatcgacgaacctgacgcttccggtggtcttgtcgccggagagtccgaggcggatattgtattcgcccggctctgtgacgatcgggagatcgaagccggtcagctcataaaccgtcgcttttaagcgctttgccgcggagtttatgtcgacgcagttgttttcggggagaagtattgagtattcgcctatgttcctgccagccagttctatcattttgtagtcctttctgtagatgaattcgctgttatccgaagcgccgaagatcgacgccatgttttctttgaatttattaatcgcgagcttcattgcgctctcgtcgactccgaccgcgacgatattgctgtcctttacactgtaaagccagtcgttgccgcagttcttacggtaggaggtcagactgtcgagcgcctttccgccctcgccgtaatcgacgccgagccagataccagtcgttgagccggtgtctttgtcgcttatcggcacgacaaatccggtcttttcgagtatcagcgctttcagctcctcggcgagcgccttcgtttcgtctgaagcttccttcggaatgtagatcgtgtaatcaccggcgctgacgccgtttatcgtctcgacctcatattcgcggcgcgagatgaactcgaaatccgacagagtcgcggcgtcgaccgccgggagaacgtttttcagaaaatagtcggcgcccgaagcgaccgcggatggtgagccgccggttatcacgattttgttgtccttcatgcggatgatgaagtcgtttgtgcagtttccgcggtagccggtgagctccgcgagggcgttggcggacgctttgcggtttgtctctccgatcaggaattcgacgttgtcctcgggtatgttctcgtcacgctttacccagtcggttgagattgtttcaagtccgagcttgtttcttatttcaatcgttgcgtcgacgacagctttatcgcagacgtcaggacggactagcgagtatccggagaagagcgcgagctgttcggcggatggttcggcggattctatcttcgtttcatccggattttttgtctctgaacaggaaacgagcataagcgccgcgaggatcagtgttatcgtaaatcttttcattgtatctccttgcctgtataaacgagtgtccatcacgtgtgcggaggcttctctctgatgatagtataacatatttgcgctcgtctgtcaagagacaacacctttgccacgcgaaacaaaaaaattaacatcagcatctctttacaaaaccggaccggtgtgatataatatatatgagtgcgatgtgcggtgcgcgctcggtcaaataaaagtgagttcgtaaccatcctcactaaggaaacgcctggcgtttccttgaaacaaaactacggataggtcgcgtcagcctgctttgctgaagtgcggcttttttgtccgtttatgtcccgcggctgctttccgcgggggcagaaaggaatattttaatgaaaaaacagaatataagatttatcgcaacggcgggaatgatcggcgcgctttatgtcgttctgacgctgatttcggccatgttcgggctctcgagcggggttatacaggtgcgcatctccgagatgctgtgcgtcctgccggtatacacggcggcggcgattcctggcgtcacggtcgggtgtctgctcgcgaacctcatcgtcggcgggaccgtgtgggacatcgttttcggaactctcgcgacgcttatcggcgcggttgccgcgtatttcatgcggcacacgaaatatctcgcgttcatcccgactgtcgtcagcaatatgatcatcataccgaccgtgctgatactgtccggtctcggcgggtggaatatgttcccgtatttcgcgctgacggtcggactcggcgagatcatctcctgcggcgtcttcggcgatctaatggtgctgtactttgagcgccatccgtcggtcgtaaagacacttttcgacagcagtccggtcagagcggctgaaaaagcctgaaacactgatcaccccgcacataaatcaataaataacgcgccacggtctgatggttgaccggggcgcgtgtttttttatcgtttaatcgctcatggtgagcggattccggtgtgctcattttccggcgttctcagaggctttttcgtagagctcctttgtgcgcgcctcgaagacttccgccttgatgagggcgagcccctcgtttatgtctccgagaagtatcagccggtctcccggagatatcccgaatatatcccgcgcagcgcgcggtatcagcacttgtccgcgttcgttcacggtgacagagccgaagaggtgttttccttgcggcggaggggaaatggctattccgttttcccttgagtcgaagttcacgaggtcgtctatggttattccgtagaccttcgcgagggcggcgcatttttctatgtccgggacagtctcgcccttttcccatttcgcgtatgcctgtcttgagactccggccttttcggcggtctcttcctgtgaccagccgttcgcgcttctgaggagcgcgagattgtccttgagcatttttcttctctttcccgacgcgggtttacggcaggaggctgttcagcgcgtcgatgtatgtattcatgtgtacttcgtgtatcagatggtcgctcgtgtctgtctcgataaggcggcagttctcaccgatgtatccgacggcgcgctccgcctgctcgcgtgtcgcggcgcagagatatacgccggtatcggcacggttttccctcgcgtggagatatacgcagggaacatttatcccgcgcaggatttcctcgtgcgtgtgtccgttgttccatgtcaggtcgtagaatctgtcgccgtatctgaaatcataatccacaacccagtggaaaacttccgtcgcggacttcggaaggaagaatattttcacttcctcaccggggtgattttcactgtatttccgcgcgtagttcgcgatgccgggcattgaatccttcatgtacagctgtccccagtagcagcggcggagatagaacgcgggccagcactcgctcatgtcggagttcagatattcgtgtacgctcctgtaggtgtcaaggtatgcgaagctgttctcccagtcctcgccatcggtcgagaataccggcggatcctcaaggagcaccccggcgatgttgtctccgccgtacgcggcgatatatgccgcggtaagcgcgccgttcgagtgtccggcgacgacagtcttttcacctatgacctcgtctatgaggcggatgaggtcgtcgccattccggtcgaggtagtagagttcggggtcatggctcgactgtccgtgcccgtagacatcgactgcgtagatgtgccagttctccgagaggaaagtgagcaccggcgcgtagctctcccattccgccatctgcccgtggatgaggagcagcgcgggcttgtcgtttctgatctcgccgtagtttatgacgctcccgtccggcagggtgaactgcttttcgacggctccgagcttttcgagagctttgtcgtatttcttgtcccagtgcagattcccgtacgaccagacgccgaacgcgcacgctcccgcggcgatgagcgcgagcaggatgacgaggattatgatgatgatctttttcaaacttatcgctcctttgacgttatacacatattataacaccattgagccgtccggtcaatcgcttgcggtttacatcatttgcggatttatgttaagtattgttgcgaagagccatgactattataactcgtgtacgcgggtttgtcaacaggaaaatgacaaaaaaagtgtgctgtcacgctgaaatgaggcacacttttttatgtcagagctcattcagctttttgccgttctcgtgcgtgatgccgagcgcggcgagccgtgcgaagagctccgggtcattcttgattttttcgatatcgtccggatgtccctcgcacgggacaaccctcagcataccgatctcttttatgtgataccgttcgtcatgcgcgcgggtagggtatgagtggtaatacggtctcgcgattccggctctcatccgcataatgagctcgtcaagatattttgtgtatacctcgcgcggcgtcgcgctgtgggatttcgcgacggctgccgccattccgacgacctcgccgagctgtccgagcgtgcgcatgacgcgtatcgcggcgaaggcgacgtgagacgcggatattatccgcccgccgaggaagagattgtcgacatcccttgaatacaggcatctgtacggtatcggacacgtcgcgtgtatacctctgtgatacgcgcaggagcggaacggttcggggtagatatccctgtatttcgggtcagggtagtgtaggtcgatatcccacgtgaccgccgcggttccgtcgggatacggcatctttgagtcgatatcgttctgcgtcatgacgaggtctccgacgacgcgatagctttcgcgttttcccccgatcggcgagacccaatcgagcactgtatttctgaactcttcttttctcgcggaatggttcttcagatatgagaagttcgcgaagatcgccatcatggcgtagtcgcggatgtactcggcgtcgagcgcctggtttctgtattgtccgctttcccattcccagtcgccgccttttacgtaaaggcagttgtcctcgttgatttctatgccgaaatccacgtccggaaagccgcaggggtgtccggcgtcctttgtcagccagagtactgactgtcccatgacttcatcccttgccttatcgggggcgagggattcaccgaatctttcgcgcggttcggtgccgtacatggcctccgctcccatcatccgggcgaggacggcgtctccggtacagtcggagaagagcttcgcgcggtatcgtgtttcctttccggtgacgcaggagcggcatatgaccgctgttattctgttttcttcccgctcgactccgacgacagctgtgttcagctcggtatgccacagatcatgcggcgagagctcgaacgccattttcttgcgtgcgtcttcgtagtattcggcggggtatgttccgccgcttcccattatcggggcgatctcatcgacgatgtcgccgagacgcggatagttaccggcgtgaggctgtccgccgagcgatacgcgcacctcggagctgttgcatccgccgagaacgcctctgtcctgaatcagcagggtcttaactccgctccgtattgccgagagcgcggtgcagacacctgcgattccgccgccggcgacgatgaggtcgaattcctccgggaaatcttcgatcgtgatcccgcggatacgtctgcggaattctgtcatctttccgttgtcctgttcgggttcgtcgccatcattcgttatgtatacggcgtcgcagcgaccgttgaaaccggtgaggtcgtgcagggagacgcggtgctttcctggagataaggcaacgcttccggcttcctgccatttccattcgctcccgttcgtcccgagaaccgtgtcgagagtctgaccgtccactccaagcgtgaaacgccccgccggttttccgcgtccccatactgccgtccagtcgcgcgtgcgcgcccagaaggcgtatactccggcttccgctaactctatcgtggtctccgcgtcggcgaccggaacacccatgccgtgcgccattatatacgcggagccgatagtctgcatcgactgcgtttctgtgacccatccgccgagggtatcgaaggattcggcttcgagcagcagtttcacagcggtatcaccacctgatctatcccccataccgtgatctcctcgacccagacgtttcccggaaggttatagaccgcgaagatggtatccgcgatatttccggacttgagtccgggaacacatccgcgtccggtgaagcccgcgtttttgtcaaacgaggtgtcaccggctccgggaacaagacaggtcactctgacgccgtccggcgcgagctcggtcgcgagacccttcgtgaagccgagaacgccccatttcgccgccgcgtagacgctccagcccggccacgcctcctttgcgcataccgaggagacgttgatgatggttccgcctttctgcgagagaaacatcggggcgaactcccggcagccgtatatcgcgctgttcaggttcagctttatcgcgcggtcgatctcgtcgactgatatgtcggctgtctcttttatcgcgacgcctcctccggcgttgttcacgagcaggtcgagcctgccgaatttctcacggatgaactttccgagtctttcccagtcctcaggaagggtcgcgtcggcggcgaacggtatggcgccggtctcctccgcggcgagcgcgagcgcgtcctttcttctgcctgtgatgacgacccggcagccagcttcggcgaagcgcttcgcggcggcttttccgtagccgtccgagcctcctgtaatgagtatcacatcgttcatttctgctgttcctttcgtgtattctctgttattttttctgcctgagagggtaatatatgcgccagcgcatcgtctcgctctcctcgcggtcctcgacggggaaggactcgagattgcagatatccgggtcgcgctcatagatcgacgcgccgagccactccgcgaccgtcttgtagtacgcggcgttgatctgccagtccatagtcccgacgacgtcgaaaacaccccagagggcgggcggtatgatgagcgcctccataccgtccggcgtcggcacgtccgcgggaagcagggctcctatcgtgcaattcacgtcagaatccccgcttccggtgtaagcggcgaactcgacgttctccgccgcaaaagcccctgattctgccagccggtcgtgataaccgccgtcatagtaggcgttccagatctcttcgccgcagtcacccgcgtttctgtccgaaatgcctgtgtgtccgcagagcttcatactgccgcgccgcataagacggaactctattcccgacgcgccggagaccgtgaccgagagtgacgcccgcggaaagctccgcagcagcgagccgccctgtctcgcctcggtcggggacattccctgcatatcccggaacgctctcgagaaggaggacggcgaatcataacggtatttcaccgcgatatccgtcacggacacgcccgggttctgaaggtcgaacaccgccatcgacagtcttctgagccttatataatccgatagcggcgtgcctattataaaggcgaatatccgcctgaactcatagaccgacatcgccatcataccggcgagagtgctgtatgatatctcgtcggtgaggtgttcctcgatataatcgagtacacggtttatactgtctgtatacatgattccgattcctttcagcttctatgaacagattatatcataaacgttccggatatgcaatacattcggcgcacatttctgcaagattataaagaaacagccgtcagaaacgacggctgtcaaatatgatatgatgatcattccccgtatttcgcgagtatctccgcgaatctgtcccgaccgagctccggaagtgtcagcggcaaccctcgcgggtcgtctgtcagcggctcgtgcggtgcgatgagcttttcgaacagcacgacgtcatgccactcgccgaactttacaccggcgagatgctcgcgtccggtctcgctgaagccgagcgacttatgcagcgcgaagctgccggggttcgggtcggtcacaatgccgtagagatttctgtatcccataagcccgagaagctcgatgaccgccgaatagagtctcgtgccgagcctctttccggtaaagccctccttcaggtatacggtcagctcggcgcagaaacggtagccgaagcgctccttgtacctgtgcgcgtaggaatagccgaccacctcgccgtcgacctcgcagactatatacggaaactccgccgagatcgactccaatcgccgtccgaactcctcaaccgacggagtgtcgtactcgagcgacgcggttccgatttcgacatacgggcggtatatctcgacaagtgccgggacgtcctccggctttgccggtctcagtcttatcacctggggtcatacctcgcttccggattataacgcctgttgttgtaattctccttgagttcaatgacctcgtcaaggctcacgccgagctcgttggcgacgcagagcgcgtaatatatgacgtcccagatctcctcgtcgaccgtacccttgatgttcacgccgtcggtatgcggctcttcgagcagtatcgcgcgggacagctcgccgacctcctcgaccagcttgtggaaatacggcgtcgggtcgccgccatggtaatcctttgagcggagatattcctggaggtattttatcgtcggactcatttttcgcagtacttgtcgaggtactcctccatgcgcgcgcggatctcgtcgtcaagaaccaccctgccgtcgatctcgcggttgtggagatgttcgattatgtctcggacggtgacaatcggatgcacctttatgccgaactcggcgcctatctcctttatggcggtagttccagactgaccgcgctccatgcggtcgaccgagatgatcatgtgctcgaccttcacgtcggcggctgccttgagctgcgggagagtctcgcggactgccgttccggcggtgatgacgtcctcgatgatgacgacgcggtcgccgtcagagagcttcgcgccgaccatgtttccgccctcgccgtgatccttgacctccttgcggttgaagcagtaaggcttgtctatgccgtactcggtgtagagcgcgcaggcggtgacagtcgcgagcgggatgcccttgtaagccggtccgaagaggacgtcgaaatcctcgccgacgttgttcttcaggcactcagcgtagtatttgccgagctttgacatctgagcgccggtgcggtagttgccggtgttgacgaagtacggggacttgcgtccgctcttggtcgtgaagtcgccgaagcggaggaca

SEQ ID NO: 345 - DNA, 6965 bp, Unknown
  16S sequences of unknown bacteria
ggctcctccgctcagcgctcgtttatattaccatcctctcccttttccgtcaagcgtttttttcgctttttttcgaagagaatgatatggtgcccgaggccggactcgaaccggcacggtatcgctaccgacggattttgagtccgttgcgtctaccagtttcaccactcgggcatgccactttattatacataaaccgaaggacaattgcaattaaaaatgtcgtttctgtacaaaaaaagcggcacagccgctcattgtccgccagatccgataatgccgtccatctcctcctgcgtgatcttttcctctctgaccatcgcttccagcacgacctcctgcttggcacgggcattctccatatgatcgctcagctgaaagttcgccggtgattgtgggatgccggccagcaggctcgcctcatcaagcgtcagctgagaaggctctttgccgaaatacccgatgctggcttcgcgtatgccggcatatccatctccatagttgatcacgttcacatagagctccaggatctcatctttggtgcagatgccctccagctcatacgtcagaaaggcttctgtgatctttcgcgtcagcgactgatcatagaacagcgaatacagattcttgcacagctgctgagatatggtgctgccgccgctgggctcgccgatgcccagaagattgctcagcaccgccctggtgacgccggccagatccacgccgccgtgactgtaaaaatttttgtcctcgacgctgaccgtcgcatccagcagataagaagagatctcctcgatctgggtataatcttcatcgctctgcacctgcctgatcacctgttccagcggatgatcctgaacgagccgttcatattcggcatggccctgatagatcaatatcgatgcgcctgcgacgatgatgagcaagacgctcaccagcatcagcttcaataatttcttcatttctgatcaccatgttcagtatatcatccgcttcgtcctcctggtgcgaatcttttgaaattgtaagaaaaaacacaggcactgcccgtgtttatcgatttgcgttcaccgatctcatgatctgtttgatctgcgcctcagacggctttcttcccatctgcaggaacatggcacgaatcatcttttcgttgatcggcggattttccttcagctctttttcaaacttcctgcgagtgaaataaaacccaaggaatcctccgataatcagtcctatcaatgtacagccgattgacagacccaattcaacactcatacgtattcctcctaacactattgaatattttactatttttccgagttattgacaatatacaaatgtaataaactgctcaaaccgtttggtgagcagtctcctctgtcacgaggatcacgctgcgaaagcgacgctggatccattcgaggaaagggtcgcgtttgttcccctccagctccagaaacgcctcatgcacgcgcagtacgaacggttcctcccgcatggccgagcgcagctgcagcgtatcgcccgccctgtgcaccggcgtgccgaaataacagctggctgccgtatgaagcgtttccgcatccatgcgcacgatccattcccccttgagatcaagtccggcgatctcatccaggatcgatgcatgggcgcgaagaaaatcatataatgacggattgaccacataagccctcatgttctcacccgccgtcagtatacgctcctcacccggccgtttctgtcgatttctgctgaatgtttgccgatgatggatgatattcgacaacgacgatcgatgccaggatcaatgcgccgccggcgatcatcatcacggtgatctgctcatgcagcagcaagaacgaaaagatgcaggcgaacagcgattccatcgaaaggatcagcgaagcgctggatgcgctcgtgtatttctgcgcagctgtctgcagcaggaacgccaggcaggtggagaccgcgatcagatacaacgcgctgagcacggcactcatgtccaccgaacgcggcggcgcatcaaagaacagcgcgcaagccgtcgagaggatccccgcggtcagcatctgcaaggcgttgatcgccagcgcgttctctccttttgtcccccagtccagcgcgatgatatgcgctgcaaagaacactgcgcacatcagagaatagaactctcccttgccaaaggaaaacgcatctcccttcagcgtcagcagcgaaatgccgatcacacagagcagcgaggccaggatctgccgcatcgtcgggcgccgccgaaagatcgcccagctgatatacgggacgaaaatgacattcgtggatgtcagaaaggcgttggtgcttgccgtgctcccctgcaggccgaacgtctgaaaagcaaaggcgagaaacaagaagatgccggcaacgatgcccttgcgcagcgtggatgccttgatctccttgatcgcttttgcggcaaccacgaatgaaagcagtgcagaaccgacgaagcggatcatcaggatgtaaaatgggctgaatgtctccaaggcggccgaagtggcgatgaagccccctccccatatgacagtgaccagcaccagcatgagatttgcggtgctttttttcataagatcttccccctttttcctcatgaatgatagcatcgcttttctgctttttcaactgcaaacgcgcctgcatctcatcttacaggcgcgttcaggatctcgttgagccgcttttcgacctcttcagggccttcttcctccaaaagaagacagcgcgcgccatcgatcttcggtgccaaagcgccgcctgctcgttgcagcacgatggtctgcgcggcgcattccccgatccgccgcgcgacatgcgcatcggcgccatgcagcgcatacagcgcggcccttccctgagaagagacaatcagcccggcacgccagcacggcgcgctcacccgggcctgcgtcagccgcatgaacagcgcttcagccggatccatcatgatcaccacgcggggaacctgcagcacatgcagcaggttcagccacgcatagaaaggtgcagacatgtcatcaccgcgccatgctatgccatgcgccggtttcgatctccgctcttgtcccgaaagaaaggagactgcctagcaggcaatctccgcgaacatgtcctgatatgtgttggtcagctcgatcttctcgctgtccgtcatctgacgctcatgcgcatcatgggattccacggttccttcatgagctgaaatgaccttgccgtcacggatgacgaatacatacggcacatacatgcgcttttctccctcatcgtcttcctcgaggaatgcatccagataggaatacagctgctcctcgatctcatcggtgatcgtatattctccatcatcatatgtaggcgcataacagatggtcagcccctttgccttggctacttcattcatgatcggcacggcctcttcacaccacgggcatcccacatagcccagatagacgattgcgctcttgccttcttcgaacagcgcgagcacttcctccatcgtcttctgataaaatacgtgctcatcatcctccagcatctcatatccgctcatatttgcgcgctctccgctctcctgcaccagattctcgcatccgtttcccgcagaagccgagctgcaggcgcacagcatgacgctcagcatcgcaatcagtaatctcttcattttcatcaccaccagtatgttgagtatagcacagcttcgcatggctgcatgtcaatcacataattccacattttttattcatcaaacaggctgatctgtccgtctatgtattcatcttcttccagcatgtcctcatcttcagcgatcagctcttcctgaggcatgggcggttctgcttcgatgcgctccagcggttcatagaaacagaagtcgctcgtattcttgatcggggaagagaacgtggcatccacgctcatcagcgagatatccttcatcatcatgagctgcgcctcgccatcatgcacgagcatgaaggaatcgtgcagctgcaaggcacggatatgcgcgagcacataaggcttcgatttgacccgcttgcacagacggatgccgcgtgtcggcctgcccaataccgggatatcgctcagacggatccgcttcatcgcgcactggtcgctgatcgccagcagctgtgcgctgtctcccttccacacacaggcggagacgacatgatcgtcgctgaggttcatcgcctttacgcctttggagcgcagggaggtcagcgggacaagactgaccggatagcgggtgatatagccctgagcggagacgatcatcagctcatcgtcatcgctggcgctcagcacggcgaccacttcatcctcctcgctcagcttcatattgaccatcgtccgggaatgtcggctgacctcatattccttgagccggctgcgcttgatcatcccgttcttgctcagcgtcagcagcgagagcgaggaatcgaatccgttggtgacaaaggcgttcacgatcttttcctcggcgctgatcttgacggccgagctgatgtgcgatccgacatccttccacttggcatcatccagctcatagaccgagacatatccataagtgcctctggccgtgaagaagagcagcgtatccagcgtgttcgcttcccgatagccgatcaggcggtcaccctccttgatgccgcacagcgtatcgttggacgcgttgtaggaacgcagggagacacgcttggcatagccatccacagagatggtgcacatcacctgttccgaagggatcatctgcttttgatcgatgacgatctcttcgatctgttcctcgatatccgtgcgccgcggcgtcgggaatgtctgcttcacctcccgcagctcatcgatgatcacccggtgcaggcgcttgcggctgcccaggatctcccgcagatcttcgatctcattcaccagctgcatgtattcttctttcagctgggtgatgtctgtattggaaaggcggtacagacgcatggtcacgatggcctctgcctgatcttccgtgaacgcaaaggcatcgatgatgcgctgcttggaatccgccttatccttggacgcgcggatgatcgcgatgatctcatccaggatggataccgccttgatcagcccctccagcacatgacagcgtttttccttgcgatccagctcatagcggctgcggcgctccaccacatcctcgcgatgcgaaaggaaagcgtcgatcatgccggccagccccagctgtaccggacatttatcgacgatcgcgatgacattgtaatgataagccacctgaagatcggtgttcttgtacagatagttcaggataagctgcgcatccgcgtccttgcgcaggtcgatcacgatgcgcaggccgctgcggtcagattcgtcccggacatcgaggatgccgtcgatcttcttgttcagacggatctcatcgatcttgcgcaccatgctgctcttgacgacctcataagggatctcgtagacgatgatctgcgtcagcgacttggtctgctcgatccgcacacggctgcggacgatgatcctgcctttcccctcggcaaatgcctggcggatgccctgcgcgccctgcacgatgccccccgtcgggaaatccggccccttgacgaactgcatcagctcatccaagctgcactgcggatgtttcagccgatagatgcatgcgtccagcacctcgcccagattgtgcggcgggatgttggtggcatagcccgcggcgatgccggtgatgccgttgaccagcagattggggtatcgggaaggaagcacggtcggctccatcttctcatcatcaaagttcggcgcccacagcaccgtatccttgtcgatgtccttcagcatgtaatcagcgatcttggacagccgtgcctccgtataacgcatcgcggccgccggatcatcatcgatggatccgttgttgccctgcatatcgatgagcggtctggtgatcttccattcctgagacatgcggaccatcgcttcatacacgctgctgtcgccatgcgggtgatagttgccgatgacattaccgaccgtcttggcagacttgcggtaagggcgctcatacgtattgccgtcttcatacatcgcatagaggatgcgccgctgcaccggcttcagcccgtctctggcatccggcagcgcgcggtcctgaatgatatacttagaatagcggccaaaacgatcccccatgatctcctccagcggcgtgacgatcacatgcggctcaatgactgtttctgtctttttcttcatcgctgcacctccatggcataatcatcttccagcgtaaaggagacattcttctcgatccagtcccggcgcagctcggctttgtctcccatcagcacggaaacgcgcttctcggcgatgaccgcgtcttcgatgctcacctggatcaacgagcgggtctggggattcatcgtcgtatcccacagctgatctgcattcatctcgcccagtcccttgtatcgctgaagggtatagcctttagggaatgtccggcgcagctcggccagctcctcatccgtccacgcatactgcatcaccttccccttctgcagcttatacaatggcggcaatgcgatatagagcatcccctggtcgatgagcccgcgcatataccggtagaagaacgtcagcagcagcgtctggatatgcgcgccgtccgtatcggcatcggtcatgatgatcactttatgataattggaatcctcggcccggaagcttgccccgatgccggcccccagcgcatgcacgatcgtattcagctcttcgtttttctcgatgctgctcaggctggccttttccgtattgagcacttttccccgcagcggcagaatggcctgataacgggaatcgcgcccctgtttggcactgccgccggcagagtcgccctccaccagataaagctcttt

SEQ ID NO: 346 - DNA, 6848 bp, Unknown
  16S sequences of unknown bacteria
caagccggtctggggcacccgcctgacggtcggaatcgtcgcgaataagctgtctgagcacacgttcaaggagaagccggtgctgaatacggttgaggcgggagacgtcgtgaagctcggcgtgttcagcgccgagttcatccgcgtgaaccattcgatcgcggacgcgtgcgcgatttcgatcaacactccggtcggaacggtgttcttctcgggagacttcaagctcgacctgacgcctgtcgagggcaagatcatggatatcccgcgcatcggcgagatcggaaacaagggcgtcgcgctgctctgctgcgagtcgacgaacgttgagcgcccgggctataccccgtccgagaagacggtcggacgttctctcgacgtgattctgaaccagaacccggagaggcgcgtgatcatcgcgacattctcgtcgaacgttcaccgcgtccagcagataatcaacgcgtcggcggcgcgcggacgcaaggtcgccgtcaccggacggtcgatgataaatatcgtcaaaacggcgatcgagctcggctacatgaacgtgccggacggaacgctgatcgacataaacgagataaagcgctacaaggatcagcagctgacgatcgtgacgaccggaagtcagggcgagccgatgtccgcgctctaccgcatggcgttctccgaccacgacaaggttgagctgggtccgaacgacctcgtagtcataagcgcgcacccgatccccggcaacgagaagctggtcggaaagatcataaacgagctgttccgcaagggcgtgaaggtcgtttacgacgcgctggcggacgtccacgtctccggacacgcttgtcaggaggagctcaagctgatgcacgcgctgacgagaccgaaatatttcatgcctgtccacggcgagtaccgtcacctcatcacccacaagcgcctcgcacaggagatgggaatgccggaaaaccacatcttcgtgtccgaaataggcaaggttctcgaactcgacaaggacagctgcaagttcaacggcatggttccgagcggaaagatcctcgtcgacggctacggagtcggagacgtcggaaacatagtcctccgcgacagacgtcaccttgcacaggacggactgatagtagtcgtcgcgactgtggatatcgacgaaagaatgataatttccggaccggacatagtctcgcgcggcttcgtctacgtgcgcgaatccgagcagctgatggatcaggtcagacagatagcgaaggatgccctgactgactgcctcgaccacaacatcaccgactggaccgaactcaagggtcgcgttaaggacgatctctcgaagttcctctggtcgaagacgaagcgtaaaccaatgatcctgcctgtggtaatgaacgtataaaaaaatttgcacagatactcgttttgagtgtctgtgctttttttgaagcttttgaaaaagggggtgcaggggggaaaaacttttctccgaaaagtttttcccccctgcaaacttaatcccacttgaatccgctggcaagaagagtagtcttgtctttagcgacgttcagtataccgccgttgatgacggcttttttttcttctccgtcggggagcattatgtcgcagtggccgggttttacggctgtgaggaagggtacgtggcctgccattacggcgagttcgccttcgattcctctgaggtcgagtttggctacttcgcctgcgaatgcgtctccgtcgggggtggagatgttgagtttcagggtgttcattgctgcatttccttggctttggcaacggcttcgtcgatggtgcctacgaagaggaaggcggattcggggaggtcgtcgtgtttgccgtcgattatttcggcgaatccgcggatggtttcactgagcgggacgtagacgccggggaagccgttgaatttttcggagacgtggaggggctgggagaggaagcgttggatttttctggctcttgagacggtgagtttgtcgtcgtccgagagttcgtccatgcccatgatggcgatgatgtccatgagttcctggtatctctgaaggattcgctgtacttcttttgctactctgtagtgttcttcgccgaggatgtcggggctgaggacgcgcgaggtggattcgagcgggtcgactgccgggtagatgcccattgaggcgatgcttctcgagaggacggtggtcgcgtcgaggtgggcgaaggtggtcgccggagcggggtcggtgaggtcgtccgcggggacgtagactgcctgaacggacgtgatcgagccctttttggtcgacgtgatgcgctcctgtagcgcgcccatttcgttagccagagtcggctggtaaccgacggcggagggcattcttccgaggagtgccgacacttcgctgcccgcctgcgtgaatctgaagatgttgtcgatgaacaggaggacgtcctgcccttctttgtcgcggaaatactctgccatcgtgagtccggagagcgcgacgcgcattctcgctccgggcggctcgttcatctgaccgtagacaagcgcggtcttgttgatgacgccggattccttcatttcgttgtagaggtcgttgccctcgcgggtgcgctcgccgacgccggtgaagaccgacagaccgccgtgctctttcgcgatgttgttgataagctccatgatgaggacagtctttccgacgcccgcgccgccgaacagaccgattttaccgcccttggaatacgggcagataaggtcgatgaccttgattccggtctcgagtatctcggttgacgtcgaaagctcgtcatattccggcggctcgcgatggatattcatcctctcgcacccctccggagccggcagattgtccaccgcctcgccgagcacgttgaatatgcgcccgagcgtcttctcgccgaccggcacagtgatggacgaaccggtgtcagtcaccggaattcccctctgcaatccgtcggtagacgccatagcgatacaccgcgcggtattatcgccgatatgctgcgccacctcgaccgtgagaacgcgctctttgacggaaccgtcctccgcggtcgtcttaatcggcaccgtaagcgcgttctgaatcgccggaagcccgccctcctcaaagcggacgtcaacgacaggacccataacctgcgcaacgacacctgtcttattgttcatattatactccttgtttgttcgcggggggagaaaaacttttcggggaaaagtttttctcccccctcttttcaaaagcttttatactctggttttgcgctccggattctgtctgtgcgaaatcgcctgacggaagcggaaaaacctgaccttttcaaagagagacttaatctatcactgacccgcgccggctactatctcggtaatctcctgagtgatagcgccctgacgcgcgcggttgtactgaagctggagccgctcgatcatgtcctccgcgttcttccccgccgagtccatcgccgcgcgtctcgccgcgacctcggaagcgaagctctcgcgcaccgcccccgcgattctcccggcgacaaactccggcacgacctcggaaagtatcgaaacctcgtccggctcgaatatcatcccggcggtcatctccgcggtttccccgaccggagcgccgcccttccgcttctttgctctgtcgtcaaacgacgcctcggaaagcggcagcagccacacgatctccgcgacctgcgacagcaccgaaacatatctcgtccggataattccgagcctgtcgaactccccggcggcaaactgggcggtcagccgtctcgcgagagccgaagcgtccgccgacgagaacttctcgcaggagggatacatatcgtcccccctgaacctgtcgcaggcgcgctttccgatcggtatgaccgagacattgtccgagagatactgagccgcgaggcggaaaacgttggcgttgtatccgcccgcgagcccgcggtccccggcgatgatgatgagcttcgtcttcccgccgtttgccggagcggagcgcatgtacgcgcttcttttgcactccgggttctcggcgagccgcttcatcacgtcgtcgacggcgcgcgagtactggcggcttttcatcatgccgtcggtcgcgcggcgtatcttcgaggacgcgacgagccccatcgccttggtcgtgtggagcgtcgagtcgacgctttttatgcgtgtccggagcgcttttgtatcagccattccggttcacctcatttattcatctcggcgagagcggctttgagctcgtttatctcatcgtcgccccacttgccggactcgactctctcgagccagccggagtacttcgcctcgagcaggtcgtagagcttttcctcgtactgcggcaccttttcgaccggcgtcgagttcaggaatcctttcgtgaccgcgaagacgatcgcgacctgacagccgaccctgaccggcgagttgcggttctgcttgagcacttcgacgatgcgctcgccgagggcgagacgggacttcgtgtcctcgtcgaggtcgcttccgaactgagcgaaggtctggagctcgcggtactgcgagtagaggagcttcagctcgcccgagaccttcttcatgcccctgagctgcgcggagccgccgacacgggagaccgagatgccggggttgatagccggcatgattcccgagtggaacagctccgtctcgaggaatatctgaccgtcggtgatcgaaatgacgttcgtcgggatataggccgacacgtcgcccgcctgcgtctcgatgatcggcagcgcggtgatagatcctccgccgtactcgggagcgacgcacgcggcgcgctcgagaagtctcgagtggaggtagaagacgtcgcccggataagcctcacggcccggcggacgccttatgagcagcgacagggcgcggtaagcgacggcgtgctttgagaggtcgtcatagacgatgagcacgtcctttccctgctccctgaaatactcagccatagcgcagcccgagtagggcgctatatactggagcggcgcgctctcggacgcggacgcggagacgattatcgtgtaatccatcgccttgttcctctcgagctcagcggcgagctgaacgaccgaggaggatttctgtccgatagcgacgtagatgcagatcatgttctgccctttttggttgatgatggtgtcgatggcgatctcggtcttaccggtctggcggtcgccgattataagctcacgctgaccgcggcctatcgggatcattgagtctatcgccttgatgccggtctggagcggcaccgagacgctttttctctcgatgatgccgggagcgggggattcgataggtctctcgcccgcggactttatcgcgcccttgccgtcgataggctgaccgagcgcgttgacgacgcgcccgaggagagcctcaccgaccggcaccgagacgacgcgcccggtgcgcctgacctccgtgccctcgcggatggagttgtcgtccgagaggacggcgaccgatacggtctcgttctcgaggttctgcgccataccgaaggagccgtcgtcgaactcgagcagctcgttcgccatgcatgagcggagcccgtacacgcgcgcgatgccgtcgccgacgaggatgacccgtccggtctcggtcatttcgacctttgagcggtagttccttatctgatccctgatgatctccccgatttcttcgggtctggaattcatttattgatcacatcctgtatttgttagtggtggttctgctcagttttcgggcagaatagttgagtgcagatcggcgagctgttttctgacgctgccgtctatgacgcattcgtccgcgcggacgatcacgccgccgatgatcgacgggtcgaccttgcagtcgagctcgacgcgccgtccgagcttcttcgcgagcttttcgcggagagctttcttttcgtcgtccgagagttcgaccgcggagatgacctcggcggtgacgagcccggagcgcatattgcagattttcgcgaactcggaaagaacggtgtcgagcagcttcgcctcgtcgtggtcgcagaggagcttcaaaagcgacgcgaagttctcgtacatcccggcgttatcgttgtttttcccgacgagaagcacttcgtcgaccgccttccgtctctcgtcgatgcgtatgcagggagaggcgagcatgtcgatccattccggaaaatcgcggacgattccgcgtatttcctcgcttcttgagaggtattcgtcgactttttccggcttccctgccgcgtcggcgtcctccatcgcgagggcgtacattgccgccgcgtattctctcgcggtgtcgttagcgccgatcatttgccgtcacccgtgtcaaggtcgtcgatgaaggagtcgatgaggttcttctggtccttcgagtcgatctctctgccgatgagcttttcggcgacggcggtcgctccgtcggcgatttcgcggcggatgccttctcttgcctgtctcttttcgagagcggcttcggcttccgccttcgagactatgccttcggctttatccttcgcttcggcgaggagcttgtccccgcggcggtttgcctcgagaacggcgttctggcggatgttctcagcctcggcgtgcgcgccggcgaggcgcttttcgtattccgctttgctctcgagagcttcgctcttggccttgtccgcgtcggcgtagacaccgtctatgagggcttttctcttggcgagcatttccctgaccggcttgtagaggaacttttttaagagcaggaacagaatgacgaggttgcagagcgagatgattatctgccagatatt

SEQ ID NO: 347 - DNA, 17760 bp, Unknown
  16S sequences of unknown bacteria
ccgccgcaccgaagagctacaccggatcataaagcgcgcggcgagacctgttccgccgctcagggtgaacggttacgggcatttcggcgatctgtatttcgcgtcggttgacagcgcggatgagctgactctgaccgtgagggagctgacgcggagtcttcgcgattccgggttcagaaccgagggcagggactttcttccgcatgtgacgctcgcgaggaaggtgagactgatttcggcgccgaaaacagcgccttttgagctgcgtccggtcacgatctcgctcatgcgctcggagctgaaacgggacggcgccgtttataccgagatatcgtctgtcgggctgtccggtcggtaaagaatgtttttaaccgttcgttcccttgacaaaccgcgcgcggtgtgatagaatctaagtaacatatttttcggaggtgcgggaatgtacaataagtgatcgttttctgtagaaatcgctgagaggggcgttttgcccttttgtcggcacgcccggttgcgggcggatttttacgggagaaggtcgcttcgggcattccctcgctttttgctttgcggatattttctgcccctcgttccttcttccgggaaagaggggatatttttatgtcaatgatcgaaataaggaatctgaccttcgcccatgacggaggggataaggtgttcgacaacgtctcattcaggctcgacacaaattggcggctcggtctgaccggacgcaacgggaaggggaaaacgacacttctgaagctgctctcgggtgagcttgacgccgggaacagcataatctcgtcggcggagttcaggtattttccgtaccctgtcgatgagggcgaggacgccgtcgacgcgataagggacgagatgggctcgcacgacgaatgggagatgatacgagagacgacaagactcggactcggtgaggaaacgctgcacagaaaattttcgacgctctcgatgggtgagcgcacgaagctgatgctcgcggcgatgttcctcgaggacgagcgggagagattcatgctgatcgacgagccgacgaatcaccttgacactgagggaaggcgactcgccgcgaaatatctcgcctctaagcgcggattcatactcgtgagccatgaccgcgcgttcctggacgcctgcactgaccacacgatggcgataaaccgcgcggacatcacggtgacgaacgggaatttctcggtgtggttcgaaaacaagctcctgcgcgacgatttcgagcgcgccgaaaatgaaaagctcaggggtgagataaagcgtctgacggcgaccgccgcagaaaaagcggcgtggtcggacagggcggaacgcagaaagataggattcgacccggcaaagacagagaagagcatatcccgccgctcatatgagggcgcgaaatcaaagaagatgatgagccgcgcgaaggcgatcgaaaagcgcaccgacgccatgatatccgaaaagtcgtcgcttctcaaaaacatcgaggaaaccgagaccctgcgtctgaacccgcttgtctgccgctcaaagcgtgttgtggagttcagggatgtgagcgcgttttacggtgacgacatggtcttctccgggctgtcgttcactctttcgccgggagagaggatttgccttgagggggttaacgggtgcggtaagagtacggtcatgaagctcatcacacatgaccctgaaagctccggactcaggcatgacggtgagatttacaccgcgcctggcatcgtcatctcatatgtcggacagtcgcaggacaaactgtccggtgacattgatatgctcgccgatggcgttgacagaccgctgttctacgcgatactgagaaagctcgacttctcgcgggagctttttgaccgtccgctcgagacctacagcgccggtcagaaaaagaaggcggctctcgcgaggtcgctctcgacgagggcgcaggtctatatctgggatgagccgcttaattatattgacatcttttcacgtatgcagatcgaggagctgatacggtcgtccgacgcgtcgatgatatttgtggagcatgaccgtgtcttcgctgagagtgtgtctactaagatcgtgcgattataaacgcggttaacacacagttaataaatgcggtgtataatataccgtaagaagatcatcgcggaggcggagtaatggaagcttttgatacaaatgaataccatgtgacactcttcgggcacgggaacagaatagtcttcatccccgagaaagccggatccgcggagcggataagcgaaatggtcggacaagacatagtcatcgccgctcttgacggcgttgactggaacaatgatctcacgccgtggagggcgccgggactgcgctccggtgagttcggggacggcgcggagaagtttcttcgtgcgctgaccggcgatgtcataccgatgacgcttgagcgtttgtctgtggaggagtatgaattatacctcgccggttactcactcgcagggctgttcgcggtctgggcggctacgatgacggatatctttgccggtgtggcgagtgtttcaggatctctctggtatgacgggttcatcgactatctgtccggcgcgcgtcttctcgttccggagatatacttctcggtcggcgaggcggagagcaggacgagatcgcaaaggctcgccggagtcgtcgatatgacgagcagcgcgtatatcatcgcgaaggggcagaggatcgacaccacaatgcgcctgaacccaggcggacacttcagcgagccggaaaaacgctgcgccgacgccgtcagatggctcaccggcgacaaagctacaaaaagaaaggatgattacagatggaaagcatgaacgagccgcgcgacaagaacggtctgaccgaaaaggagttcctcgcggcgtacaagcccggaaactggccgagaccgtcctgtacggcggatctagcgataatatatgaggctccggacctgacgcgtgagatactgctcataaagcgcggagggcatccgtcgctcggtaaatgggcgctcccgggaggcttcgtgaatcccgacgagactgtggagcacgcggcgtcacgcgagcttctggaggagacaggggttggcggactccgaccgacgcttatctgcgagtcgagcgaccccgggagagacccgaggggatggacgataacctcacttttcggagccgtggtcaggtcaaagccggtgactgacgccggagacgacgcccgggacgcaaggtggttcgggataaagtactggcttgagggcagacgcgtcagattcacactgacaagcgacgaaatcctgatgaacttctcggcgtcgtatgagacgattgacagcggtttcggcgagacatacgcgataacggaagtcagcggggaagggcttgccttcgatcacgcgaagctgacagcgctcgcgctcctgaagctcgcgaaatacggaaattcagaaaaaaatcagactccattcacaaaatagaggttgcggtaaacacaatatcgtgatataatatttgtgaaaagaaccttcgaagtcagaaagggatgactgcaatgattgaagagaagaacgaccagaaccagaagccgacgaaaaagccgctgatatactacgccatgatagcgtcgctgatcataatgcttctgaatatcttcctgttcccgcggatgctgagccgcagggttgaggaagtatcatacgacaagttcctcagcatgattgacaacggagaggtgacggaggtcgcctatgacgcacaggacagcgagataatcttcgcgaccgggagtgatatccgcacgtctaagctttacagcacaggtatctggccggacgacggacagagactgctcgaacagctcaggagcaacagcagcatcactttcagcgcggagataccgacaaagcaggatccgcttgtctcattcatcgtgagctgggtgcttccgatagcgttcttcatgattctcggcgagatactcaaccgccagatgatgaagcggatgaaggacggcggattcccgggcggcgggaacttcatgtccttcggaaaggcggacgcgaaggtctatgtcaccgctcagaccggtaagacgttcgctgacgtcgccggacaggacgaggctaaggacgcgctcaaggaggttgtcgacttcctgcatgatccgcagaagtattcagagatcggcgcgaagctcccgaagggcgtgcttctcgtcggccctcccggcacaggtaagacgcttctcgcgaaggcggtcgccggcgaggccaaggtgccgttcttctcgatctccggctcagagttcgtcgagatgtttgtcggcatgggcgccgcgaaggtccgcgacctcttcaagcaggcgaacgagaaggctccgtgcatcgtgttcatcgacgagatcgacgctataggcaagaagcgcgacacttccggcatgggcggaaacgatgagcgcgagcagacgctcaaccagcttctcgctgagatggacggttttgacccgtcgagcggtgtcgtgatactcgcggctacaaaccgtccggagatgctcgacccggcgcttctcagaccaggacgcttcgacaggcgcgttccggttgagctgcctgacctcggcggacgtgaggctatactcaaggttcacgccaaggacgtcaagatggactcgggcgtggattacggaaagatcgcgagaatgacctccggcgcgtccggagcggagctcgcgaacatcataaacgaggcggcgctcagagccgtgcggatgggcagaagcagtgtctcacagcaggatctcgaggagagtgtcgagacggtcatcgcgggctaccagagaaagaacgcggtcatctcagactcggagaagcggattgtcgcgtaccacgagatcgggcatgcgctcgtcgcggcgagacagaccgattccgcgccggtcacgaagatcacgataatcccgcgcacatccggcgcgctcggctacacgctgcaggttgacgagggcgagcggactctcatgtcatccgatgagatcaagaacaagctcgcgacgctgaccggaggacgcgccgctgaggagatagtcttcggcagagcgacgaccggcgcctcgaacgatatcgagcaggcgacaaagctcgcgagagcgatgatcacccgctatggcatgagcgacgagttcggaatggtcgcgcttgagacgctgaacggaaaatatctcggcggagacgcgtcgcttgcctgctcggacgagacggcggcgaagattgacgctgacgtcgtcgcggtgataaaggcggctcatgagaaggctataggcattctcgccgacaacaggcagaagctcgatgagctcgcgtcttatctccttgagaaggagacgatcacgggcgaggagttcatgaagatccttaacgcgtgacgcgccgataaacgatcatcatccacgcagccggagacagtgacgagctccggctgcttttttggaggattgtgaaatgaagggatttctgttatttattccggcgttgctttttccgtatctcacggccgcgctggttctgtgtctgtttttcggcggcggggtcattgacgcgctcttttccggaaatatctggtgcggggtggcgcttttgatactgtattttttcgtttcgctcatttgtaccatcgtgaacgtgatccggaatatcgcggtcggatgtgaggcgcggctctgcgcgctgaattcaatgatcatgaagctgtcgcagattccggcttatatcacgctgtttgtcattggtctcggatgtcttctcacgatattcaccttcgggatttcgttcacacttgttttgtttgactgcatggcgatattgctgagcggcgtcgccgccgtaccggcggttgtcaacggcgcgagggaaggaaaactcactatggcggaggcggttgtttccggggttctgggttttgtattctgcgccgacgccgtgtgcgcggtctttgtatatatgaaaatccgccgcgcggcgggggaaaaagaggacgggggatgaccctgccctttttttgatttgatgatcggaaaagtaacagtggactgaggcttctccggagaaaagcaacgaacagaccgggagctgttttctgtgaagcacaggttatccaggttgaatactgaaaaaaatcatcagtatcttcccgccggagctttttttactcgaaatgttcataattttttgctataattgattcgtatggcgcaatcagagcgccggtgaaaggatggatatacctatgttcgacataaagatcggaacgatgatccccggcatgaaggcggacagcatgatcccgcagctgaacccgaagggctttgagacctacgagctgcatttcgagaactggaactgcgatatggactatcatgagcactcaaagagagttcttgacacactcgacggcagaaagatatctgtactcggtcactacggtaacacgctgaaggacgagcgtgtccggcgcggagtggagctgctgatcgacaacgcgcgcctctacggctgcgatgtgatcggcgtgttcgcgggaggcgacccggcaaagagtgttccggacacgataccggagttcaaaacggtgttcgatgagctgacaagacgcgctgaggcaaacggtgtgcgcatcgccatcgagggatgcggaggcggctggagaggcggctcacataatatcggcttctgtgaggaagcgtgggagctgatgttcgacgcggtgacgagcgacgcgatggggcttgagtgggagcccgcgcacgccatgagtgctcttgtcgagccgatcccgcagctcagaagatgggcgaagaaggtttttcatatacacggcaaggatggatatatcgcgtgggacgtcatccgcgagcacggtatacgcgggatagttccgttctactgggacagaacgccgtccttcggtcagagcgactggagcgagatattcacgatactccttcagaacggatttgagggcagctgtgacatagaaggataccacgatccggttcactatgacgacgcagagtggtcgtcacagctcgcggctctcgattacctgaagcgctgccgcggcggtgtcgaggactatgccggtcccggggaataccgcggatttcaggggacacgaaagagatgaaggaaaacagacttctgaaaaacaagctctatctctacatgactgagtttttcgccggcgtatcggttatggcggtcgagctcggcgcgagcagacttctcgcgccctacttctcgtcgagccagatcgtgtggacgataatcatcggcacgataatgatcgcgatggcgctcggcaacatctggggcggcagaaccgcggacagaaatcccgacccgggaaagctctacgcgagactcattatcgccgccgtctggatcgggtgtattccgcttgtcggaaagtatgtgataatcggcatatccgggcttctggttctcgcggtcaacacgaattatctcatcgccgcggcgttcgcgtcctgcatggtgatattcgtctttcctcttttcctgctcgggacggtcacgccttcgctcgtcaaatacacgatgggctcgatggaggacagcggcaggacggtcggcaggcttgaggcgttcaatactgtcggaagcataattggcacatttctgccgacatttgtcacgataccgaccgtcggcacgagcgtcaccttcctgatcttctcgggtgtgcttcttatcctcgggatcgtgtatttcattgctgagggaacgagaaggtggctctgtgccggctccgcggcggctctcattgtctgttctgttctcggacactcggacagcttcgcgttctgggagacgaatcttctgtatgagggagagtcaatatacaactatcttcaggtcggagagaacgagcggagcgtatatttatcgacaaacgtccttttcggcgtccagtcggtcgcgatgaaggacggcgggctgaccggtatgtattacgataccgcgctggcggctccgctgatgtgcgccgacccggaggaaccggacatacttgtgctcggaatgggcagcggcaccttttcgacgctctgcgggaagtactaccccggctccgacgtttcaggagttgagatagacgaggacataacgcgtctcgcgcacgaatatttcggcttgcctgacacggtgagggtcacgacatacgacggacgcgcctatctcgccgctgacaagggtaaatacgacgtcataatggtcgacgcctatcaggacataacgataccgttccagatgtcgtcggcagagtttttcacgcttgtccgcgatcatcttgagccgggcggcgtcatggtcgtcaacctgaacatggcgaacggcggggacggaagcatcaacgcttatctgtgcgacacgataagctcggtcttcacgaacgtcatgacaagcgacgtcagaggaaccacgaacagagtactgttcgcgtcggaagagccgatagggttcaccgtcccgacagagacgggagattttgcatatgaagagcgcatgacgagcgtcatgtcgtcgcttgagccgcattatgacggtgggctcaggttcaccgatgaccgcgcgccggttgaattgctcgggataagaatgatcgattcgctgatatccgacgagctcgcgtattacaagaatatcttcgcggaaaagggactcggcggactgatcggcgagatcaccgggtgaggatatgaacagctattatctcgcgtacctgatccacgtgaggcgtcagcccgcgccgctcgacaccacggcgatgagtcatgatatcacatttgtccatgagggtgagtttgagtacgagattgacggagagcgcttcacggtccgcgccggtgaggcgctctactgtccgaagggtgcgaagaagatcagactcaagtcggacagcgtctattacacctcgctgaacttcgctgtcagtccggagacacggcttccgctgccgtatcatccggcgatggcggacggcgctgagctgaggttctatctgaagcgccttctcgacgcgtatgaggcgggcggggagcttcgcgacgagaaatgctcgtctctgctatctctcattgtctgtcagctcatcgagcagaatcctctgtcagtggagaatcaatatataagcgcggtcaggcggatgatcgactcggacccgtccggcagacacagcgtcgcgtcgctcgccgccgacgttcatctcaacccgagctatctgtcgactctgttccgacgcgtgacggggacgacactcggtgagtactcgctgtcaaggcggctcgaatacgcggcgagactgcttgaagatggcgacagcgtcatgagcgcggcagaacgtgccggtttctgtgacgtgtattatttcagccgcatattcacgaaccggatgaggatgaccccgtctgagtacaagaggctgagcgctgacaccggccggatgaccgaggagaagatagaatccccggaaccgtcaaaaccgcataaaaacacaaaaagaaagaagataagcaattaaaacacattgaaaagcagggtggattgtattatactgtttatacaaaaatctccgcgcgtgtctgtgacagttgatcatacaaacgcgtgacacggcacagggcggaaaaacacgaagaagaaaagagagtagcaaaatgcaccctgcgaaaagaagaataaccgcggcgcttatcctggcgatgaccctggcgaccctcgcgtcctgcggaagtgacaccggaaacagtaatgacggaacgacggctcagacgacaggcggagaggacacgacctctgccgcggaagagaccgaaccgagcgagttcaaagcggcggacgcggatttcggaggagccgatttcataatcgccgagaacgacatcggcgactggatgcagtccgccttcatcgagacagagaacggagacgtgctaaacgactcgatttacaggcgcaacagcattgttgaggaactttacaatgtgaatatcaagggcttcaagatagagggcgagaggaaccgtcaggatctcgcgcagctcaagaacggcattctcgcgggcgacaaggattatgacgtcgcgttcattccgggttcgctctgcgcgacgatgttcagcgacccgagctatcttgtgccgctgtccgacgtttcaacgctagatctgactcacagctggtgggcacaggacagtgtcgacaccatgaccttcggcagcaagaccatcagcgccaccggcgatatggtggtcacgacgaccggctcgagcaccgtgactctgttcaacaaagcgctcgcgaaccagtatgacctcgatgtctacagcgtcgtgcgggacggaaagttcaccgtcgattacgtctacgacaccgcgaagctcgtctccgcggacctcaacggcgacacgaagatggacgcgaacgacgaccagttcggctggatggtcgagtccctcaacatcatacacctgatcggcgcgtccggcgagaagcttgtcacccgtgacgaaagcggtcttccggtctcgaatatagattcgtcaaagctcgtcgaggtcgtcatgaagtatgtcgacatcataaacgacaaggacagcgtcatctccgttcaggacaaccgcataaaggacggcggtccggcgggcgtgtttgacggcgggcgtatgctcttctgggagacgaacctccagagaatgaaggcggcgcgtagcttcacggtcgatttcggactcatcccgttcccgaaatatgaggagagcgacgagtatatcgcccctgtcggcggatactgggattcatggctgatgataccggcgacgaactccgatactgatcgcaccggaacagtgctcgaggcgctcggctactattcgcagcagcttgtcactccggcgttcgtcgagacttcggtcacgacaaaggcgctgagagacgacgactccgccgagatgctcgacatggtgctgaagaaccgcagctttgacacgggcgtctacttcagctggggcaccaatgaggcgttcaaggcgtcggtcaaccatgtatcaaacttcacgtccgtcgcggcttccggcaagtcgaaaatcgacgcttcgatagcttccttcatagaggctctcggagaataaaaacgcaaagaaaagaaaaagaaataaagaaaagaaagtttgccgccctgtcagagatgacagggcggcggctttttatccgggttgctttgcgtttgtgttttcttttctccattccgccgggctgacgccgcacttcgccctgaatcggcgcgtgaagtagagcgggtcgtcaaagccgaccgatctcgcgatctcaccgattttcaggtcggtcgcgcgcatgagagcctttgccttcgacagtctgtagtcgagcagccagtcggtcggggacatccccgtcctgccgcggaacagcctcgagaaatatgagcggtcgaggttgagtctcgccgcggtctccgccgctgttatcggacgatcgtagttgttggtcatgtagaatatcgcctcgtcgacatagtcgcgtccggctgtctcccgcgttgtcggtgagaatccggcgaggagcttgtatacaaggctcacgcagtcaaatttcgcccggaggctttcgtttggtatcgtcatgagaagcgattcgaagatgctttcgatcgcgcccggtgattcgacctcgatcacagggttgtcttcggttattcctgtcgactcaaggtagccgtctaggttgtcggcggctatgcttacccagtatatcgaccagacgcttccgggatcagctttgtagaagattctgcgcatagggaacgcggcgaagacgcagccttttttcagccgtctcgtgacgccgccgacagtgtagattccgctgccttccttaaggtagataaaccagtagttttcccttgccgcgggtccgaagcggtggtcgggcgctccggtacgccttccgcagtagcagagcttcaggtcgccgatctgcctgccttcgaaatccgggtgatagaatttttcgataaagtccatacgggcattcctcatttcacgtgctgatgtattgattatatcatacaatgtcacatttgtccatagttatggcaaatttgtttatatgaatctcatttccgggatggtataatagaatcatcataataaacgaaaaggggaacagaccatgaaaaagcagatttctttacttttgaccctcgcgattttcgcgtcgctcgtatcctgcggcgggactccttccggaacgtctgggacggaaacgtcatccggcacggacggtcagggtgccgacactacggcggcggagaccgagtacgcgcctgaggtcgtcaaccttgatggctatgagatgactgtgatgaactatgatctctcgtggctgacatgggcgaacacccgcgtcgtcattgaggaggagaccggcgacgtgctcgaggacgccatctacaagcggaacaaaaagatcgaggaaatgtacaacttcacgataaaggtcgatgaggtcgataacgtctcaggcaagatatcgaagctcgtccagtcgggcgacagcacctatgacatctatgcgcagcaggagggcgcgtccggaagtttcctgccgtacatctccgattggcacaatattccggggcttaatctcgacgagccgtggtggaaccctgccgcgacggcagtctacgagttcgacggcaagcagaccgctctcgccggaaacatgacgctctcggcggcgtcgcgcgctgtctgcatggtgttcaacaagaagatctggtcacagataggcgatcaggataccgacctctacggtctcgtccgcgacggaaaatggacggttgaccgcttcatcgggatcgcgaagtcgacgaacaaggacgtgaacggaaacaccgagtgggacgaggaggatatatatggtctgatgttcggcagaggcttcaagggctatatagcgtccttcctctgcggctcggacatgaacttcactgagaagaacgcgaacggtgaggatgagttcacgctttataagaacgagaagggcatcgctcttctgacaaagctgatcgacgcctggactggcggaaacgggtatgagttcaacaagaaggacgacctccacggcgcgacgccggagaatttcttcgagaccggacacgcgctcttctcgcagagggtgccgaacgacatctataagctccgcagcatggaggacgacataggtattctcccgatgccgaagtacgacgaggcacaggagaattacaggtccgcggcgtggggcggcgccgtctggacgctctcgagggcgttcgacatggcggacgcggaaaagctcggtacggcgctcgaggcgatgagcttctacggctacagcgacgtcatccctgtctacaaggaggtcgcgctcaagacgaagaccgctcgcgacaacgagtcggcggatatgcttgatatagtattcagcacgatatatttcgatttcggcacgaacatcatgtttgactcggtgctcgccggaggaataataaactcgctgtaccatgcgaagtcgagcgacagcattgtctcgaaacttgagaaggggaaaaaggaaatcgacaagtatatagacgacattttcgagatggcggcggaaatgcagtgattctttgacgaggtgagagaaatgtatcagattccatggaagacgaagggcatagtccttaccgctccgcagccatatctgaatgaagtcggtacagtagcagaatttatcgagcgcatcctcgcgcccgcgggcgtaaatcttgtcgtacttcagacgcgttaccgctatcagttcagaaagcacccggagtgtcagggctttgacccgctgtcatatgatgacgtaaagctgcttctcaggacttgccgcagaaacggcatccgccttgtgccgaagatgaacctgttcggtcaccagtccggggttcaccgtgacccgcaggacggcattcttcacggtcacgctccccacgagccggattttccggatgcgcttctccgcgcctatccgttccttgatgagcagtacggtgaggagacggtggattacgcgcgcagcttatgcctgacgcatccgctgctgccgtcggttctgttcgacctgattgatgagatgatggacgtgtttgaggcggatgggatgcacatcggctgcgacgagggcaaagccatcggaaaatgtccgcgctgccgtgataccgagccgtacatgcttttcacgaaccatatcaacatgatacacgatcatctggcgaagcgcggcgcgcagacgatgatctggtcagaccgtttgctgaattactggaacagcggttacaacgacgactatgagtcgtcggcgaatggcattgacaaggcgatcgaccttgtgccgaaggatctgctctgctgcgactggcactacgggaagtgcgacgcctacaggtctgttgatatttttgccgatcacgggctgcgcatgatggtgtgcccgtggaaaaatccgcagaacacgaaggattttcttgactatgcggtagcgcatgatcgcggtcatatcgatggatacttgcagacgacatggtgttcttccggcgaacttgcgcgccactttctttatggtgatcctttggtgtggtcgcagacgccggagattgtcgccactatgaaggaaattttccttccgtaaacaaaacagccggcatcccgggatggcacaggagatgcggcaagaaaggcagttttaaaaatgagagaattcacaggatatatgagaggaatgggtctcggcggatggctcacgaactacaagagaataggacagctcccgccggagcgccgcatggacgtcacgatcggtgactttgagcatttcgacaattacataaccgagtgggacgtgaagaatttcgcgtcgttcggcattgaccacgtgcgtctggcgtttgaccagattgtgcttgaggatttcaacaatccgtatcattaccgcgacgagacgtttcagcatatcacggactttctcgattgggcgaagaaatacgggctgaatgtcatactgaacctccacaaggcgatcggctgctactgcgactgcggcgatatgaagaagctgctcgatgtcgaggagtatcaggacaggtttgtcgcgctctggctcgagttcgagcgcaggtatcacgacaggggcggtgagattgtcttcgagcttctcaacgagctgaccgacgggaccggcgagagatggaacccgctctggcagaaggtggtccgcgagatacggaaggtcaacccgacaagaaagatcatgataggcagcgcctgctggaactcggtcgacaagctcgacgcgctcgacgtcatagacgacccgaatgtggtctacacgttccatttctacgcgccgttcgagttcacgcatcagcgcggagtgctcatgcctgataaccactattataaccgcgagatgccgtatccgggcgatatcgggcgttaccgtcactaccatgagttcatctacggtaacaagaacgcatacgcagagtacaacgagatgggcaaagagttcatatacaactcgctcgcgcccgcgaagaagttcatcgcagagcatccggacgcgattgtgaccctcggggagttcggcacaatccgctcctgcccggtgaagtggcgcgagaactggtgccgcgacgtcatctccttctgcgacgagaacgagataccgttcacaatctggaactacctctcgacgccgtacgacggcaacagattcagcctcgtcgacgacgactacaggaagccggtcagcggggagatattcaggatgatcaggataaagtaaacactgatttaaggttgttttcgcagaaaaaagcccacaaatccaagacttttttctgcgaagaccagatttattcagtgtttacccaaaaaggcggtggagctcaggcttcaccgcttttgtattactgtttattctctgtgtcttctttattctccgtgcttgctttatctttaccggcttttttctcttttcgtttcgccctgaacttttttaatctctgcccgaagtggttatcggcgatatcggctgtcattttcctgagcttttcggcgaaggtcggttcgtcgtcgctttcgctgagcgtccggtcttctatcgctgcgtagtattcgacggtttcggtgggcgcgcccttcttcgcgagtctcttttcgaccgcgagcttgacgagcgtgtagagcacggcgaagatcggcaccgagatcagcattccgaacagtccccacagaccgcccattatcgtgatcgacatcatgacccacagagcagaaagtccggtcgtctgaccgaggatctttggtccgatgacgtttccgtcgagctgctgcacgacgacgttgatgactatgaaccagaacgccttcaccgggtcgacgatgaatatgatgaatgttccgggaatggcaccgatgaacggtccgacgatcggaatgacgtttgtgactccgacgagcacactgacgagcggcgtgtacggcatcttgcagatcgcgcagacgatgaacatgatgataccgatgatcagcgagtcgagaagctttccggtaatatacccgccgaaggtcttgtcggtgaagttcgcgagctcaagagtactgttataaagtctttcgcttgtcaaggagcggaggactttctttatctgcgccgtaagcttttcctttgaggcgaggaagtagaccgagaagatcagcccgatgatcgtgtttacgaatccgttcgttatgcccttgaagtactcgaacaccttcggtccgtagtcttttaagaggttagtcgagttcgtgataagctcctgaatctttgagccgatcgtttccatgttgaggtcgaatatttcgagcgccttattgaaaacgtcgtcgaggtcgttgatatcaccgccgatgaactttgacttcgacaggaactcgtttatccatgtgagggtctgctcgatatacccgctcatcttggacgcgaggtcggatcccgaggcgtacacctgcggtatgacgagaagcaggaagatcgtcagaatgatgagcacgacgatatacgtgaatatgagcccgagcgcgcgctttgagctgtgctggcgcttcgtgactgcgttccacctgaatattcgcttttcggcgaatttgagtatcgggttgaagaggtacgccatgatcattccgagccatacagggttcagtatcccggaaatgcgctttccccagcccgagaagaactcgaagttcttaaaggcgaacacgagcgcgatgagcgccgcaccggtgagcccggcataaacggcgattgtggtgtatttccggttccagtctattttcaaattatcacctcacacttataataattgtagcgcaaaataagacggatgtcaagtctttccgtacaacaaaataatatttaacaagtgcgaaataatctttgcgatataaaacagttaagtacagagtataaaaaaacgtaaatttgcaaagtaaatgcaactgccattcaccgtaagaaaaagccgggcgtgaagcggctttgcaagctcagaacgcctcactatgaacatcatactttcc

SEQ ID NO: 348 - DNA, 20939 bp, Unknown
  16S sequences of unknown bacteria
cttaatatttcctgccagggggcttttttgtactgtccgcacaagatggggcagttcacaagcgtcgggtcttttgttataatggatgtctttacttttgcttgcttttttgtttctgcggtttatggcattttccggccatgggacaagcggagcagccggaagagcaagaagcctggccccggcggatggcccggaaagccagaaccgcacaaaataccaaaagtagtaggagaagaatatcgccgaatcccataggctcaccagatcaacagagccagccggtagaaaaggaaggcagccacccaggccacagcggtttggtaaaacaccacgaataaggcgcttctggcgccgcccatttcccgcttgacggcggcgatggcggccacgcagggagtatagagcaaggtgaacaccaggaaggccagggcggcagggaggggaagagcgccggaaagagtctggggcaaagtggccatggaagagccggtgagcacagccagggtgctgaccaccgcttcttttgcggtaaagccggtgagaagggcggtggacatctgccagctgccgaagcccagaggggcaaagaggggagcgatgagccggccgatctgggccagaaggctctgactgctgtcggacaccacattgatccggttgtcgaaggtctgaagcacccaaatgatgatggtggccaggaagatcactgtaaaggcccgggtgataaagtccttggccttatcccaaaccagccgcaccacgcttttgggggccgggagacggtaggcaggcagctccatcacaaagggcactggattgcctttgaaggcggtacggcccagaatcaggccggagagaatacccagcagaatccccagtacatacaggccgatcatcaccagcgctccgtattccgggaagaaggcggcagtaaacacgccgtaaatgggcaacttggcgctgcaggaaatgaaaggagtgagcaggatggtcattttccggtcccggtcgctgctcagagtgcgggtggccatgacggcgggcaccgtgcagccaaaaccgatgagcatgggcacgaaggagcggccggacaggccgatcttccgcagcagtttatccatcacaaatgccacacgggccatataaccgctgtcttccagcaaagagaggaagaaaaacagggtgacgatgatgggcaaaaaagacagtacgctgccaatgccggcgaacacgccgtcgatgatgagggagtggaccaccggattgatgccgtaagcggtgagccctcggtcggccaggtctgtgacccagtcaatacccagggacagaagatcgctgaggaaggagcccaccaggccgaaggtcagccagaagatcagcagcatgatccccaggaaaatggggatggccaggaacttatgggtgagaagacggtcgatgcgcaccgagcgctggtgttctttggactcatggggccgcaccaccgtaccggcgcacagctcatccaggaaggtgtagcgcatatcggccaaagcggcgttgcggtccatgccgcattcctcttccatttcttccaccgagtgctggatcagctcccgttcgttgggggagagggacaactgggccatcatgggttcgtcgccttccagcagtttggtggcggcgaagcgggagggcacaccgatggcggcggcatggtcttcgatcatgtggctcaccgagtggatggcccggtgcacagcgccctggcagaagtccagccgtttgggtttttggcgttgttgggcggtgcgcagcaccacatcgatcagctcgctgacgccttcatttttgctggcggtgatgggtaccacaggaattcctaattcctgggatagtttggatacattcaccgagccgccgttttgccgcacctcatccatcatgttcagggccagcaccatggggatgcccaattccatcagctgcatggtgagatacaggttgcgttcgatgttggtggcgtccacgatgttgatgatgccgtccggtttttccttcagcagataatcccgggtgacgatctcctcggcggtatagggggaaagggaatagattcccggcagatccaccaccgttacatcttcatggccgcggatgatgccgtctttccggtccaccgtcacgccgggaaagttacccacatgctgattgctgccggtgagctggttgaaaagggtggttttgccgcagttctggttgccggccagtgccagtttcataccgatgcttcctcctttgccgccggattttcattgtgatggccgtggtgtccgtggtgccgcgagggggtgaaggagggcaccgagtcgcatttttcacggcgggaacagctgtcacagcccttttccctgaattgctggggcaggggacaaacggtaatggtgcgagcatcatccaagcggatggtcagctcgtaactgcggacatgaagctcgatgggatctcccatcggggcggttttgcggatggagaccagcgttttaggcgtcaggcccatgtctagcagccgacggcgcagagctccttcgccgcctacaaaggtgatggcggcggtatcgccgatgggcagttgatccaatgtcatgaagattccccctctttttggtaaaaatcaaatgggaaaacacagattcccatggagttagcctatgtaaacattctaatggctgtgcctatttccgtcaagcggaatatcgcacaatcccccggagaaaagggggagggaaactgatatagtatacagaaaatccccctggcggatgggttccgacagggggataaaaggggagatcgcttagtagagtttaaagagcagggaagcaaactcggcccgggtgatggaattgaggggcttgagggagtttgtgccgccatagccctggacgatacccaaggaggagaggatcttcacatggtccgaagcccaggcggggatatctccggcatcgtcaaagctcacattggaataggcatagccacgctccagggtgcggcccagaagggtcatcacctgggcccggctcaccggagtagagggcaggaacaccgaattgcccttgccgtcggtgctgccgatcatgatcccctgggcatagagggccttcacatggggcagcgcccaatcggagatctgggaggcgtcggtatagggcagttttacatcggcgtagtcgtcggtgtcgatgcccaggtaccgggaaagcaaagtggcggccatttcgtttgtggtgttgttttgaggcataaactggctgtccgtggagaagatgccctggacccggagaaattcggcataatcctgagcccaatgcccattcatatcctcatagggggtggtgccgccggaagtgcccagagtcatgcttttgcgggcaatgttgccaaaggaatcggtggcttccagcgtcagacggtgcaggccgccggtgttttccggcaaagtggcagagagcgcaccggtctggctgttataagtgaaattacagctttttccgtcataggtcagggagatgttgccagaagaaatggcaaagccggtggcatccttgacggtggcggagaaggtctgagaagtgacgctctccggcatggtgatctccggcggagttacatcgggctgggcggcggcataatgcaccacaagctggtcgatgtagatgttgcccgactggccgggggataccgatgtgctgaagcctttgacagcggtggcattggaaggaacttctacggtggccagggtccagtcctcaccggcatagaaggcccgctgcactgtggagccgctgctggtgaggaagttgatgtacaccgatttgcccggagaggctttggcgtagaaggtgaggttcttggcgcccgaaagcttgatggaagatgccggggtaaagacagcggcatgggccttgtccatggaagcggcgcctttataggtcatggacagagcgccgcttccatagcgcacctgatccagagaatgggtcacctgggctttggccgagatgtcctgggtgtctgctgtggcgtaataggtcacatctttttcgtagttttccaaaatggagggcatttttcccactttcaccggaatggacatcgagaagccattgtgggagatgacgatatttccggaagcgccggtggttttggaagcggtgaacacgccgtcctgggtgatggtaccggcgttgcccgtcacctgccaggtgaacaggttgtcctgttcataaagaatacgggactgggcataggcatcgatatccagatcgatggattctcccacatccatggacagggaggtgacggtagtgccgcttttgttctttaccaccacccggtcgggctgctggtaaaccgtgatggaggccggcatggaagtggcggtctcatgatccagggagatcaggtattctcctgcctgctgaggggccgtgaacacattgccctccaggacctgctccgtgggagaggtcacccggaaaccggaatagtaggaggacacaggataataatgctggtcaaaggtgttggcccccagggagacctgagcgccggacagggtggctacgctgtgaggatagacgaaagcaccggtttcttctccagtgggagtggcagtgttgacaaagaggagatagttggcacatttgcgcaaagagccgtccgaggggctgttgaccacttcggtttctttggagccgggctggcgcaccacttcagcagaggagccgccgccgtccaggttgaccacattggtgcagcctttgttcaccagaagctgggcggcgtttttcacgctcataccctgactgatctcctggcggccgtccaccaccagggccacagcgctgccatctggacgaacacccagaagggtgcggggatcgctggaagaggaaaggcccgactgcatcacgccgttcttaacggccatatctccagcgccgcaggcatagactacatcggtgaagtcttcgttgtatacattggctttgaaggtgacggtttctcccacctgaagggaggagatggtatagccgcgattgctgtaagtattgctggcggtgaggatgtattcattgtccccgatgggggtggagccggacacatcccggttgacggcagtgaccacaaactgtttctcctggccgatcttcaaaggttcgtcattcaccggggtaagtaccacattgacaccggtaccggtggagcgggtctgagaggaaaaatcgctgttgagcagatagatccccgcgtctgaacgctgcttgttcaaagcgtataccgggtaatcgccggtgatggaggaatagaggctcatggccatttgaggagcgcccacgatcatgcgtccatcgggtttgacgcccacggcgttccacatgccgtcggagctgaccagacggccgttgttgaccacaagccccgaaggaaggccggtggacaggacgaaaaagtccgcattggccgcaccatagacgctctggccctggttttccacatagtccacgatttcctcaatggaggatttgccgtagagtttactgccgtaggccacgatggggaacacatcgctgccgggggtgtattccaggcggaaggactgctggcgcaggcttccgttttccgaagaggctacggtatagcgcaggccgttggcaatgtcataggaatcggaataggatagggtttccgctcgggctggaagcggcaggaaggccgccgacagggccagagcacaaaaagaggcgacaattcgccgggtaatggatttcatgtgatctcctttcatcataagggttgctgggacagtctgataccatcataccataaaaccaccaaaataaaagaggatatcctgcacaaatccgggaagaaaagccgccttgccttgcattcccgggaagatatggtatgataaaaaggcctatcccggcaaagggatcgggccgagaagaacaagaaaagaaaggcggcagcatgatggctggacagaagaacgattcgattttggggcgtattttcaaaaggtattttgtggatgccatgggctccatggctttgggactgttttcctccctgatcatcggactgatcatttcccagctggctcagttttcccctctttcctttttggcgccggtgaccgaagtgctgggagccaaatccccggtaatcggtgcggccatcggtgtggccattgcctatgggttgaaggccgatccgctggtgatcttttcagcggcttcctgcggcgccatcggctatgcggccgggggaggcaatggcggaccggtgggcgcattcatcgccgccgtggtgggcgccgaactgggacagcttctgtccaagaaaacaccggtggatatcatcatcaccccctttgtcaccattgtcaccggcggcctggccggcggttttgtgggtccgtatgtgcagagctttatgtattggctgggcaatctggtgaatgaagccaccactttgcagccgctgcctatggggatcatcgtggggatcgtggtgggcatggtgctcactttgcccatcagttcggcggctttgtgtatcatgatggatctcagcggcctggcggccggtgcggccgccgcgggatgctgcgcccagatgatcggcttcgccgtcatttccctgcgggaaaacggagtgggcggccttctgagccaggggctgggcacttccatgctccaggtgcccaacatcatgcgccatccgcagatctggattgctcccacggtggccagcggcctgtgcggcgccgtcagcgccgccttgctgggcatgaccaacaacgcctcgggcgccggaatgggcaccagcggcctggtggggcagtttggtgcgctggccgtgatgggttactccacaaaaacctttttgctcattgcgctggtccattttgtccttcccgcccttacggccttgctggtggaccggctgcttcgccggatcggctgggtcaaagaaggttatatgaaactcgacatatgaagctctgtgtggtaaaataaaaaagtattttatcaaaaagacacatccccacgccggtgaaacactggaaaagaccggcgggaaagaggagagaacggaaatggaactgacttataagatctttaccgataccaccaccgacctgacgccggagtggatgacagaaaacaatgtgggctggctggagcacggcatcgtcattgacggcaaggaaatcaaggacgatttcggcaaaacggtgcctcacaaagaattttaccagcggctgcggggcgggctgatgcccaccaccacccaggtggatatccccacctttaccaatgcctatgagcaggcccttcagcaagggctggatgtgatttatatcggtttttcttccaaactcagcggcacattcaatacatcccttatggtagctcaggagctgatggagaaataccccggccgtcgggtgatttcctttgatacggcagccgccggcatcggccaggggatgatcgtcatggaggcggctcgcttgcagcagcagggcatgagcctggatgagctggtggatgaggcgctgccccggttgaaaaagaccatctgccatttcttcaccgtggatgacctgaaccatctgtatcggggcggccggctgtcccgttccagtgcattcctgggcacactcatgggcatcaaaccggtgatgtatgtcagcgatgagggaaagctggagccgctgagcaaggtgcggggccgccgtcaggccatcgccgaactggcccggttggccaaggagcatgtgacaaatcctcaggatcagatcatctatatttgtcatgctgactgccaggaggatgccgatgagctggcccgcctggtgaaggagcagatgaatcccaaaggggtggacatccgcttcctgacccctattatcggcaaccattccggaccggggacgctggccgtctttggctttggcaactcccgcctgtaaggcgtagggtggatcgttgatctatgacgactttgtatttgattcgccacggcaccaccaacagcaatctggccggtgtgttccagggcagtatggatgtacccctcaatgaaagagggctttctcaggctgctcttttggcccggcgctttgaaaaggtgcatttggacaaaatttatgtttctgctttgcagcgggcccggcagaccggtgaggctctggccaaaggccgtgggctggaagtgcaggtcatgccccttctcaatgaaattgacttgggggagatggaaggccataccgggcaggagtgccggcagctgtttccccaggccgtgcaggatctggaggagaataccgcttggtttcaggctcccggcggggagagtacccgccaggtctatgaccggatcacctcggccataaagcagatcgtagcggacaatccccagggcaccgtggccgtggtttctcacggctttaccatccaggtgtatctggccgccttgtccggcctgccctatgaggaaataaagatgcgctctttcattgtggggaataccgcagtgagcaaatttgtgtttgcacccgggcagcggcctgagacagaatatgtaaacgatcagtcccaccttccggaagaactccgttttgatctggcggagaatcaacccaagggataggggccttttccggcagcgggtgccgggaaaacagaaatcaagaggccccggaagatttccggggcctttgtcgtaggatatcgcaggagaaagggagaatttgctatgaaaaagacgatcagcctgccctatgggacgggagagatttcggcccaggtggaggaaagtcagcttttggggattgtgcagagccagctggaggaatatgaggcggagaagagtccggaagaacttctgcgccaggccatggagaatcccataggcacatcccggctggaggagctggccaaggggaaaaagaaagtggtggttttgtgcagcgaccacacccgccccgtgcccagcaaattgattttgccgcccatgctggaggccatccgccggggcaatccccaggccgagatcacgctgctcatcgccaccggatgccatcggggcaccacccggcaggagcttgtgaacaagctgggggcggagatggccgaaaaagagcatatcatgatccatgactgcggggcggaagaggatatggtggatctgggagttttgccttccggcgggcggctgcgagtgaacaaagcggcggtagaggccgatctgctggtggccgaagggtttatcgagcctcatttctttgccggtttctccggcgggcgcaaaagcgtgctccccggcattgcggcccaggagacggtatacgccaatcactgctcccggtttattgacgatcctcatgcccgggcagggattctggaaggaaatcccatccatcgggatatggtatgggcggcccggaaggcaaagctggcctatattgtcaatgtggtgttgggaggcaaagggcaggtcatcggctcttttgccggagattttgacaaggcccattgggctggcacagagtttcttgcttccctttgtcagaaggaagcgccccaggccgatatcgtggtcaccagcaacaacggctatcccctggatcagaacatctatcaggcggtgaaagggatgtccacagcggaggtggtctgtcggaaaggaggcgtcattgtcattgccgccaagtgcgaagacggcagcggcggggaagagttctggcgcaccttccgggaggaaaaggatcctaaggccattatggataacatcctggccactcctcaggataagacgcaggccgatcaatggcaatcccaggtttttgcccgggtgctgatgaaatgccatgtggttctggtcagccaggccccggatgagatggtgcgggatctgcatatgacaccggcccactccctggaggagggactggaactggcccggaaactgctgggcgacccgcaggcaaagatcctggcagtgcctcaggggatctccaccattttgcgtccccagacattgtaaaaggaaaaacaccggaagatggagcagatgtccacagaacatttgacgaaccggcagcaatatggtaaaataaaaatggtatgttttgttgtcggatatgcggcggcagaacagcctaaattttttatttttggaggaacaaaacatggatccggaccctggccctattgggacgcagcttttgctgttggccctgctgacaatggtaaatgcctttttcgcttgtgcggaaatggctatcgtttcagtgaacaaaaccaaaatcggtattttggccgatgagggcagcaaaaaagccaagacggtgcaaaagctgcttcaggagcccacacgctttctttccactattcaggtggccatcaccctggcgggattcttttccagcgcctcggcggctaccggtatttcggaggtgctgggagcctatctccagcgccttggcattccttatggcaatcagatctcttttgtgggggtcaccgttatcctggcctttgtcacactggtattcggcgagctggtgcccaagcgcatcgcattgcagaaggccgaaagcatcagtatgtttgtagtaggcccggtgggcgtggtgtccatcattgcagctccctttgtgaaattgcttagcctttctaccaatctggtgctccgcattacaggaatgcaccatgaacagctggaggaaaaggtcagcgaggaagagatccgctccatgatcgaaagcggcaaggagcatggcgtcttcaacgaaacggaacaggatatgatcgaatctatttttgagttcgatgataaactggccagcgaagtgatgacctcccgcaccgatgtgtatgcggtggatatcaacgagccgttggagagctacctggacgaaatgctggagacccgtcattcccgcgtgccggtgtacgatgaggacatcgacaacattgtgggtgtgctctatatcaaggatttcctgctggaagcccggaaggtgggctttgaaaaggtggatgtgaaaaagctgctccatcgcccctatttcgttccggaaacccggaatatcgacgagctgttccaggatatgcagcgggccaagcagtatattgccgtgctcattgatgaatacggtggattttccggcattgtcaccatggaggatctggcggaagaagtcatgggccccatcgaggatcagggagatgacgacgaaccccggatcatcaagattgataacagcacttatattctggaaggccttgtcactattgatgatctcaatgacgagctgggtacagagattgaaagtgaaaaccacgataccgtatccggtttgctgatggatgagatcgggacgatcccggaggaaaatgaccggcgcaccgtgcagctggggaatctgactttctccatcctggaaattcgggaacgccgcattgaaaagctgaaactgcaagttgattggtctgtatccccggagcgtgaaaacgacgaggaagacgaggaagaataacacagcgcagaaacaggccccggctgtgtgccggggcctgttttaaagcgcaacagagcaggaggaaggctgatgtattccatacaagaaacggcgcggatcacgggtttttccccgtatactctgcggtattatgagcggcagcaggttttgccgcctgtggccagagacagcgccggaaaccgggattattcccaggaggatatccacttgctggagatcatccgctgtttgaaaaacaccggcatgccggtgaatgatatcggaaagttcatcagcctttgccaaaaaggggacggcacattgcagcagcgtctgcaggtgctgctggatcacaaatgccatgtgcagcagaaaattgcccagatggagggggaactggcgcacatcgaaaagaaaatccgctattatgaaaaagcctgccaggcgggcacagagcagttttcccaaactggatgctatgatgtgggacgatgcgcctgcgccggcggctgcggcggaaaccaatagagatgatatggcaaataaaaaaggacggctttggccgtccttttttgtttgagaaattgctactgttccacaccggcattggcccgcacgggaagattgtgcatagtctgggcaaaatagcgcatgatgtcctttcgggtgatcaggccgatgaagatgcctcggtcgtcggtgacggggacaaagttctggttgagggccttgatgatcagatcttcgatttcggtatcggcgctgacaggcagattgtccatgcgccgggggatctccaggatgggtgtgttttccgcttctttgaagttgagggaatagcggtttttgatggcccacagcagatcgccttcggtgatggtgcctacatattttccctcccgggtcaggatgggaacggcggaatagcggtgatactccattttttccagcgtctgacgcagggtgaaatcatcatagatgtaagcaaccttgcccttgggcgtcagaaaaaacaacagattcatgagagtccagatgctccttttatgttacgatttttctattacaataaggaccggccttgcacagcaaaggccgggagttttttatcttgctctattatagcatatttcccggaatattccccgaaaagctcggtgaataaattgtgaattttggaaaaccgccgggaaaatcctccatctgtgtttggccctttccaggagatactaggaaaaaaggagggcgactatgagaggacttagaaagcggggtcatttatttcttgtgggaggcgtggggtatagtttgctggcaatcaggtggagaaagcgcacccattggacgatggcggcggccggaggcctttgcttttctttgctctatgatctgtgcggaaagatgacggggcgcagccggtggaaaaagtccgtggccggcagcacggtgatcactggggtggaatttttggctggatgcctgatcaaccggcggctgggatggggtgtgtgggattattcccgtttgccgggaaatgtgatgggacagatctgtttgccctttacctttttgtggtttctgctctgccttccggtgacggccttgtgcgatgaactgcgccgcagagaggggcgttgcaccctttcccaggctgtggtaagatgatgaaaaagaatgtccaacggaaaaaggagcaggatatggaaaagtatatcatcgcactggaccagggtaccaccagctctcgctgcattgtgtttgacagggaagagcgcatcgtggccatggcccagaaggagaccacccaattctatccccaggccggatgggtggagcaggaccccatggagatctatgccaccatttccggcaccatgagcgaggctatggcccaggggaatatccggccggagcaggtggaggccatcggcatcaccaatcagcgggaaaccaccatcttgtgggacaaggagaccggacagccggtgtacaatgccattgtgtggcagtgccgccgcacggcggatttctgccgtaagctgaaagaagagggattggaagacatggtgcgggacaaaaccggtcttttgatcgacggctatttttccgccaccaagattcgctgggtgctggacaatgtgccttcggcccgccgtctggcccaggaggggagattgctgttcggcaccgtggatacctggcttttgtggaagctcaccgggggcgcggtacataaaaccgactataccaacgcctcccgtaccatgctctacaatatccacactctggagtgggacgaagagctgctgaacatcctggacattccccgggagattttgccggaagtgtgcgacagcagcggggtattcggcatggcccggctgggggattgtatggtgccggtggcaggtatcgccggagatcagcaggccgctttgttcggtcaggcctgctttgaagaaggagactgcaaaaacacctatggcaccggctgctttttgctgatgaataccggcaaaaaaattgcccgcagtcaaagcggcctggtgaccaccattgcctgcggtctgaatggccaggtgacttatgctctggagggcagcgtttttgcaggcggaagcgtggttcagtggctgcgggatgagatgcgctttattgtggaagcgccggacagcgagtattttgcttctaaaacaccggacaatggcggcgtctatttcgttccggccttcaccggtttgggagccccctattgggatatgtatgcccgtggcgctattttaggcctgacccggggcaccagccggaaccatatcatccgggccgcgctggaggccattgcctaccagtccaatgatgtgcttcaggccaccgcacaggacagcggcctgcctttgcgggagctgcgggtggatggcggagccagccgcaacggctttttgatgcagttccaggcagatatctccgatatcgatgtgatccgtcccaagaacaccgaaaccaccgctttgggggcggcctacctggccggtctgtccaccggagtgtggaagagcctggcggagatcaaacggcacaagcccatcgatcaggtttaccatgccgccatgaaagcggagtgtagacgcaagaacctggagggctggaacagcgctgtgggacgggttctcacccagcccagataaaaataggaaaagagcttgacttggagcacgctccaggttgtatgatgaagaaaacctctccagtctgtctgttgcggagaaaatccaatcgtgatatactggaaaaaagccctttcgttccgctgttccgggcagggacggcgaaagggacatctgtgtgagcaaaggaaaaggtgaagtacagtggaaaaagcaaaggtttattttacggacatgcgtgcccttcctggcaccaatcttctgatgaagctgaaaaagctgatgtatgccgccggcatgaaccagatcgattttgacggcaaatttgccgccatcaagattcacttcggtgagccgggcaacctgtctttcctgcgccccaatttcagcaaagtggtggcggataccgtcaaagagctgggcggcaagcccttcctcaccgactgcaacaccctttatgtgggccagcggaaaaacgctctggatcatatcgatgccgcttatgaaaacggctacactcccttctccaccggctgccatgtgatcattgccgacggcctgaagggtaccgacgacatcgaagtccctgtcaacggcggcgagtactgcaagacggcctacatcggccgggccatcatggacgccgatgtgttcatttccctcacccacttcaagggccatgagatgaccggtttcggcggcgctctgaagaacatcggcatgggctgcggctcccgggccggcaagatggccatgcaccgggacggcaagccctctgtggaccctgaactgtgccgtggctgccatacctgcgccaaaaactgcgccaacaacgccattacatttgatgagaaccacaaggcccatatcaatcacgataactgcgtgggctgcggccgctgcatcggcgcctgcaactatgacgccatttccaacaccaacggcagcgctctggacgatctgaactgcaagatggccgagtatgccaaggccgtggtggatggacgcccctgcttccatatcagcatcgtcaaccaggtttctccctattgcgattgccatggcgagaacgacactgccatcatccccgatgtgggcatgtttacttcctttgatccggtggctctggatcaggcctgcgccgatgcctgcaacgctgcaccggtgatccccggcagcctgctggatgaccggctccatgagcatgatcatcaggatcatcatgaccactttaccgatgtgcatcccaccaccaactggaagagctgcctggatcacgcggaaaagctgggcattggtaccaaggaatacgaactggtgaagatcgactaagtttttgtgttatcccatcggccaatttcaaaacagggtttgccttatggcagaccctgttttttcttttcccaaagagaaaaaaggacaaggagaccagtagccaaccggagaggcgggcatagaatggtattgtgaagcggctgagagatgaacggcaggcaaaaacagcgcgagaccaaaaagccggaacatttcaaggggcttcgaaatactctggagtgagaattctttttgggaggtaactttttatgggttgcaacaacaactgtaactgcggatgcggcaacaatggcagagggttcttcttcgacggctgcgagactttctggatcgtggtgatcatcgccatcgtcatcatctgggtacattattacggttcgggccatggcggctgctgcaacggctgctatggaaacaatatgccggactgcggcaacaactgctgctgctaacataccgcaacaaatgccccgccttacaaaaggcggggcatttgtattataaggaggcgtccggagaagaagccaaaaaggttcggcacaatgggccgaagtcccggtagagcacaaaggcggctcccaaccccatccgtcgggcccggttcagcttggaagatacggtggaggggtcgtcatatagcacaaaataggtttcctggccctggcggtaggtaaaatagcgggcacatagctcctgagagaaaaagctcaccggctcatattcccgctggagacggaaaaactcctgggcggacagtgattctccctgatgattccgggccggcatggaaaagcggcggcattgccgtaccacatccagggccagacggtgaaccggataccggcggcagtattgctccaacatatcgtcaaaacttccttcatagagggtggaaggcagaagataacaggcactgggcgccagggaggccagttttatgggcacataatagggaatgttccattgatccagaaggggagagagggaggaaaccagttcctctgcggccgggccctgggcatccagaaccacaccggaaaagcggcggcgggaacattcttcccggatctgccggatcaggcggcctgcgtccagagaaaggggcggcgtgagtcctttgtcgtaaaaacccagcaggccgccggggctctgggagtccggtccgtcccggcgcagctggccttgctctcccagggtgtaggccagctggagacagggcatggacaaggcggccgcaggggaaagatcctctccggccgccacgatgtaaacgggcgtttgtgtcaacataaaatggcttcccccttgttatttgcccataaaatgtgatactatccttatgaagaaaacatttgcgaaaagcatcccggtggatggggacgagactgcccttggcgtatttttatgcgggggaaatgggaaagataccggggagaaaagaggaaaatatgatcaaatttggtccggcgggaaacagcgattccttccgccaaaagtataaatcatccaccgctgcaccggggtggctgaaggaaatgggcctgcagcttctggagtaccagtgcggccggggcgtgaacctgggagaggaaaccgggcgggccatcggacagagtgcccaggaagcgggcattgggatgtcggtgcattctccttattttatcaatttgtccagcggggaagcagagcggcgggaaaagaatgtgggttacattctgcaaagctgccaggcggctcattggctgggagccgaccgggtggtggtccactgcggcggcctttccaagctgacccgggaagaagcgctgcaaaacactttcacaggcctccgggagattctccagcggatggagcaggaaggctgtggcgatgttaccctgtgtgtggagaccatgggcaagcagaatgtgatgggtacactggaggaagtggcggccatctgtcagatggatgaacggctgctgccctgtattgatttcgggcatttgaacgcccgggagcagggaagtctccgatgtgcagaagatcatatgaaactgctggaatatttgatctctcagttggggaaggatcggatgcgccacttccatgtccatttcagccacattgaatatggcaaagggggcgaggtgcggcacctgacttttgaggacaaggaatatgggccctggttcgacgattgcgcccaggcgctgctggctctggatctgcatccgcgggtgatctgtgaatcggcagggacccaggcggaagatgcgcttctgatgcagcagatttatcaggcccgggcccggggagaagaaccggccatacgggcgtagaatggcagaatgtttgaaattaaggatatcattacgggaaagtggggaatgatatatggaacagacaagattggaaaaaatcgcagcaatggtgaaaaagatgccggtggaagcggtacttatcacatcgccggtcaaccggcagtacgccaccacctttccttccagcgccggggcctgcctggtcacagagcagggggatgggtatttcttcaccgatttccgctatattgaagcggcggagaaagcggcggcaccccaagggtatcaggtgcagatggtgacaggcggggattatatgacccctctggccgctttgctgaaaaagcaccaggtaaagaccctgggatatgaggaccggcggatgtcggtgtcggcctatcatcagtatgagcaggctttgccctgccgtctgactcctctgggcggacggctggaagaagtgcgccaggtgaaggaagaaggggaagtggagtgcattgtcatcgcccagcggatggctgaggctgcctttgaggagctgttgcccatgatccgcccgggcgtgacggaaaagcagcttgcagcagagctgaattatcggatgctctgccatggggccgaggggatgagctttgatatcatcgccgtcagcggtcccaattcctctatgcctcacggcgttccgggagaacggcaggtgcagaagggagatttcatcacttttgactttggggccctgtacaaaggctatcactctgacatgacccgcactgtggcggtgggagaggccagcgaagaaatgcgccgggtgtatgacacggtgctgcgggccaatgttgcctgctgccaggagatgaaagccgggtgcatcggcggggatatccatcagttggctctggatatcatcagcaaagaaggatatggggagtatttccagcatggattgggccatagcgttggcctggagatccatgaagatccccgggccagcctgaatggaacggccaggctggagtgcggcaatgtgctcacggtggaaccgggcatttatctgccggggaaatttggcgtacgcattgaagatatgatctggctcagccccgatggccccaaaaatctcaccaacacccccaaggaacttctgattttgtagctttttctatgggaaaagaaagtccttttgagaaagttatgaaaaaaccacagcatttacattgaaatgcttgcaaaatccggcatagtaggatagaatgtctctgttaaaatattgatacaatggaggagcacgaatgatttcagcaggcgattttagaaatggcgcaacttttgaattggacgggcaggttctgcaggttgtggaattccagcatgtgaagcccggcaaaggtgccgcttttgtccgtacaaagtgcaagaatgtgatcaccggggccgtggtggagcgtaccttcagccccaccgataagtttgagcaggccttcgtggagcgccgggatatgcagtatctctacaacgacggcgatctgtattacttcatggacactgagacctatgatcagatgcccatcaatgccgacaagctgggcgacaacttcaagtttgtcaaggagaacatgatcgtcaaggtgctgtcctataagggcaatgtcttcggcgtggagccccctctctttgtggacctggtcatcaccgagaccgatcccggcttcaagggcgacaccgccaccaacacaaccaagcccgccactctggaaaccggtgccgtggtcaaagtgccgctgtttatcgacaacggtgagaagatccgcatcgataccagaactggcgaatatctggagagatccaaggagtaattccattttatgagctttcccttccgcagagccggcggccgcccaggggagagtctcaaaaccatgcgcggctgccggagaaatgggtggttattatgacactgacagaaaaaacagcctatctgaagggtctgatggaaggcctgaacctgaaaaaggattccgacgagggcaaactgtttaacgccatcatcgataccctggacgatctggccatgacggtctccgatatggacgaagagctggatgtcatcaacgaagagctggatgctgtgggcgaagagctcaccgatctggaagaggatatctatgctgatgaggacgagctggaggatgaggaagacgacgatgatatttacagcgtagtctgccccacctgcggtgaggagatctatctggacgagtccctgctggatcagggcggcatcaagtgcccggcctgcggcgaagagctggaatttgatttcggcgaggacgagtgcgactgcggcgattgtggctgcgattgtgagcacgaagaggagaaataacatcctctttccttataaaaggagaggcggggcgcaggccctgcctctccttttttgccctcgtaaaaagaaaagcaaaaaaggtggagaaaagtgttgacaaaagggaaaaaaggcggtatactaaccaagctgtcccgcgagggacggtgaggatcggaaaa

SEQ ID NO: 349 - DNA, 6281 bp, Unknown
  16S sequences of unknown bacteria
ttgcccgcaggcttgaagcagatgtgatcgtgggtccggaatcccgcggcttcatgttcggctgtccggtttcttatgcgctgggcatcggctttgttccggtgcgcaagcccgataagctgccgcggaagacgctgtcctgctcctatgacctggagtatggatcaaatacgctggaaatgcacgtggacggcatccgtccgggacagcgcgtcgtcatcatcgatgatctgctggcgactggaggaaccgttgaagcgacggtaaagatgatcagggagcttggcggggaaccggtgggctgcgcctttatcatcgagctcagcgatctgcatggccgggatgcgttgtccggcatggaggtcttgtctttgttgacatacgaaggtgagtagtgctcacctttttcgcttgaatgggaggtggtcttatggtcaacaaaaagtctgttacgtttgaagaagtgcttgaagaagtcaaaaaatatatacacaagccggaaaacatcgatctgatcacaagagcatatctgtttgccagggatcagcatgaggggcagttccgcaaaagcggagagccgtacatcatccatgccattcaggtgggatatacgttggcgctgttgcgcaccggccccaagacggtcgcggccgggttcctgcatgatacggtagaggattgcgaggcggagaccgaggatatcgccaggctgttcggggatgaggtggcttccctggtggaatcggtcaccaagatcggcgcgctgaaattcaaggatgagaaggaatatctcgccagcaatcaccgcaagctgctgatcgcgatggccaaggatgtccgcgtcatcctgatcaagctggccgaccgtctgcacaacatgcgtacgctgcagtacatgcgtgaagaaaagcagaagaagatcgctggtgagacgctggaggtctatgcgccgatcgcccaccgcttaggtatgagcgagatcaagaacgagctggaggatctcagcttcaaatacctgaaccgtgaaaaatactttgaaattgccaagctggtggagaagcgcgaatcagaacgcaatgcgcaggtccaggatatgatcaatgagatcagcgatatgctgcattcgcatggcatcatgtcttatcggatcttcggccgcagcaagcatctgtacagcatctataagaagatggtgacgaagaacaagcggtttgaggagatcctggatctgctggcgatccgcatcatcaccgatacggaagtcagctgctatgagatcctgggctatatccatgcgaaataccgcccaatccccggccgcttcaaagattatatcgccatgccgaaggtgaacatgtatcagtccttgcacacgacgatcatcggcgaggatggcaatatcttcgaggtgcagatccgcacggagaagatggatgagatcgccgagcgaggtgtcgccgcacactggcgttacaaagaagcgcagtatggcggtcaggagcgcgaacagaaggaaatcgaggaacagctgcattggttcaaggatttctccatgatgagcgatgaagaaagcgacgatccgctggaatacatgaacgtcgtgcagcgcgatatcttcgaggccaatgtctatgtgctgacgcctaagggaaaagtcatcgcgttgcctaatggtgccacgccgatcgattttgcctatcgcatccataccgaggtcggccatcataccgtcggcgcgacgatcaacggcgccatcgtgccgctgaacactccgctgaagaccggagatgtcgtcagcatccgcaccaataatcagtcggcagggccaagcgaggactggctgaagatcgtcaaatctccgcatgcccgcaacaagatccgctcattcttccagcggcaggaaagtgagaaacgccttgacctcatccataagggcgaggcgatgctggaggatgaggcgcggcggcggaacatggaggatgtcacgcataagcgtttggaacagatcatgggctcgctgtctttcagcagcgtgcaggatctgttcgtggccatcgccaacaagcaggtttccttgcaggccgtcatggaacggctgcagaagcacaaggtgacgacgcctatcgacaatgcagacctgctcaagatgttcaaccgcaccgaggtccggccgaagaaaaagtcagcttgcggcattcatgtgcctggcatcgagacgatgaaggtgcagctggcttcctgctgctcaccggtgccgggagatgaggtcgtcggttatatcaccaagggtcagggcgtgcgcgtgcatcgtgcggactgtccgaatatcgccagggagaagcagcggctcatccatgtcgagtgggaagaggacctggaagagaagaactatgatgtcgatctggtcgtgcattccaacgaccgcagctatttgctcagcgatatcgtcacggtcgtctcgcagtgcaaggccaagctcaacaaggtcgattccaaagtcaatgaagacggcatcacggctacgacgaagctgacggtcggcgtcagtgacgcagaacatctgcgcacgctgatcgccaatctgcgcaaggtcaacagcgtgaatgatgtagagcgcgtcattcattaaatcatcagggacgggatctcgtcccgttttttgaagggagagttgcaaatggcgttatatttgcagaaataccgcagtctttgcatcttgtgcttgttcagcttgatcatccttttggcaatctatatctttttgcgtcaatcaggtgatcttgaacagtcactgtacccgctgtttggcagcatcgtcttgcttttcctcatcgtgtttatccggatccaggatgccaggatattcggcgagctctccacacaagtgcgcggcggacaagtgctttccaagacacagctggatgcgctcgtgcaaaagaaagcgagaacagcttctctgctcctggaactcaaaggcatccaggcttttgcacaaggagaacatgaggaaggcatccggatgcttcaggaagcttgggcgaagatacaagataaacacgggaaggactggcagcggataaaggcgcgcatcggctgttacttgcggctgtgtcagatggtacgaggacagcccttctatgatcagctggccttggaagatcgagacagcaaagcattgaatggcatgcaagactggaagatgcgctgggagaatgagcacgatgaacgggcgctgtgggagatgcaggcctgcgcggaacagctgcgtgagccatatctgcgcgtgtatgcgctgctcatctgcatccgctccatgaagcagaaagaacaagaccaggcgatatcgctgtgcgaagtgctgaccgcatgccagcttccggatgttgcccatcaggcagcgtgtctgctggaggaaatgaaagggggcgcatatcatgattgaccgtctgctgcgccgccagcggtctttctttctcttgctggcagtgatgcttgtgatcggctttctggcttttgaatttgcatcctccgcagaggtggccctggccatcctgctcatcctggaagaagtgccgctcatcatgctgtgggtcttcatcacagcgccgcgcctgcatctgcaagtgcaagatcagtttgtttcccttctcgatgatgagctcgatccgtggcaagcccggcagcgtctgaagcaagagcgtctggaagatctgctcgatgcgcagaacatgctctcgctctgtgatctgctggaaggaaaggaacaagcggcaatcgatcgtctgcagagggcgctgtgccagcgcatgccgaaatcgctgcgaatacagctgctgctgaatcagagcgtcatgcaagtgcttgtcggacagagcagagaggccagggacagcttgcagcaggcacagcagctgctctttgcatgtaaaaaagtcagcttgcagatcagccgggcacgggacaccagtgtgctgcttgtcgcacatgcatcgggcgaacaggatgacgcatcctatatgaacatgctgcgccggatgatcgtgatcgaatcgctttcgctgcgttcacgcatgatgtatcggtatttgctgggcatgtgcgcgctgcgccatcatgaccagcgctgtgtgcttgaacagctggcctggctggagcgctttgcccctaagacctgctttcccgcgcgtctgcgcgccgcgatcagcgaggcaggaggtgaacaggcatgaagaccctgaagcttttattcggcttgtgcgtcatgcagctggtgatcgtggcttgtctcgccatgcgccccagtgttcctgtatcggatggctcagcgccatattcgcccttctctgcaacagaccctgattcttctgatcctgaaggcagcctgatcgatgatccttctgccgtttctgatgaaggtcagacaggcatcaattatgcggaaagcgggacgatggctgattttcgcatcgtctctggcataccgcagtatacaagagatggcggcgcgacctgggaagagctgccagtctctgctgatctgctgcaaaacgagtggcaggattatctgaagatggggccgcagagctacatcatcacagatgatcagatcatccttgcctatactggcgttaatggcgatgcgaagctgctggtgggcgatgcgcaaaagacatgggaacaagttggcatcgaccttgacgggcagcaggctctgcagatgtccttgtcgcaggatgcgcaaggcatataccggctcgccatcctgggcaattttcaatcctttgtctgcggtacgagcgaagacggcatcaactggacattcggacatgccgtatctgcttcagaagatgtactgttcaacggagggctcagcttttatgcgatgccgcttatggatgatggaacgatcatgctggtgtatcataatgatgtggccatcagcaccaacggcggcagttcgttttatcgtatgagcgatactgccccgcagctggcagaacaagtcgatgccggtgcattgccttatgatgatcatgaaggcgggtggcatgtcccgctgcgagatggcagcgaagccgtcagcaccgataagctgtactggtcgaaatgatgagaggagcatggatatgatcgaatggaaagacgtgaccgacactttttcagaagagcgaagacactataatgggaaatatctggaacaagatgaagtatatggggatgagcttgaagtcagtatcttttccgcgcttgaggaagaatgggagatatacttcagctttgggatattttatgggatcgtctacgctaaagcggatcaggtctatacgctcagagatgagatgaagcagatcctgcaggcagaatgcgacaaggcgggagaaccaagcgatgaattcatcggttggtttgtcgagaaatttcatgtctgcatgccagatgatattgtgttcaattttgacttggaatcgtttcttgaacagatgccatggtgatgtcatccgcttaaatccggatcattggcataggcggaatggatgttaggctggtgttcttgttcaaactgcctgagcttaacggacagcatcgttttgatctcacaaaaagcgaacaggtaagatatacgtggtgctgagctgatcgcagatatgggagcttttctaggccgacagtttgatgggaagcgaccctcagcacagtacgaggttcatcctgcggccggatcagctgcagcatttgcgccaccatcggttttgtatcaaaccatggtgatggtcaaacctgacaaataagcaatagaagaacgatagagatcatggaaggaacaaggggaaaagcaaaaaggccggttcagcgcatttgctgtgccagtctttcatcgtatatctgattcaatgtttcttccacttcagcttcagctccgtccacaggcatttatacatgcagaaccattcctggggccagtgcttcagcttgtctttctcgcggtacacgctgacgcagtagtcatcaaagtagcgcttggcgaaatagttggcgcggcgggcgtggaagggggaagtgatgatgatcgcactgcggcagtggtgtttttcccatagcggctttgcgcaggtgaaattttcataggtgtttcttgctctggtctcgcactcatgcgggatatcttcctgagcgagcacatgggccatcatgtgttcggcctcgttgtatttgttctttacgcagctgccgctgatgatgagcaggcgataggcatgctggcggtagagccggagcgcatg

SEQ ID NO: 350 - DNA, 4352 bp, Unknown
  16S sequences of unknown bacteria
cctcggcactcggccgcgccgaaatctgccatggatcgaacttacataaccatattttaggaggagttctctcatggcagaaaaaatcaagatcataccccttggcggtctcaatgagatcggcaagaacctgaccgtttacgaatacggcggcgacatcatcgtggtggactgcggcatggcctttcccggcgacgacatgtacggcatcgacatggtcatcccggatgtgacgtatctggtgaaaaatgcccagcgtatccgcggcctgtttatcacccacggccacgaggaccacatcggtgccattccctatgtgctgcgccaggtgaacatgcccatcttctgcaccaaactgacagccggcctgatcaaactgaagctcgaagagcacggcttgaccaagcagaccaagatcaccactgtggaagcgggacagacagtcagggccggcaagttcgaggtggagtttatccacgtgaaccactccatcgccgattcggccgcctttgccatccgcaccaaaatgggcactatcgtccacaccggcgactttaagatcgattccacccccattgacggcaagatcatcgacctgggccgcttcggcgaactgggcaaacagggtgtcctggcgctgctgtgcgattccaccaacgtggagcgtcccggcttcactcagtctgagcgctcggtgggacggaccttggaccagcttttcgccggctgcgacaagcgtatcatcctgactactttcgcttccaacatccaccgcgtgcagcaggccatcgacgccgcagtgaaatacggacgcaaggtggccgtcaccggccgcagcatggaaaacatcgtcaaggtgtgctcggagctgggctatatgaatatccccaaaaacacactgattgacgcggccaaggccaaaaacctgcccaaagagaaggtgctcatcgtcaccaccggcagtcagggcgaagaaatgtcagccctgtaccgcatggccttttccacccacaagcaggtggaagtgggctacggcgaccgcattatcatttccgcttccgccatccccggcaacgaaaacagcgtcagcaccgtcgtcaacgaactgttccgcaaaggctgcgatgtgatttacggtaattcctggcatctccacgtctccggccacgcctgccaggaggagttgaagattatccatgccctgactgcgcctaaatttttcattcccctgcacggcgagcagcgcatgctgcagctgcacagcgaactggcccagagcatgggcatgagtcccaagaatgtggctattgcggaaaacggctcagtcatcgagctgacccaccgctccatccgcgtaggcggcagcgttcccgccggacaagtgctggtggacggctacggcgtaggtgatgtgggcgctgtggtgctgcgggaccgcaagcatctggcagaagacggcatggttgtggtcaatatcaatctgtccgctcaggacggcagccttctggccccgccggacattatcacccgcggctttatctatgtcaaggaatcgggcgacttgatgaaggagctgcaggacgtggccaccgaggcagtgagcaagtgccgccgcgggcggcgcggacgcggcaacggcagcggcgaggatctgcgcggcaccgtcaaatccgccgtcagcaactatctgtataaatccacccgccgcaaccccatgatcctgcccattgtcaacgaactgtaatcccgggagacgcagggcgccgcacgccccgcgtctctttttctcacagcggataccagccggcaaaagcagggcgctttcctcaaaatgggaaagcgccctgctttttgtccaaactccaccggtatatttccacagcagacgggccatgctgaagcatatgaaagtgacaaatctgccgggacacgactcctgggttttactgctgcttctgggcctcgcctgtctgttttttgcgccgctggtggccccgtgggtcacccgtctggccggagtggtcctggccgtgctggggctggaacagagcgttaatggcttccgaagcaaaaaataccgccgccccaatcatctccagccctcgctcggtttggagatgattgccgtgggcgccgtggccctgtggctgggcgaagatgcgctggcgctgatctgcgcagtatggggcgtattcggcctgctgctggcagctcacggcctgaatcaggtcctttctgccgccgcgcagcggcgcttttcctggtggaaatgtgccgtggcgctgctggaagccgttctggccctggagctgatcttcaccagtggggaagcggtcatctggcacatccgcctgctggggctggaactgctgaccgccgctttttcctaccgcgccagcaaatcctcccagctatcctgacggggtttattcctcttccattcccgggaaaaagcggggcggatacaggcggccgcggcgcagcacccgccggcgctccaccttccgctgccggcgcttggatttcttttccatccgcttggcatagaactgcggattgcggtagccgtccacagagtatcctccgtccatggggacgctgacccaatagcccaaaggcgcaatcgtgttgcggctgtgcggcttggcggtctgatacagcttgcggtagcgttcaaatacctctgcgcgggaattcatcatatccggcagcactttgcccgcagaggaaaggctgcctttctgcttggtgtaaaaatacaccggttcgggcagaaccatgacgtgttttgcatgggccagataactcaaattaaacactgtatcctcacaccagtcgaggttatcgggacaggcaatcttttgcagccgcacgatgtccgtgcggaagagtttattccacagcacaccgtaataaaagttggccggcgcacgcatcagcccttctacaaagcgctcccgggtcacttttccggacataaacagcgcgcggtgcgcataaatgcgccgctccagcacacggtaaaatccagccaccactaattcgcacccgctttgctcggcagcctcggccatgcgctcggtggcatcggagcgcagccagtcgtcgctgtcggcgaactgaaggtacttgccggtcgccgcggcaatggcccggttccggctgtcggccacgccggagttacgttcctggtcgatcagatgaaagcgcttatcgcgctcacagtattcccggcagatggcccggctgccgtcggtgctgccgtcgttcaccagcagcacctcgatctcccgccaactctggcagcggatgctgtccaggcaccggcgcagggttttttccgcattgtacaccggcacaatgatgctcacgcttggtcgtatcatggcgtttcctcctgttctatcacatcagcggcgccagcaggcacaaaacctgttcaacaatcttttggaacaggctgcggcgcttccactcctcgtaatgcagttctcggctgtccttctggatgtccaggatcgtcgcctcaatatcttccaccacttggccgccggtaaacagcacgccgccttcatagtgctcccacaggctgcggaaatcgagattcaccgagccgcagatggccagcgctccgtccgctgccaggagctttgcgtgaagaaaccccggctgatactcaaacacccggataccgtggcgcagcagcgggccaaaattgtggcgggacacggcatgcacataggatttatcgtagatccccggcatgaaaatgcgcacatccacaccgctttttgccgtacggatcaggcttgccgccatctgccggtccaataccagataaggcgtggtgatatacaagtggtctgtagcccggtcgatcaccatatcgtaaagcgcctgcacagggttgtccggatttttggcagggccgccgtcaaagggacgcacataggctttcgcctcggccacacgcggagccagggcggtcggaagcctctggctctgccccgtgcatacctgccacataaccagaaaggccgcttccatggagcgcacggcttctcccgaaatacgcaccgccgcatccttccaatagccaaaacggcgacggcggtcaaagtactcgtcggccagattgatgcctccggtatagccagtttctccgtcaatcagaatatatttctggtgggtgcggaaattgaaggaaacgtgcagcacatccttgttgatgggcgcaaaaaacaccagacggataccggaagcgcgaacttcccgccgaaaagaaggcgtgctggttttcaatgaaccaaaatcatccagcagcaggcgcacatcaacacctgtctcttata

SEQ ID NO: 351 - DNA, 3960 bp, Unknown
  16S sequences of unknown bacteria
agcccctatattttagccttttatcgcaaaaatccgatttattcagagtatccttggcattattttatatcaaatccgccgcacacgactgcaaaccctacagcacaaacccgcgcgacgcgattttttcgttgatattcactttttcgccctctccgcttgtgagaagtctcgtcagagcgttcatcaaagccgcaaccgggtcaatgcgctgcgtgtcgtccttgttccgcttcgatatcttgatgtctccgttcgagtttctgacttcctccgcgttcgagagacaccactcaaacagcggagagtattccgcaacgattcgccccgataaaaccatctctcggaaggtctttgtcgcaccgttcagcatggcgcaggtttgaggaatctcgactatgtgctcctccctgccgtagtgttcgcgcattcttatcgccatgtcgcttgcgttgtgcccgtcgtagtctatctcaagcgacggatttttttcttcgcgagtgtatatgtagtcctcgacatatcggttgtccataacatcccccggcgtaagagtgacatatcccgcctcagcccaagccagatagggaacacggtcgcttttctcgtgggcacctgccttgttttgagctataaaaccgtggacagataccgcaattcgtccgtccggcagataagcgcagaagcccactccggtaaggtcgcgcgtctctccgaggtcaaatccgtagtatccctcccgacctttgacaagcctctcaaactcttccgaggatacttcaagctcacgaaacctctccatgcatcccgtgaaatatttgttagcggagtccggctgccacttgtccatgcgctttataagccactcgcgtatctttccgtagtcgttcatcgcgtatgcgtcgtcatgctcggattttaccgcctcgtacagccgcctgccgtattcggagtccccgcgaaagaaagcgttagccttctgccataccctctcgtcatgcacatcgtccccgtcgtcaatctcgcgtatcatgataaatacgtcgtcctgttttgcaccgccttcaagcaccctcttgtactggagaacgtcacggtagcacggcttgttctccgcgtcctctccggcggtggttatgatgaggtcgagcgactgcgctttcttgcccattcccttgactgccgcttcgtgtaaggttcttgtggtgtgcgcgtgccattcttcgcagataacgagggatggtctgccgccgtccttgttgtttttgtccttcgagaagacgacaacctcccctccgcgcgtcttgtgccttatgtacgagcgttttatcgagagaagcttttttatagccggagaagacgacgccatgtccgccatatcggtccgagctttgcgtccctggaaacggtcaaccgccacaatgtctatctccggctgcatctcaaaaacggctttctcagggtgtccgggaggatataatgcgtcgcctaccatgcagtacagtccgattccggcggcaaccgtggtttttgcgtgccctctcggattttcgatgaaagccgtgcggaatcttcgcctgccgtcctctcgcttcacccagccgaagatagagccgtagtcaaacatctgccaaggctcaaattcaatgcatttcccgccctcgtcaagccgcggaatgttgcggaaatgccggaatatcctctccgcccgcgtgtagtcgaaaacataggggaaatcgggatcactctcggcgcgttccatgtcgtcaagatgtctcttgcaggcgagaatttcgtatctgccgcacctctccccgtaatccgtgaaacagacgttgtgcgcataacgcgttacctcatccatagaggtcgtcggcagggtcttcgtcggctgaggacggcatagaagcggcaagacgggcacgagactccggagtcagaccgagacgtgtcgcgtatgaaagctgtaaactctcaagcaatcgaagctcctttgaaatgtcaagcagctcggagttcttacggtgtccgcgcagacaagacgaatacttccgccgcaaagtgagaatccgcgaggtgacggaacagtagctcccgagagtctccgcgtcaagatcgtcgaacagcttaagctccgccgcgtcggaaacaagcttctcccaaaccaccgccccgtccccgtcaagatattcgggcataataagccgaacctctctccggctcatcatcctctccctctccccgcgggcttctctctccccgacagtgaggtgtcccgtcatgttgtcaagcaccttagatttctgcataatctcctttccgcccgcaaacacagcgcaggcatttttatagtcttttgtagccgccgtcattttccccgcgtcaaaaaagttcatgccggaatttttcgcacaaacgaggggcacggcggtatgaaagcgaaaacggcgaaactttattccatggggggagtgtccgcgcgtctttcggcgagtgtttttctgctgtggcacgaatggcagagcgactgtagatttgtctcgttgtagaatagccgacggtctccgcggtgaggtatgatgtggtcgacgtctgtggcgcgtgtcgtgattccgtgtcgtgcgcactcgcggcagtacggctcgagcgtcagctgatatgccctcatggttttccattttgccgttgaataaagcccgtgccatgcctttgatattccgcggtcgacgccttgttccgccttgagcttgttctgcttcttcgcgtgaatcgggcagtacgtctcacgcgtgagattgtggcacgacggatggcggcagggtttcagcggcaaggtctgtgatatcttcggcatatttcatgagtctccttgtgttttcccgtattctcgaaaacgtctcccgagtttcggcttcggctttttcaagtcgcacccccgcacgggaatagtacgtttcgcttttctcgattgcaatgtagttccgccccgtccttatgcaagcctccgccgtagtaccagagccggagcagctgtcgagtacaacgtccccgggatctgtgtaggtttttatcaggtactcgcatagcttcagcggcttctgagtcgggtgcaggcgcgtgtttttgccgaatacctccgagggaaattcgagcgtgtttttcggaaatcccgtgtatcgctgaacgtgctccttcgtgagagtacggcttttgtaaacgctgtccgccaccgcgcgcttcttccgtaccttcggaatatcgagcttcttcaacccttgcggattgtacttcggcatttttctgtagaatacgcaaatgtcctcgacacatctcatcggctgatatttcgcgaatgtgaatcccgtggaatacggcttaatccagtaccagagataacggaacgcccgcggattgctcataatcagctttgcggtgaacggttcggcggaaaataatacaacagcggcgttcggcttcgcaatacggttatactcccgccagagcagggaaaagtcaataatctcgtcccacgcacagtccgtagtcccgtatggtaaatctgtgaggatcatgttggcagtgcagtccggtattctccgcataacatcaagacagtccccgagaacgtgccgcccaaagcaaaaattcataaatacccctcccgaaaaaatctttgcagcataattatagctctcccaaggcataaacgactgcaaactattcggagcgtaagccgcgcagggaagagaagagccgccgcgcacgtgagagatagttgtaaacctgccgctcggaaatatacctctccgccgaaaaacgaataacccgccccgttatctcccgcttgtatagccccctcgacggatctctcatgtagacctcgcggacagcatcgcaaatcaaaccaccttcctcgtgttcgagaagccgaaagcacctttcacaggcggcaacatcggc

SEQ ID NO: 352 - DNA, 1967 bp, Unknown
  16S sequences of unknown bacteria
cgcctttttttgcttgggggagatcaaagggaatcgaaaaactttcccttaaaaaagttttcgttcccgagtttttttgccgtcagcctgaacatgacgcagccgtcgggacagacaatatccttacagtatttgccgcatccgccgacgttttccagatctccgccgcttcggacggcttccatgacggggaacaggagcatcatcaccttggaacaaatgccttgtccgtctttgttcacgggacagccgtaggtgcaggtatatttatccccgatttcctcgccgttgcggcaataccgctcggtatggtcgccgcggagaaaccccgtcacttcgatttcgaactcatattcttcgtcgtaccattttttcataatccacctccggatttttcttttgctttgccgtattttttgcccgccggaagatccgcttcgcctatccccgtgtatggaacggatcgtgaaaaacgacctcgggtacgaggcgagaaaacgataaacgcttttttcggcccgtgtcttattccccgagcggggcgcgccgaaaatgggattttttatctcgaaaagtcgaacgccgcggcaaaacggacgcgctcgttttcttgtcagatgaacaccatcagtccgaataagacgccgatccccgcgcccgcgaacagatcggagggatagtgtatgcccgccgcgaaacgtatgtatccgagcaaagcccccgcggcgaggacggcaatgcccgcccagaggcaatagggtagcagcaccatgccgatgacgaaagcggacgcgacgtggcggctcggaaaggaatgcccctttttctttttggcgatgacgggaaaaatgccgcccgtttcatagggacgcttgcggtctatgaggttgcgcaggatagacaccgccaaaagacagagcaaaggaacagcgacgatgcggatgacgtccgcctgcgtcgccgtcttacggcggacaataagctcgatcagacagagcagcgcataggcgacaaataccgccgcggtcagggcgtaattgcctgccgtcagcatctttttcgcgcgggggcgcgttcggtagaatgccgcctgccgttcataacatttttgatagacgtcgcgtatcatgaattcagtatatcacaccgtgaaaaaatatgcaagagtttacgcgaattttcgcataaaggaatagcgaaaccccgaacatcaattctcttgcgccgctcgaaaaactttaagagaaaaattcttttaggaaaaagcgaggtcgccgcaatagagaaaagtcacccgaatttctttctcaaaattttttcgaggtcgttaagctgctcctctcttgtggcgcggtagtggatccagcctccttccccgcaaggatacctgtgatcgacgtattccttgccgcaatcgagcagactttcgtaaatctcggaaaactgagcgtcgcttagacgcaccatcacggtgaaagcgtccttctccgcaaaaatatcgcagaggtgtttgttttttaccgaatatttgtatccccagccgtaatgatttccgtaagggaagcggagcgtcttttgcgcgcgtccctcgcccgtcaaaaattcgtcgagcgccgtaaaaagtcccgcgcacgttccgcaatgagcaataaaatcggcgtctgtcggcgccgtttttttatccagcattctttcatacatttttcgattctctccttttttaccgccgacaacttaacggcccgcgccttcacttggaggaaaagggacttcgccgaaacgtcacaaaaacgccgccgaccgcaaacggcggcaaaatataaaacgggacctcccgaagggggattcgggaaatcccgcccgcgccccgcggcgcacatagctttcaacaaccgcggtttgcatccttttaaacgagccgcgcgctcgaaaagccgcgtttcgcccgtccgccgcgtccgtgcgga

SEQ ID NO: 353 - DNA, 32759 bp, Unknown
  16S sequences of unknown bacteria
tcagtattggcaggtgcagagttaacagtgcccgcgcgcgctgagtaaagatcacccgcattaccaaaaccgccgcttctgctttttgttccgttttctctgccgtagcgccttccggcattaaaccccgaaggaagtccgccggcagcttccacctcgtcaattccaataatattgttagcaagcagcttcggcgcctcatcctccttaaagtttactgtgccgtttattgcgacaattttatcctcttcaataagatgcctgcttctttcatatacattaggaaaaattattacttctatactcccgtacaaatcttcaatatcagcaaacgccatcatcgtatttgacttggtaataagagtctttttgccgctcacgatacccgctatcgtcacattcataccgtccgttatcctacctgtaccatccgcagcctccgctatttcgtcacacgtagcgttcgccaccttctctatcgtctctttatgatcactgagcggattgctagtaaggtaaactccgagcatctccttttccattgctgtaagctgctccttaggaaactccgcaatatcaggaagcgagcctcctattgaagcgctctccagcacttcctcagcccctgccatctggaacagcgacatctgcccttctatattcttctttgaatttgcctgcgcagattcgagcagcatttcgtacactgccatatgctgcgccctgtttccctcgagcggatcgagcgctcccgcttttatgaggctttcgagagcttttttgttcacttcgttagtatctatattatttataaactgaaatatattcttaggcaggcctttttcacgcctcatttccattatcgtgcgtgctgcaccttcgcctacgttcttgattccgagtattccgaagcgaattttcccgtcctttacggtaaatttggcatccgactcgagtacgctcggcggcagtacttctattcccatttcattgcagtttcttatgtatttcgcaatatgcgccgagtcgcccatcaccgatgtcattaaagccgccataaattcaacaggataatgcgccttgagatatgccgtttcgtatgccacaacggcataagcgaccgcgtgcgatttattataggcatactcagcaaacgataccatactgttaaatatctcttctgcaatttcttcgggaatgccgtttcttacgcagcccggcacttctatattaccctcatcatcggtcttgccgaatatgaagtactccttttccttcatcatcgcatcggcttttttcttgctcattacgcgccttacaaggtcgcttctgccatatgaatatcccccgagatcacgcactatctgcattacctgctcctgatataccatacagccgtaagtgaccgagagtatcggctccaggctcggatgtatgtattttgccgccgccggattcttcttattttctatatatgtcgaaattgatttcatcggtcccggtctgtaaagcgcaatgccggctatgatatcttcaaaacagtccggacgcagatttttcataaactgcgtcattccgccgctttcaagctggaatattcctttcgtattgcccgcggaaatttcctcatacaccttatgatcatcgtactccatatctgcaaagttgatcttgacgccgtggttctgctctatcatttccagcgcgtctcttataattgtgagcgtacgcaaccccagaaagtccattttgagaagaccgagttcctctatggctgtcatcgtgaactgcgtggatatgcctttttccgcgaggtacagcggtacatactcgtttatgctgtttttggagataacgatacctgctgcgtgcgtcgacgcgtgacgcggcataccctcgagagcccgcgacatatcaatcactttgcgtacagcttcattgttctcgtatttatctctgagctccggattcatatcaagagccttatctatggtcatattgagcgcaaacggtatagcctttgccaccgcatcagtttcggcgtacgacaaattaagcgctcgtcccacatcgcgcactactgccttggccttgagcgtaccaaatgttattatctgcgccaccttatccgcgccgtatttatctattacataattgatgacctcaccgcgtctttcatagcaaaaatctatatctatatcgggcattgacactctatcagggtttaaaaaacgctcgaacagcagtccgtattttatcgggtcgatgtccgtaattcggagcgcataagctactatacttcccgcggccgaacctctgcccggacccactactatgccgttttgttttgcgtaatttataaaatcccaaactatgagaaaatactctacgtagcccatcttctctatcacggaaaactcataatcaagccgctcatagaggttgataccatttaccatacattcctcagcgctgcttgcacgcgttattccgtagcgctcgctcattccggactcgcacagctcgtgcagatattctctgttctccttaccgtccggagccttgaattcaggcaagtgaagattgccgaattcgatttcaacattgcacatttccgctattttaacagtattatcgcaggcttccggtatcgctgcgaaaatcttacgcatttcatcctctgatttcagataaaactggtcgttcggaaaacgcatacgattttcatcatctatgcttgtcgccgtctgtatacagagcagtatatcatgcgcctccgcgtcctcacggtttacataatgcacatcatttgtagcgacaaatggtatgccggtttcatcgtgaagctgtttcatcagcggcagtatacgcatttcctcttcgagcccctgatcctgaagctcaagataaaagttgccctcgccgaatatagaaagaagctccagcgcctctttctttccgccctcatagtcaccgtttaaaaatctgtgctgcacctcaccagcaaggcagccagaaagcgcaattataccttcggaatactgagaaagcacttccttatcgaccctcggcttataataatagccctcgacaaatccggccgaaactattttcataagattgtgatagcctgcatcattttttgcaagcagcacgagatgcccctgtcttctgtccagctccgcatccttatcgtgccgtgtcctcgccgctgtatacacctcgcagccgattatcggttttattccgtttgcctttgcttccttataaaattcaatcacgccgaacattacgccgtggtcagttattgcaaccgactccattcccagctcttttacacgtgcaattagatccttgattcgcgccgcgccgtcaagcaagctgtattccgtatgtacatgaagatgtgtaaaacccatacttaatcctctgttataaattatctatagtaatatttcttttttcaagtctgccttttgccgaacggcctataaggcaataaagcactgctgaaatcggcacacttacaagcattccgagcacaccgttgaccgagccgcctacaataacggcgagcattacccaaattcccggaaggccgatggacgagccgactacttttggatatatgaggtccccctccacctgctgcagaactattataaatattataaaccacagcgcctttatcggtgaaaccataagtatcagaaaagcgcctatcgcagttcctataaacgctccgaatacaggaatcagcgctgtaaatccgacaagcaccgatatcataggcgcgtacggcatcttgaatattgtcattccgaggaaacatagaagtccaattataacagcctcagtacactgtcccgttacgaatttagagaacatagtgtttgaaagcctcgctatgtaaagcgcttcgtccgctgcctttctcggcaggtaggcatacactatttgctttgcctgctttgcgagtatctcttttctgaaaagaatatataccgcaaatacaatacccatcacactgttaaacaccacgcttataactgacgccgtcacccctattactgaagtcgtcatatcgagagccgtattgaatatcttattggtcatatcggagtgtatcagatttttcagcatctcgctgatattttcatcatttatatccagactcggcagtacaatttcttcaaggttaaaacgcgaagtcaaatcgttaatcacattttgcaggttgctccagtagctcgggaattccgttatcagcatcttgcccgcgttttttacttcgggcacaatcatcgtcgttataatgacgatgatgcccagcacgaaagctatcgcaagcagtatgcttataaaccgccttacccttccccatattctgcccaaatgcttatcgagcggccgaaacagtctattttcaatgctgcgcacgcacacattcaaaataaatgcaatcgctgctcctataatcagcggattcagaagaatgagcagataatttaaaaatgtaaataccttttggtagttgattactgcccacagcatcagaaacgctgccgcaagtatcagtataattttcttgatattgtccttattaagttccatctctctccctctttatttttaattgttaagcaaaaatcatctatgctttttgacagtcctttcctatcgcatctatcccatagaaagttttttgcaattcctgctctttctctatgaatatatcttcgcacttttcagacagtgttttattagcagagactaacttctatgcttaaatacactgccgcttgccaaaagcatcggtatatttacaagcatccttccagcttttttccggcgcctccttgaatacaaaaatcaatttttgtttttgtaccttcttttaaaatttttcaaaactcatttcttgtcccaaataaccttaatatgtttatttatataataccacaaacaagattcaacttcactatattgtttctaaattatatattactttttccaaatgtttacgcttgatatgaacacggtttctgttcataagcacccatttggcagttaagttttgttctgccatttttcgtagtttggtttcaccaatgcgtaaataatacagtgttcttcacactcgaactatgtctatatgagcatcattttcccgcttacattttattgcctgcaaacccgctgaacttattttacagcgctgcatttctcggccagcataccctcccggatatgtgccgagctcaccctctgtgcagttctgtacagacggtaaatgcctgtctcctttatacagcgctgcctttatcttgcaggctgtcgtcaataatattacataacattccttcatagcgtgcagtagcatctatgctcatctttatttggcctctgtaatcagtattgcttctatcctgaaaagaaaaatgcccgattaaagaaaatccttaatcgggcaggtatttcagttagcacttgtatttatttatatttcactattctgcaacaagcggggaagatgcagaatttttaatttgttacgttattttctatttacattcctcacaaaactataaacgaatgtagtactgttctttatatttttttattatctgcctcatgtatgttctatctgctttaccatcacaatcggaagaaataatggaagtttttagctgtgctttaatacaccgcctattcttcactatctactcttcttgcggcaatgatgaatctgccgttttcctcatgatagctgcaagtggaaagaataacgatttggtctccatattcgggagtaattcccgtatcatataaagcattatccgccagccactgcactaattcttcaaatgctgtttttgttaaatctcctgcttgttcgtaatagcaatatccgctttcttcccgatataaaatgcgagtttctaatgccgcaaaaacttcatatttccgttcttcagcaacagtagtaaaagagatgtcggaattttcctgccaaaatgttttttccatgtaccgatccaacgttccgaacatagtaccattcttcatattgtgtccatagataataaacatatcgctgtctattgtgctgtctttacctataaacggcgttccactttgagaataagattgattaaaagcgcggcgcaaataatattccggctcatcaggcgtacacataacgggataatcaatattggtattgctgatatgcagccagcctacaaaatctgaatttttctcataaagcgtaatgtattccgtatattgctgcgtttccttgtgtttcaaatcatcatcttcatactgccgcttcatcatagtgtctgaatgtgaattttgcataacgcttgccgcaagctccgcaaatgctttttcctctcgactgctttgcagataatatttgactatcataatggaagaaagaacaaaaatgatagataaaaagcaaatcagtattgaaaatatgaggttacgcctttttagcaaaaattctatcgctgtccttttgccgccccgtaaataaggtttgataagagccaactcctttcttgtatctctactcgattatataatccttatttgattttttcacgcaaggctttacttgcatttaaggtttgcttatatcctgctgaagctggtgttatctttacaatttgagaattatgagccattatttcggataaaatatcgaagactgcgtttttgattccgagagtccttgcttttaaaatactggttttttaagaaagtttatccgcaaaatctattttatttaccaaatcctctttcctataaagataaaaaggggcaggctgtttttgccagccccctctaatcatactatcctctgattatgctatggcagataatattatctgttcttttgagttttataacgctttctttcgaatacaagcgttattataccgagcagagacaggctggtaagcacaagccaaagatcgatattcacactatctcctgtctgcggagtattatcaagcggtctgttaggatttgccggctctgtaggtatcggctctgcagaatcgctgtcaaccgggtcgggatcgccgccggcattggtatttccgtaatcatttataaattcaactgcttttgtggtattcgaagaaatcacgcaaataccgtctgtcaagccgctggtattagtgttgaaatcacctgtgctaatctccgttgcctcaatacgcctgccgcttgtaatactgctaaatgtaatactttccccgtcttttagcttaaaagtatatccgtctgtgccgattgtcaggctgccgctgcttgcttttttgtctgcctctacaattttataataaacactttcagaaacagggttaccgctgctgttttgcacccatactttaaattcatagtcaatgctttcagtcggtgcgttattgcccgttaccgtcttggtaatttttatgctgccatcaggattgcctccgccgccaccgccgccagatttgtagttattaaatgcggctatagcagcattattggctgtgatcttaccttttgccgttgtttcactggttccatttaccgtaactgtgtaaccgtcgttatcgctctcggttacggtatattccgtaccagcaggcaggttagaagccgtcttattttcacccgctttcagagtaaagacagcactgccattgtcaaaagccatatcgccgtaggtgccagtgagggcttcaccgtcaatctctgcatctacagtaaaggtaaagtctttcgtgctgctggctccgctgccggaaaccgttttagatacagtcaggctgccgtattcaggatcagaaatgtttcctccatccttataattgttaaaagccgcctctgcgtttgtattagctgcaaccgtaccttttgctatggtacttctcgttccgttaaccgtaacggtataaccgtcgttatcgctctcggttacggtatattccgtgccagcaggcaggttagaagccgtcttattttcacccgctttcagagtaaagacagcactgccattgttaaaggccatatcgccgtaagtgccagtgagagcttcaccgccaatctctgcatctacagtaaaggtaaagtctttcgtgctgtcggctccactgccggaaactgttttagatacggtcagactgccgttttggggttcaggagaattcacaactgtattatttgtcccaatactacccgataattcaccataggaaatagtaagcgtatacgttgtatcactcttaataaaatctctcggtgcgctgttttccttaagcatataggtgtgacctgatgggacgtcttcaaataacacaactccgtcgctgcctgatgtagcagtcatactccaattagaatcgtctgcagttgtcagaataaactccgcgcccgcaagagggctattctgttcatccaccttattaaaggtaatatcagctgcgtagccttttgctgatggtacattgaaatatgcagttccgctttcaattgcagaagtttcgtcttgcgtagtttgttcaatcaaatagctaacagatgtaattccattagccggataataggttccctccgtatatccggaatccagcgtattcaattttactttgtaagttaattgatatatactgtatccatcttctgtcttataaactggagttgccatacgcaaattccatatcaccttgtcatccgttgaattgtaaaaatattcgtttgcatccgcaggagtgttcacaaatccgtcaaatgcaaacatttcacctataggatcatcggctatccacgcctttgcttgcagctcaatcaattcggaaatgctttggaatatcaacgataagttatccacctcgctggcagcataagtgataaaaccgcaattttcccgcagccaattgactcctgtctttgattgctcgtgaagtttacaattcctatcgccattactgcactgtacacgatctgctcctaaataaactccatagacattgattcccgttttcagtattgatttagctgtattttctgtacttgtatgcgtatcgtgattggtttcgctgcctgaacctaaaatctgatccggttcgccgacagctgctgttgaagtgctggcttgtgctgtactgctgagatggtatgtcggttttccatccgttaaaacaatgatatttttattggcgatgccggaaacttcatcactatttaacaggttttttgcaagtatcaacccggcttgcaggcaagttcccccatcagcctgcattctgtttatagcagacgaaatagaagcatcagaagcattcgtccaggcttgatatgtccttgctgccgttattccattgtttccctcatcaaaatgacctccctttttcatttttgcaccgctgaaccctacaatcgcaatcttacgaattgcgtccgtattctccgtttcagcaaattttccagcaaacgccaatgctgccgattttgcgtttgcaagcctttgttcagtcatgctgttcgacaaatcaattacaattacggctgccgcatcttcagaaaatacaatattttcaatttccgctttggtacgaacatcaagcgtaattaaaaactcgttttcatttgtgccagcactgatagtcttatcagttaatacccagccatcggcataacttttagatgtgttgccggtaagttccggtgtaacagccaacacacccgtcatgctgtctgctgcccaatgattccctatttggtttgtcggagtacccgcacctaatgcaagtacatttgcagggaaaatcccaacgaccataacaagacaaagcaaaaaatatatgaattgtcttttaatatgcttcataacgttttccccccccttataacaactttaatttccgattggacacaggtcttacttttcatgatttactaacacgctccttatttatatttttgacgatcaaccacagaagagatattctgtggttttatcgagataaaaaaagcgcgaaagagaaaatataaacgtattaaaggggctgcatgcgatatttaaccgcaaaaaagagcgcaaaaagcaagcctgcaaaaaatcaaagtttgcaggctttgttttcgtatttgtatttattgcatttatatgcttttttattaaaactctttgactttcaaggaggaataaagtataatgcttatgtaaacctgtctgtttaagcacagagtttcgcattcaaccgcagaatatctcttctgtggttttttatattataagtttcatctgttgtaagatgcgctcatgctcccgtattcctgttgccacataaatacgggttgtttctacagatgaatgaccgagaatatccgcaaggcgggcaaggtttttttctatggcataatagctcttggcaaacagatgccgcaggttatgcggaaaaactttctttggatttactttcgccgttttgcatagctttttcatatcgtggcagatattgcttcgatccaatgacttgccgctgcttgtcctgaaaaggtaaccgctgtttatcccttgctcatcggcgtatttttttaatttccgtatcaactccttatgcagtacaatagtacggattttccctttcagatttatttctgcttttccatttttaactgcttctaaagtaataaactttagttcgcttactctgatacccgtcgcacaaagagtcagcataacataataaagacggttattgttcttttcccttgccgctttcagcaaacgcttatattccgcttcacttaaattcctatcatcatcaataaatactttacgctgtactttcagcagctttaccttgcactccttaagtcctgcgtactccatatatgaattgacagccgacagcttggcgttgactgtttgcacttgattttcttccagcagcttatcccgataaaggagcagttttgctttgcttattggttctcccgctaaatattccataagaagaatgatctcatgaagatatttttttatcgttaaagcagctttttcgttttctcttaaatggtttgcaaatctgcatattcctttttgtgttatcatatgatttttcatatatgcttcctccgtaatgtaagtctttcattattttacccaacatttacgaagctatcggaataatattaagcaaacatcaaaaatctctatatgtttatactctgccaagatgcaaggcatatttttttaaatctcgttgaagtttgaccaaataaaggtctgttaccgtattagcagcagcttgagcaagtaatcctaaaagcaataaaatacagcaaacagaaagacaaacattcaaatgaagccctatactattgaagaaaaaagataattgactgcaaaaaaacataacttaaacaggcaaagctatcactttatccggcatgcaagcagcagaatctgtaagcgacatagtttatatggcatcacgcaggaaacggacaatgggcaaaaaaattgcgatgctgaaaagcaagaggcaagctaatcctgtttaaagctatcgttagagcttaaatgatatgcagaacaacaaactaactgtctgggctttccgtcatacgaaataatgcggcagtccgaagaacagaaatcccttctgccttacggactttcacgattatttttaataaaatatcataatgcaaacaacatcaaaaaagggctatatcaaagatacgctcttttttaacgaataattgcaggattgctaatcgctgtatacgcttctgccaaattcatacgcctgcctgagataatccgttttatcaatttcaggtattccgttcgtactgccgcagccctttgccagcaccattcccttgtcattaaagcctatgtaatttacaatggcaaacctataataagatacagcctgctcaaatgtccaaaatagattatccgccgccgtcatcagcagcgctgagtcctttacaggatacctttcgtatctgccctgaggcggattagggtcttcctctgctatacaataaaagcgctcgatgaaagccttgattctcgaggaaattgtccaaaaataaagaggcgacgcaaataccacaagatctgcttccttaatcttcggcgctatatcgttgaaatcgtcctttattacacacggtttgccgtatctgcatgcattgcagccgaggcagccttttatttctgttttaatgagtgaaatcctttctacctgatgcttggcttcctctgctccccgcacaaacgcgtccacaagctttgctgtattgcctcttggcctgcctcctccttctatcacaagtattttcttcataataatcactcctttttgtaatgctaccatttctacatataccacataatacaattacgtaacatatatttaaacaatacggctttcagctattatctttttcttttgaaaattgctttttagaataatgtctactgcttaaaagcgaatgcaccgcacaaaaacgcagaaagacgcatccttaccggtctcgtttgctgagctcttcaattcccagttttctttccttaaacggatgcgccgtaaattatttatataataatgcagataaagtaatccttgccctcgtcgcttatcttctgcagcgacttctgcaccttgacacgtatgccttccggcacgcttgtgagcttattctccatctgttcttctaccatctcatagagcgatttcccgaggaagttggtctcccatatacggtctggctcctgctcaaactcggttataaggtggtttatgaggtcttcggactgcttttccgtaccgactatcggcgatacctcggtcgtgatatctgttctgattatgtgcatgctcggcgctttggccttgagacgcactccgtacttgctgccctgtttaaatatttccggctgctcgagtatcatctccgaaagacgcggctgcactatgccgtagcccgtttcctccacctgctgcattgcgctttcaagcttgtcgtaagcctttttagcggaagcaaattcacgcagcagtgagaaaaactgtgagtcgtttttcacttcgtgttccataagctcttcaactactttatagaaaagtccgtctgccatattaacatttacgtctatgctgcctgtggcaagatcaatattttcaacctcaacgctctccacaacatcaccatcagcaagggcatttatactgcgcttaacatcatcaatgctgctgaaatttgccgcccattcctgcattgcggaaattacctttgcctttatccagtgatcctcagaaagtccttctgtaaagcccggcagatagaagtttatttggcttacagggaactgatttaaagcttcgccgagaatgttattcagtgcggaaacgctcatgtgcgcgcagtcagtaggtataacgggaacgccatatcttgcccgcatatcgcttgccagccctctcgccatatctccttcaggctcacttgtattaagcacaacaacaaacggcttgcctatttcctttagctcctttactgtgcgctcctctgcaccctcgtagctctcgcggggcaaatcgccgatgctgccgtctgtcgtcacgacaattcctatcgtagaatgatcgcgtataactttgcgcgtgccaagctccgcagcctcggtaaacggcattttctcctcctgccacggcgtcgccaccatgcgcatcttgccttcttccatatggccgataacgcccggcactatgtaacccacacagtcaaccatgcgcagcttcatattgacatttccgggcagtgtaacagagacagcttctgccggtacgaatttaggctctgccgtcattatcgtcttacctgcaccgctctgcggcatctcgtcggtcagtctctgctttacatatgcgtttgtcagattaggcattacgagaagatccataaatctcttgataaatgtggatttgccgctcctcacaggccctacaactccaagatagatattaccctgtgttctctccgcaatgctttcatatatattggtcttctcatttatatccaaaataaaaacctcccatatactataagtaatacaagtatactgagaggttttccgttttatgaataaattttagtacaaattttcatcctcggatctatttataaaaacagctccatttcattcccttttttgataaatccgtattccgcatataatttctttccctgctcactgctgttcagccacagcctttttatattattctcacggccgtattcaacaattttatctaaaattcggtttgcaaatccgtgctttctgaactgagggcaagtgtatatatttaataagtatccctcagccccgctcaggttctccttgtacggaatacgcgcaaacaggcacagcgaacctatggcagcaagcttctcttcccgaaatacgccccagcaaatcaaatctttatttatatgcgataaataatactgctcgcttgccgatttcagttccgaaacatcgtcatcttcacagacttcgccaagttccctgaataattctattcttaaacgccaaaattcatccgccgcttcctcattcaatctcaaaatatcatttttcacgatatagcggtaatgcagcatatctacgccgcggtaattctttgtaaagctatccgctcttttcatgccgtttctcagcgccacattctgagaagcaatattcgtatctctgataatagagcaaacttcatctgcatttaatgtttcaaaagcatacttcttgcaggcttttgcggcttctgcagcatagccctgatgccaatacagtttgttgaaaagatagcctatctcaagcacttccgtttctttccactgctgcatcgtgatcccgcactgacctatcatttcacctgtttcttttaaaactaccgcccataagccgaatttatatttttgataacgggcaatctgcttatcaagccactcctgcacttcactgccgctgaacgcaccctcataggcatacattgtttcatcatcctgcaatattccgcacaaagaattaaaatccgcctgattaagttctctcatatacagccgttctgtttcgattatcatattttccccctgcaatctgcaatttactgcttatattataccacaaacctcgatgttcagcggctttgcctccatgaaatttgtcatttgatatcgttcagcctgcggatttcgcggtttgtaaacgccagcatacagaccgcaaagcccatgacgcctgtgcacagaaacatcgccgccatcccgcagccgtctccgctcccgacaatgcgcgaaagcatcccggcaagctccgagcctgaacgcataagcggctcgaacacatagtccgcaagatatcctccgagaataattccgagaggaatcgtgccgtactgcacggcattcctcaccgcaaatactcttccctgcatttcgccgggcactttcctgtaaaggatcgtattgtacgccgccgttgaaaacggaagcggaagacttgcgcccatcgccgctaaagaccagccgaatgtgcctctgcctgccgccatgagaagatctccgcacatgaacgacagcgccatcgaaatgaatattgtattcgccatattcttgctttcttttttcagtgaaactatgatgcctccggcgatgccgcccgctcccataaacgcattcacaagaccgagcgccatgctgtcgccgccgcttcttgcaagtaccatcggtgaaagaatattctcgtatgtcagtctcgacaagaaattgacaagggatatcacgagcattatgtaaagtatgcccctttccgttttgagaaacgcaaagccctcggaagtgccggaaaacggcgaaacacgctctcctatttttatctgctccggtatgtgaatgaaaaagaaaagtattaaaaatgcagccgcaaagctcgcgatatccactgcaagtacggcagaaagtccgcccgccgcatagactgccgcggcaatcatcggactcagcactattacaagattttcggaaaacgaattcatgccgctcatattagatattttatctttcggcacgagcatgcccgcggtaacggccgctgccggctgctgaaaggccgtcgttattccgactaccgcatttacggtatagatgtgaaaaagcgacagctgccccgctttaaaaaacagaagaaccgcgagcgttcccagcgccgcaatagtatcagaagcgagcattacctgcttctttccgtgtctgtcgacaaatgtaccggcaaacatgctgaatatgatgtacggcacatagttgcagaacgaaagcagcgatacaagaagagccgagccgctattttcaaacgcaaagagaacaagtgcaaacgcagtcatcgaacttccgagctgcgatatgccctgacttaaccataaaactataaacttcttaaaaccattactgttatccattgaactcactcctatttattcatcattttaattcggcaatttcctaaaatactatacagcttcggcattctgcgccgcatctgtgcagcagcggctccgaactgctgcgaatgcacctgtaaggagcgctttgtacaggtaaggcgcaaatgcaagttgcttttacaaactgcatctgctgcaatgtatatttttatgaataaataagtacaaaatccaatggcggacgagcaatcctttctctgtacaaacctcgtcctacctatcggattttgtacagagttctctgcttaaattgattaacatgcggcacatcacaaagtcacttcctttcttatataattacagagcggagcaaaacccgcccttcatgcttacttttttatccgccctacaaggctgaatgtatttgacgacgttatctccacatcggcaaagtttcctatcatatcttttgttcccgcgaagttcacgagcttgaaagtatcggtgcgtccagaaaggtttataaggcccggctgcggcttctctatcttacccgcctgctcgcgcttgcttacgccctcgacgagcacgcgctccgttcttcctacatacgccgcgttcttctccgcagagcccgcatttattacttccacaagctcgttaaaacgcttgtgcttgatttcttctggtatctgatcctcatatttctcggcaggcgtgccttttcttatcgaatacaggaatgtaaaagccgagtcatacttcacttttctgcacaggtcaatagtctcggcaaaatcctcttccgtctcgcccggaaaccccacgattatatcggtcgtgagcgcaatttcaggcacagccgctcgcagcttctcaacaagcgcaagatactcttccttcgtatacttcctgttcattctcttaagcacatcgctgctccccgcctgcaccggaagatgcagagacttgcagagcttgctacagtttttaaacgcctcgatcagcttatccgaaagatctttcggatgcgatgtcataaagcggatgcgctctattccctctatctcgctcaccatatatatgaggtcggtaaaatcagcaattcccgagccttcctcatgctctcccttatacgaatttacattctgaccgagcagcattacttccttaacgccatccgccgaaagcgcctctatctctcttacaatttcctcaggctttctgctgcgctcgcgccctcgcgtatacggcactatgcagtatgtacagaagttgttgcagccgtacatgatgtttacatacgacttatgcttgtaaagacgctttgacggaagtccctctatgatctcgccgccgtcttcccatacatcggttatcttctttttttcagcgattacattctcaacgagcttcggaaattcgtgtatattatgcgtgccgaagatgatatcaacccacgggtatttctgctttatagtatcaattatatgctgctgctgcatcatacagccgcatacgcacataaggaaatcatctccctcttcctttcttcttttaagctggccaagcgtaccgaaaaagcgtttatcggcgttttcacgcacactgcaagtatttattatgactattcccgcgtccttgcgttccttgctctcttcataaccgagctccgagagcataccggctatcacctctgagtcgtgctcattcatctggcagccgaatgtcgttatatgataacttttgttcataaatttttcctcttaatgttcctcaggctcatgccttctttctctccccatcagcatttccgccgcgtcagatgcgcttatcctgccgtttatgacatcgtaaatagcttctgtaataggcatctcaactcctacgcgctgtgcaagctcatatgccgcttgtgtcgtatacataccctcgacaaccattccgaccttttttgtcgcttcgtcaggcgccataccttcacctatcattataccgcagcgcctgttgcgcgagtgcatagatgtacaggtaactatgaggtcgccgatacccgcaagcccgttaaaagtgcgtgcatccgcaccaagcttcacaccgagtctcgttatttccgcaatgccgcgcgtcatcagcgccgcctttgcattgtcgccaaagcccataccgtcagaaatgcctgcgccgagtgcaattatattttttaacgcgccgccaagctcgacacccgccacatcgctcgtcgtatatattctgaatcggctcgtcataaagatgtcctgcacctttaacgccgtttcctcacattttgcagcgacagcaacggtcgtcggcatcgcgcgtccaacctcctctgcatgtgaaggtcctgagagcactgcgtatttataatccggaatttccgcggaaaacacctcatcggctatttccgacatgcggcgaagagtcttctgctctatgcccttggccacatttactattatcatttcgcttgtaagatacggcaaagcgttttccgctgcgcttctgaaaaactgcgaaggtgctgagaacagtgccatcattgcaccatcaagcgcctcttcagccgtatacgcgatttttatattgtcgctgaaaggaacaccgggaagatatcttaaattttccctgttcttgttcatctcgtccagatgctctctgtttacatcatagatatgtacatcatatccttttcccgcaagagtctgcgcaagcgccgttccccagctgccggctcctatcacgcctatcttttccatatcaagacctcccgtaaccatttattttttactaaaactgagcttaggctcttcgcccttcaaaagtctctttatattagccctgtgctttatcacaactatcagcgcgagcagtattacgccccatatcgcctcaggatatatgaaataagtgagcagcggagcagctactgccgcgcagaccgaccctgctgacaccctccttgtaatgagcaccacgacaataactataccaagcagcgaacacccaagcagcggcgaaaatgtaactaccgcgccaaacgcggtcgcaacgcccttgccgcccctaaagccgaaaaatacaggccatatatgcccaaataccaccgcgatcatacacgctatcggaaaaatcaccgtaaagctgctgtctccctgctgcacataataattttcggcaaattttcctatgagcaccgaagctgcgcccttggcaatatctattatcagcgtcgccgctgccgctttctttccgagtacgcgcagcgcgtttgtagtgcccgcgttaccgcttccttctttctttatatctattccgtatgccttgcctatcagaatagacggcgaaatattgccgagcaggtacgaaactataacgcacagcaagagaatcaaattcttattcatcataatttatcatatgcctcccgcgctgcttactgatctttttcgttcttttctctaaatacaaactttatagaggtgccctcaaagccaaagctttctctgatgcggttttcgagatatctcgcatacgagaaatgcataagctccctcttgtttatctgaaatgagaaaagcggaggcttcactccaacctgagtcgcataatatattttgaggcgcttgcccttatccgacggcggctgcttcatcatcgtcgcatcggcgataagtgaattgagctgacccgtaggcacacgcagcgctcgcttttccgaaacatagtcggcaagctcaattaccctctttatacgctggtgctcttttacggaaataaacacgctcggtgcatatgacataaatgtgagctcacgctcaatttccttgcgaaactcgttcatcgtgttcgtttctttttctatcagatcccatttattcacgacgacaataatacccttgcccgcttcgtgcgcaactcccgcaatcttcttgtcctgctcggttataccttcctttgcgtctatcacaagcagtgccacatcacagcgctctatcgcagccacagcgcggattacgctgtatctctctatatcttcattgactttgctcttgcgtcttatgccggccgtgtctataagtatatactcttttccgtccatcgtaaacggcgtatctatcgagtccctcgtcgttcccgctatcggcgatacgataaccctgttttcaccaaggatttcatttatgagcgaagatttcccaacattaggcttgccgattacggcaatcttcgtaatatcatcatcgtcatcactttcattatccggaaatgcttccacaacttcatcgagaacatctccaaaattgagcatattgaccgctgaaatcgggattggctcaccgagtcccagctcataaaaatcataaatatcattctttgatttcggcgaatctatcttgttcacgatgagcacgactttttttcccgtgcgcatcaacatatttgccacctcgtggtcagccgttgtcaacccgtcctttccgtccaccataaacagaatgacatctgctgtatccattgcaatctgcgcctgctctctcatctgcgcgagtattacatccttgctcgaaggctcgataccgcccgtatctatgagcgcaaaatgcctgtttctccattcagcctccgcataaatcctgtcgcgcgtaacacccggcgtgtcttcaactattgatacgcgcctgccgactactttattaaaaaacgttgattttccgacattaggtctaccaactaccgcaacaatcggtttactcatcgaaaatacctccaataaactcctccggcacaaattcgcgcaggtcgtctataccttcacctacgccgacaaattttatcgccatatcaaattcatcagcaatggtgatcgctataccgcctttagccgtgccgtcaagctttgtgattattatccccgtaagatccgcgacatcgccaaattccttggcctgagacaccgcgtttttgcctgtcgtagcatcgagcacaagcagcgtctctctttcggcttcgggaaattctctgtcgatgatcttgttcatcttttccagctccgccatcagatttttcttattctgaagtcttcccgccgtatcacagatgagcacatcggcgttccgcgcctttgccgactgcaccgcatcaaatatcaccgctgatggatctgcgccctcaccgtgacgaacaacatttacgcccacgcgctctccccatatcacgagctgctccgcggccgcagctctaaatgtgtcagcagctgcgagaattaccgtgttgccctcgcctttgagcttatgcgcgatttttcctatggaagtagtcttgccgccgccgtttatgcctatcatcataatcacgagaggtcttttctcgcttattttatgtctttcacccttgtccacaagctctgtcattatctttttaagccgctcttttacattttcagggctcgtaatatagtcatttttgatatcgtgtctgagccgctcaattatcttcatcgtcgtatccataccgatatcagacattatgagcacttcttcgagttcttcgagcagctcttcatccaccttggctcttgccattatggtatcgccaattttttcagaaagtctgccgaaaaacgattttttcttttcaaaaagcatatgctgtttcctttcgtttatctatcacaggcaaagcctgctgcaaaataacataaagctcattataaatcgaacttatcgccgaggcgcagcgatatgagtttggaaataccctgctccggcatagttaccccgtagagcacatccgcgtgttccattgtcgctctctggtgagttacaagtgcaaactgtatgccttcaaagttctttaaataattagcaaatcggtctatattggcgtcgtcaagcgctgcttctacttcatccaagatgcagaacggcgtcggcttggtcttaagcaccgcaaacataagcgctatagccgtcatcgtcttttcccctccggacataagattgatattctgcagtttcttacccggtggctgcgcgataatttctatacccgattcaagcggattgttctcatcctcgagtgcaagctgcgcatgaccgccgccgaagagttctctgaatatctcctcaaaatttgtcataactccttcaaagctctctttaaaacgcgcctttatggtcttgtccatattctttatgatttcagcaagtgagtttgtcgcttcgagtatatcagtcctttgcttagtaagaaattcatatctttcgcttacctgttcgtattctcttatcgcgccgacatttacttctccgagttccttgattctgctttttatctttcgcgattcctgcacggccgcattcatcacaaagtcctttttcttgaattccatagcctgtacatatgaaacctcgaattcttcccacagcttgtccttaaaattatcaagctgcgtttcatttttcgctatctttatttccgtattgtacttactgtcctggagtactgtaagcttttgttctatctcatcctttgcttctgagctttcattgattgccgcatctacggccgccttttcctctgcgatttccgcagcgtagctttcaagattttctctttcgcgtatctttgccgatacaagcgcatccgtatcatcgtgacccgatgtaatttcgctccgctgattaagaagattttctctttcgcgcgtcttttcctccaactcgcgtgtaagatctaatattcgctcatttacaagcactgccatcgagtcaatactgttcttctgctctctgcataagttcacagccattcgcgctttcactatctcttcgtttatttcatcgagtgcgcttctcttttcttcgtattcggccagcgcgctgttagtctcatccgtcgcttcttcgatatcgcgctcggctttttcagcttccgcaagcagagctgctatcattgcgcttgatttcgcgccttcttcttctattctatcaaattcactctttctcttttctttactctcgtccatatcggcaagtacgctcaatgctgtttcaagcctgttttcacacattataagagcaacttcaagcctttttacttcttcgtttgcctcagcgatttcatccgctgtcctctctataaaacgtcttaattcatcaagtttctcgtccgattcttgcttacttttagtcttgacagcaatctcactttcaagtttcgctatttctgctttcctctcgagcagatttgccgtgttattcttatagcgtccgcccgtaatagcaccaccagagtttattatttctccttccagtgtaacgaagcgaagtccgctgcccgccgttttggaaagctttaccgcattattcatattatcgacaacgactgttctgccgagcagatattcaaatatattcctatacttgctgtcaaattctatgcactcgctgccatagcctttaaagcccgccgccgatgttacgcggctgtccttattcaaagtgcctcttacagatgcaagcggcagaaacgtaaggcgtccggctctgtttgctttaagaatgtttaccgcatcctgcgcgcttttgtcgtcagcgcagacgatattttgcagcgatgctccgagcgctgtttcaattgccgtctcgtaaccagcaggaacattcataagctccgcaactacgccctctattccgcgcatatctgccttcattatgtaacgtacggcgtggttgtagccctcatagttggcttccatttcctctatagtcttctttcttcccgaaagctggccaatagttatgcgaagctcttcaatctcctttgcagtctgtctttctttcatcaaactgctgttgtatttttcggtaagagtccgcgctgcactgcgcgcatcctccgtatcttttataagtccagctctttcagcctcagactcgcgctttgctttctccgcatttgcgcgttcagcttgctcttcttcgtattctgcttcgagctgcgcgcgcctcatatttaaattttccttaaggcttctcaagctctgcgcctcggcacgcttgctctgagcaagactatgtagctcgtatatgctgtttttcctgctgtctatgctctccgcctccgctccgagcacacctgtaagcttttcatagcgttcaagagcatctttcagcgcattgtctaactgcgcaagctcttcatctattttgccgttatctctctttaagccttctgcattttccttttcatctgccagctttgctgctgccgctgatatctctgccgtcagtctcctcgtgttttcatctaatgcagaaattctctcgcggtttacttcacttctgcgcgccagcgcatttatttcttctaccgccaaaagcagcttggccgatgtttcgctcgcaagctcctcgagattttccgagcgcattttgtctgccgctgttttcttatcgatttccgccttttcttcgcgcagtgcttctatttccgcggcagcttcaattatatcgtcctttagaaactccactttgagctccaaattttctatatttttaagcgtaatatttatttcaagctccttgtatctatctcgcaggctgagatactccgcagccttttcactgtcagtcttaagcttaccgatacggccttctatttccgatacgatgtcgtttacacgctcgaggtttgcattcgacgcggccaattttctctcaacttccgctttttttgtcctgtacataacaatacccgcagcctcttcaaagatttctcttctcgactccggtttattcgacacgatatcggcaattttgccctgtccgattattgaataaccatcaactcctattcctgtatccattatcagctctcgtatgtccttaagcctgcactggttgttgttaatgagatactcactctcgcctgagcgatacattcgcctcgtaattgcaacttcgttgtagtctatcggcagtattccttcggaattgtcaattacgagagtaacttccgccattccgcgagattttctgcttgccgtacctgcaaatattacctcgtccatcttgccgccgcgcagcgctttcgggctttgctctccaagtacccagcgtatagcatcagaaatgttgctctttccggaaccgttcggtccgactatacaggtaatcccttcgtgaaaatctatagtaaccggctcggcaaaagacttgaatccgtgcatatatatttttttaaaatacaaatttgtcactcctttcaagcgcttcttttgccgcattcctttccgcttctttcttgctctttccccttcctcttcctatcacttcgtcgccgaggaacagatcgacataaaatactttatcatggtcaggtcctgttgttcccgtaactctgtattttaaaggcttctgagacgagccctgaaccctttcctgcatttccgacttgtagtctgtgtgcagcttgccggaaagagcttcttctacagcttgtccgaaaagtgaaagcacaaattttttggcacaatcgtaccccccatcgagaaacatcgctccgattatggcctcgacagcatccgcaattatcgattcacgccggcgcccgccgcttttttcttcaccgcgtccgagctttaaaaaatttcctacttcgatcttcgctccgcacactgcaagagtctcttcacatacgattttggctcgcatttttgtaagcgtcccttcctccacatcaggaagccttgcatacagttcttcgcttattattgcgtcaagaaacgcgtctccaagaaattcaaggcgttcattattatgaagcgccttattttcctttattacataatgatacgagctgtgtgtcagcgccatttcaagcaagcttttatctttaaattcgtaattcagttttttttcaaattcccaggtagcattattcacttatcgtaatctcctctaactcttcaacagagttctgtattatctgtaccacgttattatttacataaggtatagcttttagtatcgtattttttacggcgttagcatttgacgaaccgtgcattttgacgatggagcccttaactcctaatatcggcgcaccgccgtactccgaatagtcaaactcgcttttgagctcacgcatcttgccagaaagcagcagcgctcccatcttggcaacaccgccgtccgtgaatttattttttaagagcttaagtatattccacgcaaggccttccgtgagctttaagatgacattgcccacaaatccgtcgcatatgattacatcgcacgctcccgcaggcacttctcttgcctcgacattgccgacaaaattaactctgcttttgcttatgaggtcgtatgccgcctttgtaagcgtcgagcctttggactcttcggcacctatgttaacaagcccgacacgcggattttttatgcccattaccttttccatatagatgctgcccattacaccgaattcgagcagattattgggcttacactcggcgttggctcccgcatccacaattatcgaaggataacttcttccaagtataggatatatgctggcgatggcaggtctgtctattccctgtattcttccgagtatgaaaagcccgcccgccatcagcgcgcctgaatttcccgcagaaataaacatatcgccctcaccgttttttaccatcgttatgccgatgaccatcgaagagtctttttttgctcttatcgcgcgcacaggcgcatcatcgtttgtaattacatcagaagcatgttttatgccgagtctgtcctttggatattttcccctgcattttttcagctcagctttgatagcgctttcgtttccaacgattactatttcgtcatttataatgttaagagcctcaactacaccctttactatttcacccggcgcattgtctccgcccattccgtctattattattctcatttttcctccttggtatataaaaaaccctattatatattatatagcaggaatgctctttttaaaaggtattttagatatatcatccttctattttcacaacagaaacttcgtacgccgtatgcagcgtgctgttgccaaagctgtccttttttcggtattcgcggctctgtattcttcccgtgatcgtcagacgcattcctacatcgagcactccggcataagaggcgtttctgccccaggcgatgcatggtatatagtccgatttattatacattctgttgaccgcaagcataatatcgcagatttctcttccaagaggcgatgtacgcctaatcggtgttttacagatatgaccgtcgagatatatctcattttcgtaaaaaagctgttcatcctccggtatctctgaaatttcacgcgcaaatacaactatgttaagcttgcttctgccgtctgtctcttcgttatatgtacgcacctgtccgcgtacgtctactctcgagcctgcgccgagacacagtccaagaagcagcctttccgaaatctgcagccttatctcgtctctgtatccgctgcttcgctcaactcctatcagcgtctcgtaaaacgcttctccgtatgtcctgtgactaaaatcaagatctttcaaaagttctcccgtaagtctcgctctgtttgtttctatgatatcaggattagtttccatctatgtccgtcctcctatgcaaatgtatgtatttacatattatgagcgcggacgcgttcatatgacagattaaaacagagcggacaaggttttgccgcgttcttctacaccataatcctgtgtttatatctttccgctaagtcttcttcactaagttcaggcggatcggagtatagtattctcagcttattatgcagtaccgtaaaatgaagcggaaatttctcgcccttttcgccgtcgacatccgtggaaacatcctcaggagattcgagatagagttcgtccgtcttaaagtaaagcacgtttttattgtgaggatgatgccccgcgagcacttcaaagaagagcggcgcaaattcaggaatcagcatctttttaaatattataacatccaaaagcccgtctcttatgtcagactccggagcaacgcgcctgaagcctcctgctgagcctccgttcataacaaccataaaatacatatcaatatcttccgtacattctttactctttatggaaataggaatagcgtgcagatttggaatttccgatatccctttaaggtaatatgccattattcccagcgtatttttaaggttggggtcagttttctgagaaacatccacaagcgtgcccatagctgctacatttatatagtgtctgtcgttcatctttgccagatcgacataaacaaattcgtttccaagcgcgatatctatcatttgatttatttcattcggtatgttcatataatatgcaaaatcattggccgtaccggccgggaatatcgctatcggcaagtcaatttcgtgtttcatcatcgcatttacgacaatattcaccgtaccatctccgccggcaattattatatttctatactgctctgcatgtatgtgcgaaaaaacataatcgagtatatcagtgcttgcccctctgacaggtcttataagaaaccctttatcctgaaatttggatattataaggtctaagtatcttggaaacatcccatttcccgagttgggattgtatataagaagtactttcctctgctcatctgtcgtctccagtttatatttcttttcagcttcaaccattttaatctctcccttcaaataaaatgccgcgaatctcccctatgagatagagcgaacctgctatgagaagcacctcaaaattttctttttcaattttttcgcgcgctttagcaagtgctgctatcggctctctttcaattatgcagcttctgccatttttttctatcatctgtgcgagaagctctgcgctaagtttcctttcgttccgcggctctgtggcgataaagctgtcgcagatactgcacaggcttgccgtaattttatcggcagctttatctgaaagcacgccgacgacggcaagtatttttttattcgcaaaatatgttttcaaggtttcggcaagggctgaggctcctgcctcattatgcgcgccgtcaaggacaatatacggcgaaacagcttttaaagctatattctgcgctttcggcggcacgatttcaaatctgccgatatttttcgcttcataaaagcctttataaagctttgtgcgttccacgcttacgcagcgccgctttcgcagcacttcaagcgctgtgagcgccgtgagtgcattttctatttgatgctttccaagcatagatatcctgagatctttgtattcggtctctcctatgaaagcatcaaatttgctgccgcttatatcattttcgatattcgcgcactttattctttccacgtcgtacagaacacagccatttttgtaagcagcgcgggctatttcccttttcgcctcgtccgtatctacattcataattaccggcgcgcctggttttattatacccgctttttcacgcgcaatttccgcaagcgtgtttccgagcctgtcggtgtggtcgtaggaaattgaggttataacgcaggcgagcggtttttctataatgtttgttgagtcgcctcgtcctccgagtccgacctccattaccgcataatcgcagccctttctcgcaaaatacaggaatgcaatcgccgtaatcacctcgaattctgtcggtgaagcaaagccttcttctgtcatttgactcaccttttcaagaacctcgtctgtatacgcggcaagatcgctgtcgcttatatattctccgtcaagctctattctctcgttaaaaacggtcagatacggcgacgtgtatataccgacgctgtagccgtttgccagaagcgcagaatatataaatctgcataccgagcctttgccatttgtgcctgcaacatgtatacattttaattccttttcgggattcccaagccttttcatcagctcattcatgcgctcaagtccgagaatactgccaaacctatgaaactcgcctattttttctatcgcattttcttttttttgtctatcggtaatatttgcttctttcattttttgtctctctttatattaagcttttctaaagctctccctccccgcctttataagtagcagtaagcgtcccctgtttacaaagggacgcttagatttattttcactattattttacaatttttttgatatgagtgcaatacgtgaagttaccttttcgagcatatctttatattttaccatcttttctttttcttcttcaatcttagccgccggcgccttgttcacgaaccccggatttgacagcattccctgcactcttttcacttcattctcgagccttgctttttccttcgtcaggcgttcaaactcagccttgtaatccacaagctcgtcaagcggtatgagaatttccgcaccgtctataactgccgacattacatcatccggtgcttcatccctgcgctgcgcaaatgttatgctctcgatattggcgagactcttaatatagctttctcctttttttatgcgtgcaagcgcttcaccctctgctacgactacagctctgagcttcttgccgggcgccgtttcagcttcagctcttatgtttcttatgcttctgattgcgttcatagctgtctccagcgtctttacatcatcttcaaaggtgagcttttcatcatatagcggccagtctgccttcatcagaaaatcatgcgggttttcagctttcttgtcagcttcgaggcgcggcagaaagctccagatttcttccgtgatgaacggcataaacggatgcagcatcttgagcatatcggtgagcgttcttacgagcacatatcttgccgcttttttatcctcttcgtcatctccatagagtctgcctttaacaagctcaatgtaccagtcgcagtattcgttccaaatgagctcgtatactctctgaccggcaagcgcaagatcgtacttttccagggcgtcatttacatactttaccgcgtcatttacgcgcgctatcatccatttatcctcggcgcggagcgcgctgccgcaaagtgccgcttgacggcctgcgcattctgccaagctgtcgctgcactgctccgtcaaacttggttctgccatcggacgcaaattaccgtcctcatcctttaagttcattattacaaaccgcgacgcgttccagagcttgttggcaaagtttctcgccgactcaagtctctctgtcttaaatctcatatcattgcccggcgtgatgcccgttgtcagcataaatctcagcgcatctgctccgtactcatctatcacttcgagcggatcgatgccgtttcccagcgatttgctcatcttgcggccttccgcatctcttacgagcccgtgaatatacacatgatggaacggtacttcacccattacttcgagcccggaaaataccattcttattacccagaaaaatataatatcgtatcccgttacaagcacatctgtcgggtaaaagtactctaaatcttcagtcttgtcgggccatccgagcgttgagaaaggccaaagaccggagctgaaccaagtatcaagcacgtcctcttcctgcctgatatttgtactgccgcacttaacgcactttgacggcgcttccgtttctaccataagctcaccgcagtcctcgcagtagtacgcaggaattctatgcccccaccagagctgtctcgaaatgcaccagtccttgatattttcgagccaatgcaggtatattttctcaaatctgtctggtacatgtgtaagcttacctgcttttgccgcttcaatggccggtttcgcaagctcctccatagctacaaaccactgatctgagagcatcggctctatgacgctgtgacagcggtagcattctcccgacggtatcagcttatcctccgtctttacgaggaagcctgcttcgtcaagatcagctatccaagcttttctgcactcaaatctatccataccttcatacttgcctgcaaggctgttcatagtcgcatcattatttatgcaggaaagcctttcgagtccgtgtctctcgcctacctcaaagtcattcatatcatgcgccggcgtaattttaaccgcgcccgttcccttttcgggatccggataactgt

SEQ ID NO: 354 - DNA, 2126 bp, Unknown
  16S sequences of unknown bacteria
ggaggttgccgccgggcgaaggagaggtttctccgcggtgctgtttccgcaaccgccaggcgaggccccgcaggttcgggggatattggaaaagtacataccgtaacctcctcccacattcgatttaggaggaattttttatgtccaaaaacagctctgcccgtacgttgaccgcaccggcgtcccaggcttggggggcgcggaatctggcttactgcgcccttctggcggcgctcagtatcgtctttgcccgcctcatcatccctatgcccaatgagacgacccgcttttccatcgaagccgtaccgatcttcctggccgggctgtttttcggcccggtggcaggcggcctggtcggcttcagcgctgatctcgttggctgcctgttctccggctacggctacaaccccatcttctgcgtcccgccgatcctctacggtgtgacggcggggctgttccagggctatttggtcaaaaaacgcaccctgccccggctggcgctttcgttcctgcccgcaatcgtcctcggctcgatcctttaccagagcgcatcgctgacgctgatttacgccgcgccggacgcacgggccgccttcttccttttgaagctggccacccgcggcatccaattttccatcacctgggtcatcgacgtgctgctggtacatctgcttttccagtgcaagctgtttgaccgcgccgggctctggccgccgaagcgcgccaaggccgccgctaaggcggagaaaggaaccgaagcattatgaacgcacaggaagccatcgcttatatccactccgtcagctggaagggcagcgtccccggcctgagccgcacccgcgcgctgctggaaaaaatgggcaacccggagcgcaagctccaattcatccacatcgccgggacgaacggcaagggctcgacggcggctatgctggccagcgtccttcaggccgcaggctaccgggcgggcctgttcacctcgccctacatcacccgctttgaagagcggatgcaggtagatggccaggagattcccccggaagagctcgccgagatcaccgcctggatccgccccctggcagaaagctgcccggaagcgccgacggagtttgagctcgtcacctgcgtggccctggaatttttcgcccgacggcagtgcgacatcgtcgtgctggaggccgggatgggcggcgctctggattcaaccaacgtcatcccctgccccgcctgcgccgtcatctgcaacatcggcttggatcacacccagttcctcggcgatacgctggaggccatcgccgagacgaaggcaggcatcttcaagcagggcggcacctgcgtgacctacccggcctcccccagcgtcgaagccgtctttgcagccgccacccaggaccggcagctggactggcacccggtccgcttcgactccctgtgcagcatccggcacgacctttccggtcagcgtttcgattttgggcggcacaagaacctgcagctccccttgctggggcagatgcagctgcacaacgccgccgtcgccctgacggtcctggactgcctgcagcaaaagggctggcggaagatcaccgaagaagccatccaccgcggcattgccgaggtctcctggcccggccgctttgagctgctgcgccgcaagcccctgttcctggtcgacggcgggcacaatccccagtgtatgcaggcgctggtggagaatctgcagcgttatctgcccggccgccagctcgtcgccctcaccggcgtcatggccgataaggattacaccgccatgtacgaccagatcgccccctactgcgcccgcttcatcgccgtcacgccggataatccccgggccatgacggcaagtgacctggcaaaggtcctcgcccggtacggcaaaccggtggagacagcggaaagcgtcgaggccggcgtgcagcgggccatcgacctggccggtcccgacggcgtctgcctcgccttcggctccctctacatggtcggcgcgatccgcgaagcggtaaaaggcatgcgtgtgtcaaaaaaatgtttttgatacgcgcaaacgaggctcctctgtgtaagcttgagtgacaaaatcagcacgctgtgtaagctcgagtgac

SEQ ID NO: 355 - DNA, 16081 bp, Unknown
  16S sequences of unknown bacteria
tcgtttccaactcgttctttgcgtggggcttcatcgtcgccaagctctggtcgatgcaggtcatgtccggcgaagagtacacccagcgggccgagtccaaccgcatcaccgagtacaccaccgtggcgccccgcgggcgcatcttcgaccgcaacggcgtcgagctggttggcaaccgctcctcgtttgtcgtgctcgccaatgccgaggtgcagaacaaccccgcggtcatcaacaggctctcgacggtgctgggcatcccgcgcgagacgatcaagcagtcggcggcatcgcaaagcggcggcgcccaggcagaccgcgtgctcgccatcgacatcgacagccgcgccgtggcctacatcaccgagcaccacgaggccttcccgggcatctcgatcgagggccgcacggtgcgcacctaccccaacggcaagctcgcgtcgcatgtcctgggctacacgggaacgatttcagaagccgagctgaaaaagcagtccgccggcgtcagctacgagtcgggcgacatcgtgggcaaagacggcgccgaacaggccttcgaggcctacctcaagggcgaccgcggcgtcaagcgcgtagagatcaacgcttcgggcgaggtcgtgaacagcgtcgactccatcgaccccgcgcagggcaacgacgttcgcctcacgctcgacgtcaatgtgcaaaaggtcgccgaggaggcgctgcagcaggcgttcgtcgacgcgcacaacgcgaagtacgacaacgcagcagcgggcgcgatcgtgggcatgaacgcgaagacgggcgaggtcatcgccatggcgtccgcgcccgattacgacccgacggaatttatcggcggcatctcgagcgatacgtggagcgagctcaccggcgacaagtcgggctacccgctctccaatcgctgcatagcgggcctgtacccggcggcgtccacgttcaagggcttcacagggcttgcgggcctgcagtacggctatgcgagcgagcagtccgtctgggactgcaagggcacgtggaccggctttggcgagcagtggccgcagaagtgctggaacacgagcggacatggccagatcgggtttcacatgggcatcgtcgaatcgtgcgacgtcgtgttctacgagatcgcgaagcgcttctaccaagagactgccgatagcgacgccgtgctccagaagtacctcaaaagctgggggttcggccagaagaccggtatcgagatatccggcgaggcggaaggccgcgtgccgacgcccgactggaagaaggcctacaacaaagacgccccggaaagccaggcgtggcttcccggcgacctctccaacctcatcatcggccagggcgacctgctggtcacgccgctgcaggtctgctgcgggtacgcgggtctggccacggggcgcgtgcccaagccggtgctgttgagctccgtcatggcaagcgacggggagaccgtcgtcgtcgacggcgcgagcttccagggctccaccatccaccccgatttcgaggagaagaacctcgagatcatgcgcagcggctttcgcgacgtcgtcgcagagggctcggtcaaaaacgtctttgccgggatgggcgtcaacatctcgggcaagaccggcacgggcgaggtcgcgggccacgacaactacggctggttcgtcggctacggcccgtccgaggacccgcagtacgtgtgcgcgtgctgcatcgaggaaggcggctcgggcgccacatgcgccgcacccgccgtgcgctcggtgctcgccgcggcactcggtcaggacacgagccacgttgccggcacggcaaccgaggagcgctgataccccatgccgaaaaagacatttggccgcacgcccaaagtgcacgcgcgctctgcttcgcctgcggtggcaaacgcgcgtcagagcacgtcccccgtcaacatcccgctgtttgccatcgtggcggcgctcgttgcagtcggcctcgtgaccgtctattccgtcacgctcacgaatgccgagtacaacttctggcgtcaggtcatcggcatcggcatcggcatcgtcttgatggtgctgttctggctgttcgactaccgccggtttgggagctggttcgtcccgcttctggtcatcgactgcctgctcatcatgctgccgatgattccgggcctcggcatcgaggtcaacggcgcgacttcgtggatcaagatcggcccgctcacagcccagccgtccgaatgggcaaagcccgtgaccatcctcatgatggcggcaggctgcgcgcgcttcgacggcgagatttccaagggcaccgactacctcaaactcgtcggctgcctgctgctgccgtgcgtgctgctcatccgcgaggacctgggctcgacgctcgtcttgctggtcatcggctttttcatcctgttcgtgggcggcgcctcgcgcaggtggattatcgtcacgctgctcacgctcgtcgtgatcgtcgcgggcggcctcgggctcaacagcgcgctcaacacctggtccggcggcgacatccagatcctgaagccctaccagatgagccgcctgctcgtcttcatcgatcaggacaaccccgattacgccgatgatgcctacaacctcaaccaggccaagatcgccgtcggctccggcgagattacgggcaagggctttggcaacgcgacgcagtcgtcgggcggctttctgcccgaggcggcgacggacttcatcttctgcgtctacgcggagcagtttggctttttgggcgcgctcgtgctgctcgcgctgtacctcgccctcatggcggtcgcgctcacgattggtctgcgcgcgtctgataaactcggctcatgcatcgtcgccggcgtcatgggcatgtggctgttccagatactcgagaacatcggcatggacctggggctcatgcccatcacgggcatccctctgcccttcatgagctatggctcgtcgttcatgctgacgaacttcatctgcatcgggctgctgtgctctatctggtcgcggcgcctggatgtgtcgaaccgcacgagaaaggtggcgtcacgctaatgtcaaaaatgcccatcgatgtgaagcagcttctcgattccgtggccaacatcgggcaggaacgtgacctgcccgtctacgttgacctcgtgttcgacccgactgcaagcgacacgctcatcgactacatcatcgacgcgtttgtcgggcagggctcgaccgcgattgtcgaaagcgtcgtgctggggacttctgtccccaggctgccgctgcccgccgacctgggcgtgatcgtgggcggcgactcgctgctcctcggcgacgtcgcggctgcggcgcgcgccaagggcatcccctctgtggtggccatcgcgcgcggcgagaccttctttgccgataaccccgaggcggcgcagcgtctggcggacgagaccctgaaggccaacaccgtcccgacgcccgcggcgacggccagcgcgcctgcggtgggcaagggcattcccatggacgacatcgtcgacatcgacgtcaaacccggcacgaggcgcccgctcgaggagctgggttcctggatcgtctccaacgccccggccaagcgcattgccatggctgccaacttcgcgttcctgcgccatccgctcgccgtggagctgacgcagcacaacgccatcgagaacggcgccatcgggctcgtcttcttcatgccgggcgccgacatgccgctcatcacgctcaaccaggcccgcatggtcctgcagatcgccgcggtgtatggaaacgacctgtccaccgaccgcatcaaggaggtcgcggcggttgtggccggcggctttggctgtcgtgccctcgcgcgcaagctcgtgagcctcgtgcccgttatgggctgggcgatcaagcccgccgtcgccgcgtcgggcacggtcgcgatggggtattccgccatcgggtactacgagggcaacgtcgcgctcgcctcgcccaaagaggcccttgacggtctgttcgacgtgctcgccgacctggcggacaacggcacgaccgccgtggaaaacatcgtcgacggggtgaccatgctgcgcatgcgcgtgaaaagccccgcggccaacaactaggaccgacacatgttcaaagccaataccgccctatgggagaagtacgccccgctcgtcaagcaggtcgagaagccatcgcgctatctgggccaggagtggggggccatcgagtccgcagacaagcccgacgctgactaccatgcggtgatgatctatccggatacctacgagattggccaggccaaccaggccatctcgattctctacgatgcgctcaacgccgatgggcgcatctactgcgagcgcgcgtacctgccgtgggtcgacatgatcgcgctcatgcgcgagaaggggctgccgctggcgtccctcgagacgttcacgccgcttcgcgagttcgacttcgtcggcatcacgctgccgcacgagatggcagcgaccaatgtgctcgagacgctcgacctgggcggtatcccgctgcacgcctccgagcgcggcgagggcgatccgctcgtcttcggcggtgggccatgcgcgttcaaccccgagccgtacgcgccgttcttcgacgccatcttcatcggcgagggcgagcgcgccgatgtcgaggtggcgctcctgcaccgcaagctcaaggccgccggtgcctcgcgtgccgaggtgttgcgcgcgctttccgaggtgagggggctctacgttccctcgctgtacgaggcgcggcgcgtcgagctttccgacgggttgttctacgaggtggcgcgcccgctcgacgagtccgtgcccaagacggtcgagaaactcgtcatccaggatttcgacgcggtcaaggcactgcccgagcccatcgtgccctacaacgagctcgtccacgaccgcctcgccatcgaggtgctgcgcgggtgcaaccgcggctgccgcttctgccaggcaggcatgatctaccgccccgtgcgcgagcgcaacgcggacacgatcgtcgccgccgtcgcccaggggcttgcctgcaccggttacgacgaggtgtcgctcacgtcgctttcgtcgacggaccactccaccatcgtcgagcagctgcgccggctcaaccgcagcttccacgggacgggcaagagcgtgagcctgcccagtcagcgcgttgacgcgtttggcgtggagcttgcgcgcctgatcgctggcgagaagaagggcggcctgacgctcgctcccgaggcggggacgcagcacctgcgcgacgtcataaacaaaggcgtgaacgaagaggacctcttcaacgccgtgaccagcgcgttcgaggccggttggggctcgctcaagctctacttcatgatcgggcttcccggcgagacggacgaggacgttgcgggcatcggggatttgtgcaagcgcgtgctgtgggcggcgcgcgatgcggtgcccgaggaccagcgcgccaagacgcacgtgcagatgcgcgtttcggtggcgttgttcgtccccaaggcggtgacgccgttccaatgggacgggcaaatcggccttgcgcagatcaagcatcgcatcgaggtgctcaaggcgagctttcccgaaagcgagctgcgcaagaagaacatcaagctggcctggcacgactcggccacctcgtacgtcgaggcggtgctcgcacgcggcgggcgcgagtgcgcgccgctcatcgaacaggcgtggcgcaacggcgcccgcttcgacgcgtggagcgaccagttctcgtgggaggcatggcagcaggcgggcgagcaggccggcgtgccgattctcgcaagcgcgatgcgcgagtatgccgaggacgcgccgctgccatgggaccacatctcgagcggcgtgcgcaaggcgtacctgctgcgcgagcgccacaaggcccagcaggccatgacgacgccggactgcacgtttggcaagtgctcggtctgcggcgtgtgccaggacctgctcgtctacaaccgcaccgaaggcccgcgcgtggcatccccgtccgagcaagggcgcatggacgcggcgagcggcacgattccggcaccgacggctgcgtcgattgccaagctcaggcaggcccgcgcgcgcaaggccgaacaggccgatgcggcaggcgagggcgaggtgagggtccatggctaagaacttcctgctcgtcatcgagtatgccgagcgcgacaggctcgcatatctttcgcatcttgagacggtcgaggcgatgcgtcgcgtcgtgcggcgcgcgcagctgccgtttgcggtctcgcaggggttcagcccccacatggagacgacgttcgggccggcgctgccggtcggtgcgggcggagacggcgagtactttggcgtctacctggaagactacatcgctcccgagacggcgctcgagcgcctgcagaagatggctccgacaaacctcatgccgctttcggtcaggtacgtggacgtgcatgccgacgcgctcgacgtgtactacaacacgagcacgtggcgcgcggagttcgtcggcgagatcgccgtgctcgaggaggcgttcgcacggctgtgcgaagtcggcttcatcgagaccgtcaaggtaaagaagggcaagaccaaggtaaagcgcgtcgagttcgccacgcgcctcgtggggccgcctgcgttcgcggagggcgagggcgggaaagtcgtcatggcgtttacgacccgtcaagacaacgagggtgcgcttcgtccggacaagttcatcgacgcggcgctcgacggcattgaggcagctccgcagctggtcgccctgacccgcacccgcctctcccatacctgacaacggggcgcttcgtcattcagtgggcggggaaccgaaatctcgggcgatttacccttgaacgagcgcgataatccttgtagactatcgatgtttgtctcttgactagaggtgcctgtttccctgcgccttggttggggctttacatataccgatttattttgcgtctgaataacagccaggcgcgcaagaatggaatcgaaaggcaacgagaaatgtacgcaattgtgaaaaccggtggcaagcagtacaccgttaagccgggcgacgtgctcgacgtcgagaagatcgagggcgaggctggcgacagggtcgacctgcaggtccttctcctcaacgatggcaacaaggttgttgccgacgcagccgaagccgccaaggtcaaggtcacggcagagatcatcgaccagcacaagggcaagaagcagctggtcttcaagttcaagaagcgcaagggctacaagcgcaccaagggtcatcgtcagcagctcaccaagattgcaatcgtcgacgtcaacggcgtgactgccgaggctcccaagccgcaggccccgaaggccgagcaggctcccaaggccgagccgaaggctgccgagcccaaggctgaaaagcctgccgctcaggcagaggctcctgcagaggacctctccaagatgaccgttgcacagctcaaagatctcgccgccgagaagggcatcaaggttccttccggtgctcgcaaggcagagattgtcgaactcatccagaacgcgtagtagaaagggaggctggttgatatggcacataagaaaggcctcggttctagccgcaacgggcgcgactctcatgcgcagcgactcggttgcaagcgttttgctggccagaccgtgaatgctggcgagattcttgttcgtcagcgtggtacccacttccaccccggcgagaacgtcggccgtggcaaggacgacaccctgttcgctttggtgcccggcgttgtcaagtacacccgcggcgacaagcgcaaggtgcatgtcgttcccgctgacgccgagtagcgttaccgcgcagaacttatgatgcgaatccccgtctctgtgaggcggggattttttcatcccgcgcgggaactgtggcactgccacacatcccgagtcccccgcgcgggaaccgtggcactgccacacatccggcgtcccctgtgcgagaaacgtggcgctgccacgcatccgacgcgttcggggcgcacgtgggaggatttgcgagcgcagcggggtgtgcgcggcgcgcttctcgcggtaacatgtgcaccactatgaatacttttcgcgaaatactttggtacggccgaggagggcaaggcgcattcagcgccgcgaagctcctcggcgccgcatatgcgctcactggcgagaaccgccactcgctcgcattcccgtcgtttggccccgaacgcaggggcgccccggtccgcgcctacaccaagctcggcagcgttcccatcaacgaccgcagcgccgtcgcgcaccccgaccacatcgtctgcctcgacgagacgctcctcgcggacctcggcagcctctccatcaaggagggtggctcgctgatcgccgtgaacgaggaggtcatcgaattctcgcgccagattctcggccgcgagatcgtgaacacgacgctgctctctcttctcgcgctcgaactgggcgacctctccgccgatgacgtcgtccgcggaatcgaggagacgatgccgccacgtatccaggcaaagaacatcgagctcgtgcgggccgtgttcgagcgtgccgacgagctgcaaagtgccgtgcacgtcgcgcgcgcaccgcagcggcagacgcgtccgcacgagaggaacgtcctcatcggcggcgccgagtacatggacatcatgaccgccgacgtcttcgggggttccaatacgccgcagcaggagtaccgcccggccggcgagggggaggaaggccagcagtgaagccgactattcgcgagcagaagaccttcgacttctacacttgcccgtccgtccccacctacgaggccggctatctggtcggaggcaacggggactggcgcagcgagcgtccggtcgtgacgcccgaagcctgcacgggctgccagcagtgctacctgtactgccccgacggcgccatctcgccgcttgatgcgcacgagaagcgctccaagatccagatcgactacgacttctgcaaaggatgcggcatctgcgtgcgcatgtgccacttcgatgcactgcatatggaggctgagccccgtgactaagaagttcctctcgggagacgaggcgctggcggaaggcgtgcgcctcgcacgccccgacgtcatcagcgcgtaccccatcaccccacagaccgtcgtcgtggaaaagctctccgagatggttgccgacgggtcgctcgacgccgacttcattcacgtcgagtccgagcattccgcgctctcggccgcgctcggcgtgtccgcgacgggctgccgcgcgttcacggcgacctcgagccagggcctgctctatatggccgagctgctcacctacacgtcgggcggcggttttcccgtcgtcatgatgaacgccgatcgcgcgacggcgctgccgtggaacatctacggcgaccagcgcgactccatcggactgctcgaccacggctggatccagtcgtatgcgaaagacgcacaagaggcactcgacttcgcgctcatggcgtttcgcatcgccgaggacgagcgcgtgcagacgccgttcatgatcaacctcgacggatttgccctcacgcatacttacgagacggtcgacgtgcccgatcaggagctcgcagacgcgttcttgccaccgtaccagaccgcgaacaagtttgacttcgcgcgccccgtgagcatcgggtttaccgccggccctgccacgaacgacatcttcaaattcaacgagcacgtgcacatgatgaacgtgttcgacgtgctgcctgaggtcgaagacgactttgcgcgcattttcgggcgccgctacaccggtccgctcgaggcataccgagcagacgacgcggacttcgtcgtcatcacgctcggcaccatcgcggggctgtgccacgacgtggtcgacgagctgcgcgaaagcggcatcgaggcgggctgcctgcgcatccgctacctgcgcccgttccccgacgagcagctcgtggcggcgttgcgcggcaagaaggccgcggccgtcctcgagaaggacatctcgtttggctacgaggggacggtgttcagcaacgtcaactcggccctctacaccgcgtcgcagcacgacggccttgccggccagctgcccaagaccttcagctacgtcggaggcctgggcgggcgcgacatcacggcagacgatatccacacgatgttcgcgacgatggtcgacggcggcgatgccgcgagccacgcgtttctgggaatggggatgtgacatggcgcgagcactcaacctgatcaatagcgacgagccgttcttcggccacaaggcatgcgccgggtgcggcggctcgcttgccgtgcgcatcgcgcttaaggtgctgggggaccgcgccatcgcgattctgccggcaggctgcatgtccgccgtcggcttcaactttccgcagctggcatttggctgcaacgcgatgatctcgacgtttgccggtacggcgagcctcatgacgggcgtcgcggcgggcatgaagcgaaaaggcgagaaggacttcacggtggtcggcttcgcgggcgacggcgggacggccgacatcggcatccaggcgctgtccggcgccatcgaccgcaacgacgacattctctacatctgctacgacaacgaggcgtacatgaacacgggcatccagcagagctcgctgaccccgtacggcgcctccacgacgacgagcccggtcgaccgtaacgggcaggcgacgctcacgcagaaaaaggacatgttccgcatcgtttcggcgatgggagcgccctatgtggcgaccgcgagcgtggggtacctggacgattacgcgacgaaggtcgagaaggcgagccatatccacgggacgaagttcatccacgtgctcgctccatgcccgaccgggtggggaagcccggtcgacgcgacggtggagctcgcgcgcgaggcggtcgactgcggtctgtggcggctggcggaatgcgagggcggcgtggtgacggtcaaccgcgacccgcgcaagaagacgggcgagttcgccccggtcgagcactacctcaagtcgcagcggcgcttcaagcacatgagcaaagaggacatccggctggtcgaggcgcaccgcgacgcccagtggtcctagcaataccagcccgatgacacgaggggccgtgggtatcgtgtcattttgcgatgctgcgtcgttggcgtgccatacagtcttcacgttttaaacgcgtgcgtttgctagaatctcccgaaacgaaaactgacctcagaaaggggtttcatctatgtgcggaattgtcggctacatcggtcgggaaaaggcatccgacatcctgatcgaggggttgcacaggctcgagtaccgcggatacgactccgcgggcattgccgtgcccacgggcgacggcgcgctcgaggtcatccgccgcgagggcaaggtcgaggagctggagcgtgcctgcgccgcccgtgagctgcctgccacaatgggcatcggccacacgcgctgggcaactcacgggcgcccgagcgagacgaacgcgcacccgcacatcgactgcgagggcaagatcgccatcgtccacaacggcatcatcgaaaactacgtgcagctccgcgacgagctcaaggcggaaggccacacgttccgcagcgagaccgacaccgagatcgtcgcccacctgctcgagaagtactacgacggcgacctcgtcgccgcgatggccaagaccgtgacgcgactcgagggcgcctacggcatcgccgccatccacgtcgaccaccccgaccagatcgtcgtcacccgcaaggacagccccatcgtcgtcggctacgcggcagagcagcaggcgtctttgctcgcctcggacatcgtcgcggtcatgaactacacgcgcgacgtcatcttcttggaagacggtcagattgccaagctcacgcgcgagggcatcacctgctacgacggaaacctcgccccgatcgagcccgcgctcacgcacgtcgattgggatgccgagagcgccgagcgcggcggctacccggacttcatgctgaaagagatcttcgagcagccgcgcgccgtgcgcgacaccatcgccggcgccgtcaagaacggccgcgtgcttctcgacgagctcgacttggacgatgacgacatcgaggcgatcgacagcgtctacatcatcggctgcggcacgagctaccatgcgggcctcgtcgcgcgcgagctcatcgagcgctgggcgcgcatccccgtctccgtcgaggtcgcgagcgagttccgctaccgcgaccccattgtcggctcgaacacgctcgtcatcgccatctcgcagtccggcgagacggccgacacgctggccgccgtgcgcatcgcgcgcgcgaagggcgcgcaggtctttgccgtcaccaactgcgtgggcagccgcatcacgcgcgagtccgacggtgtgctctacgtccgcgccaacatggagatctccgttgcggcgacgaagtcgtttctcgcgcagattgcctgcctcatgctcatcgcgatgttcctcgggcagaagaagggccgcctgaccacgcgtcaggtcaactcgctgtactacgacctgcgcgagacgccctcgcagatcgaggacatcttgcaggacaccgccgaaatcgagaaggcggccaagctcatcgccaaggcgcactcggtcatgtacgtcggccgcggtatcggctcgaccatctgctacgaaggcgccttgaagctcaaggagatcagctatctgcacgccgaggcgtatcccgcaggcgagctcaagcacggccccatcgccctgctcgacgagaccgttcccgtagtggccgtcgtcaccgactcgccgacgcgcatgcagacgctttccaatgtgcaggagatcctcgcgcgcaagtcgcatgtcgtggccgtggcgaccgaaggcgacgaggaggccacgcgcatcgccgactgtgtgctgtacgtgccgccttgcaaggattggtgctccgccatcacggcgagcgtgccgctgcagctgctcgcacgctatgtcgccctcgaacgcggctgcgatgtcgaccatccgcgcaacctcgcgaagtctgtgacggtggagtagtggagcgcgagcaggcccagcctgccgagcagccgcaggccgacgcgccgcgtacgggcctgggcgtcgacatcgtcgaggtcgcgcgcatggagcagatcatcgtgcgctcgcctgcgttcacgcgccgggtgttcagcgaacaggagcgcgcgtacgccgaggcgcaccaccgccccgccatccactacgccatgctcttcgccgcgaaggaggccgtgctcaaggcactcggcacggggttctcgcgcggcatcaaggtgaccgacgtcgaggtcgtccacgagcaaagcgggcgtcccaacgccgtgctccacggccgcgcgaaagaggtcgccgccgagctcggcatccaggagctgccgctctcgctgagccgcacgcatgacacggccgtggcaaacgccatcgccgtcaccaaggagagccgcccgcgcgtcgaggacaagccaacgccgcgccaggagctggccgcccgcttcaaggagctgcgcggcatgctcgacgacctcgagtcgcagctcccagacgccttggatgacgaacccgtccctgctgacgacaccgcaacaaccgcgcctgccgccgacgccccatctcacgcacagggagacgccgatgcctgatatgcccctccaccgcagcgccgaagagttcgcggcgctcgtcccgcaccccgcctacgatgcgaacaagtactcgcgcggcaccgtgggcgtcatcggcggcaggctacgtgcggctcgtcacgacgcaggcggcggcgtccgtcgcccgcgcgcacctgctctccatccccgtcaccgcctgccgccagagctacgagggcacgctctcgcaaagcaccatcgcagaggtcctggacgccatctcgaagagcagggtgctcgtcgtggggcccggccttagcgcggacgactccgcttccggcctgctcacgcgcctgctcgaggacctgcgcgaagaagaggtgcagcgccccatcgtcttcgacgccgacgcgctcaacatcgtctcgaagcaccccgagctgctcgagctgcgcgtgggcgcgcccaacatcctgaccccgcacgagggggaggcggcacggctcctcgaccgcaaggtgcaagaccgcgtcgcagacgcgctcgagatcgcgcggcgctactcggcaatcgccgtgctcaagggccccaagacgctcatcgcctcgcccgagggcacggtctacgagaacacctcggcgggcccggagctcgccaaggcggggacgggcgatgtgctcgccgggatcatcggggcgcttgccgcccagggcctcggcatgctcgacgccgcctcgcttggcgtgcacctgcacggcgtcgccggatctttggcggcgcgccaaatgggcgtcaacgcggtgcttcctgaggatataatcagcaacattggtcctgcctatctagcattgggagcgtgacgttttgtgagcgcagacgaggtaaattactttggcgctaacccgcatcttggcgacgcggtcgagagaatcaactcggaatccgaatccaagagggtgcagaaggacgtgcccatccccgagatgttcgcaaacggcgttccccgctcgtacacggtcgacaccctcccgcgcgatgcctgggtcgaggtcgacctcggcgccatcgcgcacaacgtcaaggtggcgcatcgccacctggggccgcgccgccaccttctggcggtcgtgaaggccgacggctacgggcacggtgccgtccaggtcgcgcgcacggcgctcgcgtcgggtgcggaccacctggcggtctccacggtcgaagagggcatcgagctgcgccaggcgggcatcgacgcgcccattctcatcctctcgcagccgccgatgcgctccatcccgcttctgctcgcgttcaacatcatgcccacggtcaccacgtccgagttcgcgcttgcgctcggcgaggccgccgacctgcacgggatggtcgccaagtaccacctcggcgtcgacaccggcatgaaccgcatcggcgtgttctacctcgacgtcgtcgatttcatgcagtcgatcaacttccaccgcggcctgcagctcgacggcatgttcacgcacttcgcgactgccgacgaggacagcgactgggatttccgcatgcagctcgaacgcttcaatcaggcgatccagctcatgaccaacgcgcgcatcgaccccggcatcatccactgcgccaactccgcctctatccagcgctaccccgaggcgtacttcgatatggggcgcgtcggaatcacgatgtacggcctggccccgagcccggtcctgcgcggagtcgacggcctcattcccgcgatgcaggtcaaatgccgcatctcgtacctcaaggagccgcagctcggcgagggcgtcagctacggcctcaactaccgcgttgccaagccggtgcagatcgcgaccgtcccgctcggctatgccgacggcgtgcgccgcgagctctcgggcaagatgaaggtcctgtgcaacgggcgcccgtgcctgcaggtgggcaacatctgcatggaccagatgatggtggagattcccatcgggcattccgtgcacggcgtgaaaggcggcgcggaaatcggcgacgaggtcgtcctcatcggccgtcaaaacggcctcgaggtcacggcggacatgatggccgagcaaatcggcaccatcaactacgagatcgtctgcggctttggcatgcgcctgccgcgcgtctacgtgtagggaagccccatggcaccggaagcgtttcaggatctgccgcaggcgcaggacaagctcgagcacgagcacctggccggggcggaggtgcgcggccacaagactctcgacgaggcgctcgagggcgggttctcctgccaccagtgagcgctgggcgacacgcgcacca

SEQ ID NO: 356 - DNA, 24032 bp, Unknown
  16S sequences of unknown bacteria
agcgcagagcggtgcgtagacaagcgaccgggtaatcctcgttgacaaaccgaaggtttgtcaacgatctgctcagccccattcgcgcggaattgtttttcctgccattgattgccggcgcgcggcgtgctataatgccaaaggaaacgcttgaagcggccgccggacgcgcggccgcggcatgccaaagcagggaggcgattcgcttgccagaaatcattcacaaggctcctgaaaccatggacgcgcgcacgcgcgtgcgccgcacctttgaatttgaaaagaccgaccgcgtgaccatcggttacgaggccaacgcgggcatccatgcccggctttgcgccgcgctgggcgcgaaggatggagaagagctgctctgcgcgctgggcgtagactatcggggcattgccgcgccctacattgggccgcggctctacagcgcgccgccggacaggcgcgtcgatccactggaaggctgccgcatgcgctgggtggagcacgaaacgggcggttactgggatttttgcgattttccgctcaaggacgcggaggacgaggccttcgacgccttccccgtgcccaatccagacgatttcgattatgcggccgcgcgggcgcaggccaaagcgtatggcgggcaatacgcgctgtatgtgggcagtgcgggcgtgccggacgtgatcaattccaatggccgcatcatgggcatggaggatgtgctgtgccatttgcaactgggcgaggaagcgccgctgcgctttatccagcgccgggccgccttccagctgggcatgatggagcgcctgctggacgcgctcaagggtctagtggattttgtgtggctgggcgaggatctgggcacgcagcacgcgccgatgatcagcatggatttgtaccgcaagcggctcaagcccattcataagcaattcatcgacctggccgccgcgcacggcctgccggtgatcatccacacctgcggctcttccagttgggtgtacgaggattttctggaaatgggcgtgcgcggcgtggatacgctgcagccggaggcggcgaacatgtcgcccgcgtatctggccgagcactttggcggccggctgaacttccgcggctgcatctccacggcggggccgctggcctatggcacggaagcggatgtgacggaggcgtgccgccagacgctaagcacgctcatgccttaccgcggctatcacttcgcgcccacccacgccatccaggacaacacgcccacggaaaacgccatcgccatgtacaacgcggcgcaccaatacgggcgctatctatagagaaaggaaacccatgatcgattccattcacatccgcggcgcgcgggtacacaacctaaagaacatcgatgtggacgtgcccctcaaccaaatcgtgggcatcgccggggtatccggctcgggcaagtcctcgctggcgctgggcgttttgtacgcggaaggctcgcgccgctatctggaggcgctttccacctacacgcgccgccgcatgacgcaggcggccagggcgcaagtggacgaggcgctgtatgtgcccgcggcgctggccttgcaccagcgtcccggcgtgccgggcatccgcagcacgtttggcacgggcacggagctgctgaacagcctgcgtttgatgttttcccgcctggccagccaccgctgcccgaatgggcacgccgtgccgccgtcgctggccgtggccgccgggcaggatctcgtctgcccccagtgcggcgcgcactttttcgcgccttccgccgaggaactggccttcaacagccagggcgcctgccacacctgcggcggcacgggcgtggtatacgcggttgaccgcgcgacgctggtgccggatgcgggtctgaccatcgacgagggagccgtcgcgccctggaactcgctgatgtggtcgctgatgaccgacgtgtgccgcgccatgggcgtgcgcacggacgtgccctttcgcgatttgacggacgcggaaaaagccatcgtgtacgacggtccggcggaaaagaagcacattttgtatcgggccaaaaattccgacgtgccctcggaactggattttacctattacagcgccgtgcgcacggtggaaaacgcgctctccaaggtgaaggacgacaagggcatgaagcgcgtggaaaaatttttgaagcaggacgcctgccccgattgcggcggcacgcgcctgtgcgcggcggcgcgcgcgccgcggcttgccggcctgtcgctggatgaagcctgcgatctgccgcttggcgcactggttgaatgggtgcgcgccgtgccggataccctgccggaggaaatgcgccccatggcggggagcatctgcgaatcctttctcgcggccgccgcgcggctgctcgatctgggtctgggctatctggcgctctcgcgcgcgtcctccacgctctccacgggcgagcggcagcgcatgcagctggcccgcgccgtgcgcaaccgcaccaccggcgtgctctatgtgctggatgagccctccatcggcctgcacccctacaacatcgtcgggctcacgggcgtgatgcgcgatttggtggcggacggcaattcggtggtgctggtagaccacgacgcgcagatcctctcccaagcggactggatcatcgagatggggccgggcgcgggcgcggaaggcggctgcgtgatcgcccagggcacggttgacgcgctgcggcgggacgcgaactcccgcatcgggccgtttctcgccggttcgcccgcgcccttgcgcgcacgggcgcaggcggaggacatgtttgcccagggacgcgtgcgcctggcgacgggcgcgattcacacggtgcagccgctaaacgtggagattcccaagggacgcctcacggtggtgaccggggtttccggcagcggcaaaaccacgctgattttggaaagcctggtacctgccctgcgcgctgccatcgcgggcacgcctttgccagggcacgtgcgcgccatcgagcgcggcggcatcgggcaggtgaaactgatcgacgcaacgcccatcggcgtcaacgtgcgctcgaccgtcgccacctacgcggacgtgcacgacgcgctgcgcaaggtgtttgccgccaccaaaggcgcgaaagcgctgggctacaaggcgggagacttttcctacaacaccggcaaactgcgctgccccgtgtgcgatggcacgggggaaatcagcctggacgtgcaatttttgcccgacgtggatattccctgtcccgagtgccgcggcgcgcgctacgccaaggacgcgaaccgggtgctctatcgcaaccgcgcggggcgggaatattcgctgccggatttgatggccatggatgtgcgcacggcgcttgacgcctgcaaggatttgtcgctcgtgtattcgcggctgaaagtgctggaagagctgggcctgggctacctcacgctgggcgaggaaacgcccagcctgtccggcggcgaagcacagcggctgaagctggccagcgaaatgggccgcgcgcaggacgattcgctcttcgtattcgatgagccgaccatcggcctacacccgctggacgtgcaaacgctgctgggcgtgttccaaactttgctcagccacggcgcgaccgtggtcgtcatcgagcacgacctggatgtgatccgcaacgcggattatgtgatcgatatggggccgggcggcggcgaggaaggcggccgcgtggtggcttccggcacgccagaggacatctgccgcgccgctgaaagccgcaccgggcggtttttgtagggcgcattgcgcgcaaaatccattcctccgccagctttgctgccggaggaatggacaaaccggcgtcgcggacgcttttacgctcgcttcacgggaatccaaatttcgccaaagccgttttcgtggcgggccaagccataatacatttcaaagaaaacgccctctaccgcctcatagcccgaggtggggaaccattcctgccagatgcgtttccacatgggttgcatatcgcaatccggcacgtcaaacaccgcccaggtagcggcgggcacatccagcacgctaaagcgcggcggcacggcgattccctggggcaaaaactggcagagcatgtacttatgcccttcctcggtgtggtcgtacagggccgaaagcgtgtaattgtcggcaaagcggccgagcagcgcgttgatggcgtccggcacccgttcttcgtcgcagcgccggaagaattccggcacctggacaaacgcctcttcctggttggtgctgatggtggtagcgaggccaaatacccgaaaggcttcccgctggagaatgcgatagttcatttctttatccccctgaatggtgatgtggaagcgcatccgcggataggctttgagcggaacgcccgcctcgcgcgcggccagcggcatcgcgccatgcagctttttgaaagcccggctgaacgcttcgggcgattcatagccgtatttcagcgccacgtcgatcaccttgcatttgccgccgcgcagttcaaaggcagccagcgtcaagcgccggcaccggatgtattccgcgagcggcacgccggtgagataggaaaacatgcgctgaaaatggtaggtggagcagcaggcgagccgcgcggcctggtcataggaaatctcgtccgccaaatgcgcctcgatgtagtccatggccgcgttcatatgatctagccaatccatgggatgtccctcctttcaccggtattctaccacggtttgcccggccatgccttgcattttctgcccgattgggtcaggccagggaggcgtcaggcgtgctccttggcgctgatttcctccacgtccaggcggaaaacggccacgctttcaacggcctgcgtggaaaacgcccaatcctcgcggcccgtgttgtgccgcatgatgcagcgcagggccgccacttttgcggcttcctcccgcacgaactcgaccctgccagaaccgatgacgctttgaaagcgcgcggaatgggcgcaggcggtgtccgcggggttcagttggtaatgggtgtccagttcaaagcccgcgcagtgcgttttttcgatcaaatcgatcttccgcccctcggacgcgctgtggaagaagaacgtccgctggccgtcctcttcctgataaccaaaattcaggggcacgatatagattttgccgccatcggcaaagcccaggcggcaacagtggcaggcggcgatgatctcgcggattttcgcgggatcggaaacttctctatctcggcggcgcatggcgacgctcctttcttgcgctggattcagcgggttttggcggccagaacagcagggcggcggtcagcagggcgaaaaggatatccgcgattcggatggcgtcgaacagcacgagcgcgcacagcggaatccctgcgaggatccccacgcgcagaaggaaagcgatagggcccttcccccgcgcataccaggcgaaaaagccgaaaagcggggacaggcacgcgcaaacggcccatccggtgacaaaggtcatggaataggggcgttgcagcgcttcggcagtggcgtagtacgctacgaccatgggcaggagaaaggcaaaaacgttgacgcccgcgcgaaggggcgtgccgctgccaacggatagcgcggtgcacaaaaaaatccacacggacatctgggaaaaaacatcccccagcacgggcgaatcccgatccagaaactggataacgacgccggtcagcaatcccgcggcggcgagcaacgcggtgcgggcgcaggccgcgcgcagggaaattttgcgccctggcgcgcggacggaggcgaaaaacgcgcccctcacgcctgccactccgcggccaggatgccgtaccagcacatgtcgccaatgcccgcgttgcaccaggcggattggcgcagcgtgccttcatagcgcatgccgcacttgcgcatcacgccgccggaatgcgggttgcgggcgtcgtgcttggcgtcgacgcgcagcacgcccacctccgcgaacaaaaagcggagcacctcgcgcagcgcttcgctggtgacgcccatgtgccaccagcggcggccaatgcaatagccgatgtgcgccctttgcgcgcgctcgtcgcaatcgaccacgctgatgctgccgatgggctgattcgtttccttccatacgatggcccattgataataatcgtcctgcgcgtagtgcgcggcccagtcctccagcaccatgcgcgaaaccgccgggctagcgtgcgtgggccaggtcaaaaaccgggtgacttcgccgtcgctggcccagttttcgtacatggcctgtgcgtcctccgggcaaaagcggcgcagaatcagtcggtcggtttctaagcgttgggttccccgatgttgcatggaaatgtctccttttgcctttgaaactttcagaataggcccgcggcgagagccgccgtttgcgggcctatccgcgtaccgccattatagcatggcgcgccttcgccgtcaacgatgaaaagcgcgccttccatagcggccctccatagttcctcgaggaaaagggattcttgtgcctgggcgcacgtcccagccaaagcgcataccagcgccaccattcccgccacgcattttcgccacgccatatccatccttgcctcctccgattgtcgccagctttacgcgccatgtaaccactcgtgtaactgtgtaacgcccaagccaatagcataatcgaacaaatgaaaaaaccggcatttcttgcgtgaaatgtcggttttcgagcgtgaaatgtattctgcctggccgcgctaaaacgtatagcgaatgtacagcttgcgcaagcccactttgctctttagcaggagcgaggggttttcctgctgcgtcaggcgctgaaggcaattggcaaaattccgctcgaaatccgcctgcttaacaggcttcaccaaatagcccgcggctttcacttcaaacgcttccaccacgtattcccgcgacacgctcaaaaaaagaatttccgccgcatccccgcgctcccgaattttgcgggcgatatccaggccgttcatgtgcgccattaccacatccaaaagatacaaatcgtatccgccgcgcttgcgaagcgcctccaaaagatcgtaagcgttttcaaacgtctcgatatgcaagggatattccggatgttcccgagagaaagcgtcggcataccggcgaatcattcggatgtcttcgggggtatcgtcgcaaatgcagcagcgaatcagcaatgaaaatcctccttctcaccgaaaactggcgcttcccgcgcatccctatgtagactcacctttcatcttacaagacagacgtgaaaaaaccagcgatttctgcgtgaaatgctggttttttcgcgtgaaatgttttccaggccacgcaagcggcgccatctcgctctattgctccggataagcccaaatttccgcgagcgccgcggcggggatcacaaactccggcatacccatgctgcccggcgcgacctcgtactcatcgaacacaatcaccagcgcgccttccgcgttgagataaaaattttgatctggcgtgatggcctgaaagcattcctcctctgcctagatgccgccgggaatgaaataatccgcctcgcctgcctgcacctgctcgcgcatctggcgcaaaatttcctcgctaatcgcctgcacataatcgctgtctggcaagaataaatcatccagggaaagaatctcccccgtctttttctccagcgtgaaacagcggctgaattggccggagccgccggcgttgagcgtcgcgtcaaagcgaacggaaagcaggctctcgtcatcccgaaggatttgataggacgattccagcgcgacatacccattgtatttccgcatcgcgtaccacaaaagttctccgcgcatctcttccaaatattccgccatttggcggttcatttcctccgccccgccgggtgcgggcgcctgcgccgcggaggaaacgcttacccacgcgcctgcgccattgtcttccaccacgggcatctgcgcggaaaacgccgtatcgccccaagccagcgcggcaacatccggcgatagcgccgctccacgagcgcgccgcaaaccagcgcgaaggccagaaacaccattccttcccacaaaaacttttctccctctgggaacatcgccgcacctccctcgtgccagcagccgccaaacccgctcattgcgtttattatagcccatcttcccccgcgttgcaatacgcaaaatgctcccttcccaaaccgcacgcggtgggaagtgggtttgcgcatttccaaatccgtctttcgcagtattttacgcatccgcgcacgcgcgccgattgacgaaaagggcgtttttgtggtaatataaagagacgaaacgaatcagggggcggatttatgtccggacataacaaatggtcaaccatcaagcataagaaagaaaagaccgacgcgcagcgcggcaagatcttcaccaagattggccgcgaaatcgccatcgccgtgcgcgagggcgggcccgacccgtcgaccaacggcaaattgcgcgacgtggtcgccaaagccaaggccgcgaacatgcccaacgataacatcaatcgttccatcaaaaaggcggcgggcgaaggcgaaggcgcaaactataaagagattacgtatgaagggtatgccccgggcggcgtggccgtgatcgtggaagtcgtgacggataacctcaaccgcacggccagcgaggtgcgccatatctttgataagaacggcggctccatgggcgccacgggctgcgtggcctggatgttcgagcgcaagggcgtgatcgagctggacaattccaagggcctggatgaggacgaactgatgatgctggcgctggacgcgggcgcggcggacgtggaagtgggcgatggcatggccatcctgtacacggatcccaacgacttttcgcaggtgcgcgagaacctcgaaaaggcgggctgcacgttcctggaggccgagcgcgccatggtgcccaacaatacggtggaagtgagcgatccggaaaccgtcgagaaggtgcgcaagctgctcgattggctggaggattacgacgatacccagaatgtgtatcacaacgccgatctgcccgaggaagacgacgaggacgaataatagaaacgatgtttgcacaagcgagcgcaaattctttgcgcccgcttgtgcgtataataagacttgttgccatggggcttaaggaggatggacatgcgcaaatggttgctgattggcgttgtcgtgtttgtggcgctcgccgcggcgggcgtctattgcaacgcgcgccaaggcgtgtggctagatggcgcgttctatgcgcaaacaagcgaggggacgtttgccgccggcggcgatagaatcgcaatcgaacgcacagagaacggcgcgcgcttcaccggcgaagtggatggcgcagccctcaaggcccagttgacgcaaaccgatgggctggttcgcgtggaaatgggcgaggacgtggtggaggggtatcccgcgaatggcggcctcgtggatagcgaggggctgccgctcgcctggaaccaggggatcacagtttcggtcggtggcgaggagccgcccacgaatccctatgcgctggcggacgcgctgtatggcatgtacgcgggcgcaaccgagccgcgcggcgaatggggcatggtgtggatttacgcgctcctgtactggatgggcctgacggcaatcctctggccggaagagacgcactttttgctttcgcgctgggcgtaccgcaacgcggaactttccgacgcgggcatggccatgcagcgcttgggcggcggcgtggccatggtcgccagcgtcgtggtgctgtttttgccgctattcattcactgaaaccgtgcatatgtcggttatgccgttgaccgctatggcggaaatctcgcattcgcccgccgcgagtgcggtgacgcgcccatttgcgtccaccgtagcgatggcgggatcactgctttcatagcgcacactcgtgtcgtccgcccaggaagggatggcgatggcttccaccgccgccgtttcgcccacccgcagggcgagcgtttgcggctcgatttccacggcggcgggttcgatgggttccagggagatgacttccaccgtgtattccagcgaagcggtggctccatccgccgcgacaagcccctcgatggtcacttgccacacctggttttgctcatagcccgccaaaccagcggcggcgagatcgggccgaaagatgatgcaggccccttcgccgtaagcctcgcggctgatggcgaagtattgcgcctcgatttcactggatggcagggcaaagcggaacaccgcgccgctgttttgctcccttagggtgacggtgggagaactggcttccaaattgtaggcttctggttgcagggaaacggaccaaggcatgcccgcgctcatatattccgcggggaacgcgcccgccgaaggccaggccacatggccatagtccgcatcttcgccggagaaatccatcacgtgcatcaccacgtagctgatgcccgaggcggaattggccagcccaaagccggtgtattgcagccgcggggacaaaatccagcggcggtggcccagcgtgggcaggttgtagtccgcttcatcgagcataaagtgctccaggcccgtgagcagcacatcgtccgtaaaccagttgaaagaggcgatgttgctggaagaggcggcggcatagccggtttcgtacagcgcgagcggcatgccttccggccggctgggcgtgtgcgaaagctcgtttgccgcggcgagcagcagcgcggcggcctgggaacgggcggtcgcttcctcgctcagcgccaggtcgtagggcaaatatgcgaggtatcgaataaatttaacattgttcaacgcctgttccagcgcctcttcggtgagcgcgcccggcaaaaattgttgcaagtcgggcaacgtttcgtaaggcgtgcgcatgggagtttcgcacaattgcacatacatttttctcacctcttcgcgagaatgcgtttcgcaaaacgcaacttgagaggcaaaaagcagcgctaacgcgcatacaacaaggccgcacaagcgggcggcgccgcaaattttcttcttcatgtagggaatatttcaacggcgaagcaacaaaatcctcttatttgggggcttccaattttcaagtttttctgttaaaatatatactagcctatcatgcgtgcgcctatagccgcgagagcggttttcgcgccgctatgacaatattcacgaattgcggggaggatcatcaatgaaggactattgcaccaagaacattcgcaacatcgctgtcgtgggccacggcggcgagggcaagacgacgctcgtcgaggcgctgctgttcgccaccgggacgatcgaccgccagggccgcgtggaggatggaaccaccaccacggactttgatcccgaagagacccggcgtacgatttcgatttcggccgcgctcgcgccgctggagtggaaggacaccaaggtcaacctgatcgacgtgcctggctacttcgatttcgccggcgagatggtcggcccgctgaccgtggcggaaggcgcgattatcaccgtgggcgctgtgagcggcctgaacgtgggcgcggaaaaggcctgggaaatgtgcgataagaccaagacttcgcgcatgatcgtaatcaaccagatggatcgcgaaaacgccaatttcgataaggcgctggcctccatcacggaaaaatacggttcccacgtggcccccatcgaagtgccgatcatggaaaacggccagttcaccggcgtggtctgcattctggaaaataaggccttcaccggcgaaggaaaaacgctcaaggagatcccgatccccgcaagcgccgcgagcgccgtggaaagcgcgcgcgaagccatcatggaagccgccgctggcgcggacgacgaactgatggaagcctattttgaaaatggcgagctggacgacgagcagatcatgcgcggcctgcgccgcggcattgtggacggcacggtggtgccggtggtgtgctgctcttccatcacccgcgtgggcctggccaagctgctggacaacctcatcgacctgatgccctcgcccgagggccgcgtggccgaaggcaccaatcccaagaccggcgaagccgaagagcgcgtgtgcgccgtggatcagccgttctccgcgcaggtgttcaagaccctggccgacccgttcgtgggcaagctgtcgatcctcaaggtgatgagcggcgagctgacgggcgatacgcagctgtacaacgtcaacgcggaaaagaccgaaaaggccggcacgatttatatcctgcgcggcaaaaagcagaccaccacgcccaagctgatcgcgggtgatatcggcgcgctggccaagctggtgtccgtgaacacgggtcataccctggccgacgcggccaacccgatccagtacgagatgctccacttccccgagccgtgcatttccatggcggtgtacgccaagaagtccggcgaggaagataaggtgttctccggcctcagccgcctgatggaagaagatcccaccatccgcgtggaaaagaacgtggaaacgaccgagagcctgctctccggcctgggcgagatgcacctggaagtgatcaccaagaagctgtccagcaagttcggcgcggagtgcgtgctgcaggatcccaagatcccctaccgcgagaccatccgcaagacgctcgactgcgaaggccgccacaagaagcagaccggcggtcacggccagttcggtcacgtggtgatcgagttctccccgaacgcggacggcagcgacgaagtgcgctttgtggacgccatcgtgggcggcgtggtgccgcgcaacttcatccccgcggtggaaaagggcctgcgcgaaaacgtgcagaagggcgtgctcgccgggtatccgatggtgggcatcaccgcgaaactgcacttcggttcctaccatgcggtcgactcctctgaaatggcgttcaagacggctacccgcctggccttcaaaaagctgatcgacgccagccccgtgctgctcgagccgatctaccacgtggaagtgctcgtgccggacgagtacatgggcgatatcatcggcgatatgaacaagcgccgcggccgcatcatcggtatggagcaggaaaacggcatgcagaaggtcatcgccgaagtgccgcaatccgaaatgttcaagtacgcgaccgacctgcgctccatgacgcaggcgcgcggctccttcaccatgcagttcgagcgctatgaagaagtgcccgctgccgatgcgaagaagatcatcgaaagcgcgaagcgcgacgacgacgacgaggaataagccttatcccatcggtcgaaaaacggggctgcctcaaaatgattccgggagaatcacgagagggagccccttctccatttgtctaaaaacggcaagtgctcgcccaaaggcgcgatttgctttcaagatttacatttgcggcgttgacgctgaagaaaagctgtgcgataataaagaatagcgttgcgcaggcgagtgaataacggcttgcgtaggcaacccaatgtgcgcccgtagctcagcaggatagagcggccgcctcctaagcggcaggccgtgggttcgaatcccgccgggcgcgccatatcttcgctccctgagcgaaagaaaaaaccgcgcgaaacatcgcgcggttctgatcgttgacaaacctttggtttgtcaacgaggattacccggccgcttgcaaatcaaagatttgcggccagtggccgggacgggaatgcatttttaccgcaaatgcaagcatttgctctgcaaaaaatgccagaaatgacgtgcacgccgtcatttctgatttaagcctcgttcttccgatactttgtcaatgctctgaaccgcgcgaaacatcgcgcggttttcttttgcgcaaaattggcctggcggcaaggggcgaagggcttttgccgcgtccatagtggaaattcattgcttttggccgcaaaatctgctataatttgctagcaaccgcaatggaaaggagcatctgcatggattgcattggagaaatccgcgtgcgcggcggactggccaccctttgcgcgaatggcgtcgagctgatcaccgtgcgcgccaaagacctcaaagcgcatcccgtgcgcgaaggcgaggatctcgacgcggaagaatacgccgcccgcgtcgcgcctggccaactggcggacgcctatgaagcggcgttgtgcatgctcgaccgctccgccaaaaccgcctggcaaattgaaaatagcctccggcaaaagggctttgtgcccgccgtgcgcgaaagcgttaccgagcgcctgcgcgaaaaccgcctgattgacgacgcgctctttgcccgccgcatggtggaagcgggccagcgtgccggcacgggcctcttcgcactcaagcaaaagatgcgcgccaagggcatcgccgaagaagtggccgaagaagccctcaccgccatcggcgaggatagccagctctccgccgcccgcgcgctggcgcaaaagctcgcgccgcgctacgcgggccagccgccgcgccaggcccggggaaagctctcccaggccctcgcgcgcaagggcttttcctgggatgtcatcgccagcgccctggaatgcctgccggaggatgccggcgagtttgaggaatagcgcgcgctcattccatctcttcgctcaacttttgcgcgcccttgcccacaaaggcataagagcaggggctggagagcacgcgcttcatgatcgcgttggtttcctcgcgcgtgaccgcctcgatcttgcggagcacgtcgtcctcagtctgcgcgtcgcccagcaacagcttgcggcggcccagcgcgttcatgcggttggacgtggattcctggcccagcacatagctcgcctttagctgcgccagcgactggcggaattcctgctcgctcagcccgttttccgccatggtgcgcacttcctcgcgaatgaggcgcaccacttctcgcgcgctttccggattggtgcccgcataaaccgtcagcatgccgcaatccgtgtaggaattcggatagctatacacggaataggccaggccgcgctcttcgcggatggattggaacaggtgcgagctcatggccccgcccagcacggaattgaaaatcgccgtgggatacagttcatcgctgcccatggacgccatgggataacccaggcacaaatgcagctgctccgtgtccttttcgcggaacagggccgttggcgcgacggaatgcgtggcaaaatcgccgcgtccctcgcccaccgcctggaagccgcccagatgtccggcggccagcgtcttcacctgctcccaatcgtaattgcccgccagcgccagcacggtgcccttgggccggtacaggcggtgataatagcgcagaatggaatcgcgcgtgaacgcgcgcaccgtttcttcactgcccaggatcggcctggccagcggctgatcgccatattgcgcgagcattatcagctcgtgcacggcgtcctcgggcgtatcctcggccatggcgatttcctcaagcaccacgcccttttcgcgctcgatatcggcttcgtccaggcgcgaatgcagaaagatgtccgccagaatgtccattgctagcggcagatcctggtccaccgtcttggcgtaaaagcaggtgcattccttgctggtgaaggcgttcagcgcgccgccgaccgcgtccatttcctcggcgatgtcgcgcgcgctgcgccgctgggtgcccttgaacagcatgtgctcaatgaaatggctcacgccgttttccgccggctgttcatattgtgaaccgctcgccacccacaggcctatggataccgaacgaaagtgcggaatgcgctcgccaatgatcgtaaccccattgtccaacataaattgatcgaacatactacctcctaaaaaggcaaaacttacacgcgcgatggtccgcctgcctgcgaattcccatgcgaattggtttctcccgaactgaccgaaaggggctgtgaaaaaacagcaaaagttctttcacagccccttttcctgcgcagattaatccctgcggcgcgagcggccgccctcccggccgccttccctgcgcgggggacggcgcacgggcatggcctcgttgtcgtacacgatgtcgttgcgcaccaggttgatgcggccctggctgtcgatctccgccacgcggcactccagcacgtcgccgatgttgaccacgtcttccaccttttcgacgcgctcgttcgcgagcttcgatatgtgtatcatgccatccttgcccggcgcgtattcaatgaacgcgccgaaagacatgatgcgcaccaccgggccggtgacgatatcgcccacctgcaggtccttggcgatgccctcgatcagagagcgcgccttggcggcggcggcctcgtctggcgtggcgatgtacacgcggccatcgtcctcgatatcgatcttcacgcccgtttcggcgatgatcttgttgatcatcttgccgccggggccaatgacctcgcggatcttgtccggattgatggtgaagcggatgatcttgggcgcgtacttcgacagatgcgggcgcggcgcgggcagcgtctccagcattttgccgaggatgtgcatgcggccgtcatacgcctgggcgagcgcctggcgcaggatcggctcgtcgatgcccttgatcttgatgtccatctggatggcggtgatgcccttatgggtacccgcgaccttaaagtccatatcgcccaggaagtcttccaagccctggatgtccgtgagcactgcgaccttgccggtgttttccacgtccttgatcaggcccatggccacgcctgccaccgggcgcttgatcggcacgcccgcgtccatcagcgccagcgtggagccgcagacggaagcctgcgaagtggagccgttggaggacatgacctcgctcaccaggcgcagcgcgtaggggaactcctcttccgagggaatcatcggctccagcgcgcgctccgccagcgcgccgtggccgatttcgcggcggcccgggctgcgcaggggcttggcttcgcccgtggaatagggcgggaaattgtaatggtgcatatagcgcttggattcctcggggctgatgccgtcgaggatctgcacgtcgcccatggcgcccagggtgacggtggtgagcacctgggtctgcccgcgggtgaacacggcgctgccgtgcggacgcggcaggatgccggtttcgcaccagatggggcgcacctccgtgagcttgcggccatcggggcgcacgccctcgtcgatgatgtggcggcgcatcacttctttttgcaggccatacagcgcgtcgcccacttcggccatgcggccttcgaactgctcggcgaagtgctcttccacttcctgcttcacctgttcttcgcgcgcgttgcgctctgtgcgatcgaaggtttcaaacatccagcgcactttgtccatggcgaattcgcgcaccgcgctcttcacgtcctcgcccggcagatagagcgggaactcgcgcttgggcttgccgatttccgcctggatgccctcgatgaaggccacgatcttcttgatttcttcatgcgcgaagaggatcgccttgagcatcacttcttcggaaacttccttcgcgccggcttccaccatcatcacggcgtccttggtgcccgccacggtgagggccaattcgctggccgcgcgctgttcgtcgttcgggttgacgatgaactcgccatcgatcaggccgatgttgaccgcgccagtggggccggcaaaaggaatatcggaaacgcacagcgcggcggaggagccaatcatggccgggatttccggcgcgttgttggtgtccacggacatagcgaccgccaccacctgcacgtcgttgcgcatgcctttggggaacagggggcgcagcggacggtcgatcaggcggctggtgaggatcgccttttcggaaggccggccttcgcgcttgatgaaaccgccgggaatcttgccgacggaatacagcttctcttcaaaatccacgctcagcgggaaaaagtcgatgccatcgcgcggcttgtccgacgcggtagcggtcacgagcagcaccgtatcgccatagcggacgaaggtagagccattcgcctgctcggcatacttgccgaactccagcacgagcttgcgcccgcccagttccatttcatactgcttgaacatctcgttgtccctcctctggacatctcttctctatctttatttttattgttaccaaaatgatggggcaaaacggttcgcccgccagggcgccagtcttgccaaagggtgcgcatccgccgcgctgtttcaaaagcgcataaaacgaaagtgccgtttcatccgcttttgatacaccgcggcgaaaagccgccgcccggaaattcccgagcgacggccaatttcatctacgggacgccagggcaaccgtcactgccttacttgcgcaggccgagcttggcaatcagctggcgatagctctcgatatccgtcttgcggagataatccagcaagccacggcgctgaccaaccatcagcagcaggccgcgacgggaatggtgatcctttttgtgctccttgagatggtcgttcaaatggttgatacgcgcggtgagcagcgcgatctgcacttccggggaacccgtgtcgcccacatggcggccatactcggcaatgatttcgctcttgttggtaagcataaaatcttctccatccttcctctattcccgcaagcgaggtaaaccggcggagtgttcggcaaaccgcgcaaacggatcttggcaacattgtgccacgcattattgtaccacatgctggcggcattgtaaacgcatgccatggccattttcgtgaatttcttgcgaagtttctccgcccagcgccgacggccggtcacagaagccgcttggctgcctccgtttcgccctgcgatagcagcgcgcgaatgcgcgtggaagaaaccgccgcgccgtcccgctcgacgggcggcaccacaatggcctcgatgccgcgctgggcgcaaaaggattctaccgtttgcgccgtgcccgcgccccgcgcgccgaaagtgttgttatagcccaccacgatcgcccgcggcttgagcgcctcgcacacgcgccgcagaaacgcttccgcctctatggcggcaaattcccgggtaaacctgcgcaccaccacgcaatccacgcccagcttttccagcgcggcgagcttttcttccagcgtcatcaaaggcacgggcgcgcgctgcggacaaagcgccgccagcgggttgcggtcgtacgtatacaccacggctggcacgcccagcgcgcgcgccttctccagcgcgcaatggatcaatgcccggtgcccggcgtgtacgccatcgaacgtgcccatggtcatcacggaagcgcggcccatgaattcccgctcatcttgatacacattcatagccttttttccaggagcatggcccgaaagcgcacgctgccgtcttcctgaaactctcccattccagcaaacgcgtcccccacatacacccgcacgattccttcgcgcgcctgtggcgcttccagcagcgaacgcgcgtacagcggattgccgttttgcacgcggcgcagttcaccttcgcccacgcgcaccaacggaatgtgcccaatggggaaatccaacggcagcagatgggcctccacatcgctcagcgcgtccagcgcgatggcgtcttccgcgcgaaacgcaccggcccgcacgcgcgccaggcgcgacatatatcccccgcaacccagcagcgcgcccaaatcgtgcatcagcgtgcgcacatacacgcccttgccgcaatccacgcgaatctcgtagcggttttcgcccgtgcagcccagcagctccagcgcgtccacgcgcacggggcgcggggcgaccgcgatttcctgccccttgcgcgcgtaagcgtacagcggcttgccatcgcgcttgagcgcggaatacaggggcgggcgctgcaaaatatcgcccgtcaactggggcagcgcggcccggatctccgcctcgcccacgcgcaccggacgctcctccagcaccgtgcccgcggcgtcctgcgtgtccgtcaccttgcccaacgtcacttccgcgatatagcgcttttgcttatcgacgatataatcaaacagccgggtggccttgcccacgcacaggggcaaaacgccttccgcttccggatccagcgtgccgccgtgcccgatcgcggtgccgcgcggcagtatgcgcttcacgcgtcccaccactccggcggaagagatgcccagcggcttgtacacattcaaaaatccgtccagcgcgctcactccatttccgcttccacgtccttcacgacgcgccgcaccgcttcttccagggggcaatccagggttgcgcccgcggcgcgcacgtgcccgccgccgccatagcgctgcgcgagagccgccgcgtccatttgcagcgtgcgaatggaaagctttgtgctttcccgctgcgaaaacagcagcgccacttccacgccctccatgttgatcaaagaatcgatcaggccctcaatatccgcgttttgcgcgcccgcgcgcgccaacatttcccgcgtcacgcagccatacgccacgcggccccgcgcggcaaattgcgccgcggagagcatcgcgcccaacagcaacgtgtgctccttgcgcttcatgcgaaagagcttgcgcgtggtttccgccaaatcaaacatttccaccagatccgccaccgccagcatatcgcgccgcttggtggaagaaaagctgaaattgcccgtgtccgtggaaatggccacgtagaggcacagcgcgatatccgcgtccacctgccagccgccatcgcgcaaaatttcccgcaccagcgtgcccgtcgcgcccagttccggttccacccggcaaacctgcgcatatcccggattcgtgccatggtgatcgatcaccgccgtgtgcgccgccgcctcaaagagcgcgcgcgccgcgcccagccgcccggcgtccgccgcgtccacggccagggcatacgcgctcgcccgcgcgccggcgggaagtacaaacgcctgcgcgcccggcaaaaaggcgtatttttccggaatcgggtcttcgcaaaccaactgcgcctgcctgcccagcgcgtgccacagcgccagcgagctgccaatcgtgtccccatccggggacacgtgtgcaaaaatcgtcaaatcctccgcgtttttcagccaggcgagcacttgctcattggttccgctcatcgccgctggcctccccccgcgcttcatccgccttgagaatcgcctgaatgtgcgcggcgtattccatgttctggtccaattcgaacaaaagttctggcgtgttgcgcaattccacttgccgccccagcgcgcgccggatgtagccgcgcgcgctcttgagcgctttcataaaatccgcgcgcctttcctcttccaggatgctcacgcgcaccttgcaatatttcaaatcccgcgtgacctccgcgctgggaatggaaaacgtgccgccaatgcgcgggtcgttcagctcgccgcgaatgatctggtcgagcgctttccggacttcttcgttgatccggtccaacctatcatatcccataatggcctcctgctctattgctacgaacgaaaaatgaagggacgcgagcgccccttcattttcgttgacaagccttcgatttgtcaaggatcagaaaaacactccgctactttagcgctcaacttcctccatggtgaagcactcgatgacatcgccttccttgatgtcgttaaagcgctccaagccaatgccgcactcaaagttcgcgcccacctcgcgagcgtcgtccttatagcgcttgagggaatcgatcttggcttccgtgatcacgacgttatcgcgcaagagcctggcggtcgcgttgcgctggatcttgccctcggtgacatagcagcccgcaatcgtgcccacgccggaaaccttgaaggtctgccgcacctgcgcgcggccgaggatggtttctttatattgcggcgcgagcaggcccttcatggccttttccacgtcctcaatcgcgttgtaaatcacgcggtagaggcggatatccacgttttcgcgctcggcaatgtcgcgcacggcattgtcgtgccgcacgttgaagccgatgatgatcgcgttcgacgcgctggcgagcattacgtccgtttcggtgatggcgcccacgccgccatggatggcgcgcacgcgcacttcgtcgttggagagcttttccagcgattgcttcacggcttccacagagccctgcacatcggccttgatgatgaggttgagctccttggtttgccccgcggaaatctgcgagaacaaatcgtccagcgacgccttggagctgttcttgatcaacgccgcgcgcagcttatccttgcgctcctcagccacctggcgggagagcctgtcgtcgttcaccgcgctgaaggtgtcgcccgcgctgggcacatcgttgaagccgatgacctccaccggttcggacgggcccgccgctttcacgcgctcgccgcggtcgttgaccatggcgcgcacgcggccataagccgtgccagccacgatggtatcgccgatcttgagcgtgccgtttttgatgagcaccgtagccactgggccgcggcccttgtcgagctgcgcctcgatgatcgcgccgcgcgccttgcggttgggattggcgcgcaggttctgcatctccgccaccagcagaatcatttccagcagggtatccacgccttcgcccgtgatcgcggagaccggcaccatgatggtatcgccgccccattcttccgccaccaggccatattcggtgagttcctgcttgatgcggtcggcattggcggtgttcttatcgatcttgttgatggccacaatcgtgggcacgtttgccgccttggcgtggttgatggcctcgatggtctgcggcatcacgccgtcgtccgccgccaccacgagaatcgcgatatccgtcacctgggcgccgcgcgcgcgcatggccgtgaacgcctcgtgacccggcgtgtccaagaacgtgatggtttcgccattgatggtcaccgtgtacgcgccgatgtgctgcgtgatgccgcccgcttcgcccgcggtcacgtgggctttgcggatgtagtccagcagcgaagtcttgccgtggtccacgtggcccatgatcgtcaccaccgggggccgcttcaccaggctggcctcgtcgtcctcggtgtcctcggcctccagcgcttcctcggcggtttccgcgagcttgagctccagttccacatcgaactcgctgcacacgagctgcgccgtatcgtaatccagctcgttgttgatggaggcgatgatgcccaacagcagcagctttttgatgatctcgctcacgggcttgccaatgcgctcggacaaatccttcaccgtgatcgtttcggcggtcatatacgccttatcgatcttcaccggttccaccttgcgcacttcctgctgcggctgcttctttttgcgcttgccgccgcgcacgacctcgtcgtcctcatagccgccgcgcgtgcgcacgccgcggctcttggtgcgctcgggatcgttctggcgaacgtattgctttttgttgggatcgtagttggagacgcgctccttctccaccgtgggcgtgagatccagcttgccgccgcggcccatgccgccgcggttgccctggggccgggaacccgccgccgcgccctggggacgcgcgccgccgccctgaggacggttgaacccgccgccctgctggcctgccggacgttgctgccccgccgggcggccatattgcccttgctggcccgtcgggcgctgctgccccgccggacg

SEQ ID NO: 357 - DNA, 10231 bp, Unknown
  16S sequences of unknown bacteria
gcggggggagagaggacctttctcgaaaggtcctttctccccccgcatactagcgattaatacgctacgccctgccacttcatagcgtcggcgatcttgaggaagcctgctatgttggcgccggcgacgaggttgagtttgccgtcgggggtcttgcagtcgtagtcttttgcggctgcggctgcgttcttgtagatgttcttcatgatgtcgtggagttttgcgtcaacttcttcgaaggtccaggagaggcggatgctgttctgggtcatttcgagaccggaggttgcgactccgccggcgtttgcggctttggcgggggcgaagaggacgccgttctgctggaagatttctactgcttcgggggtggagggcatgtttgcgccttcggctacggctttgacgccgtttgcgacgagtgcctttgcgccttcagcgtcgagttcgttctgggttgcgcaggggagggcgatgtcgcatttgacggtccagatgcctttgcagccttcgtggtattcggagccggggacgcgagcggcgtattctttgattctgcctctttcgacttccttgatctgctttacgactgcgaggtcgatgccgtttttgtcgactatgtagccgttggagtcggacattgctatgaccttcgcgccgaaggaggtggctttttcgttcgcgtagattgctacgttgccggagccggagactactacggtctggccttcgaaggacattccgttgtcggcgagcatttctttggtgaagtagcagaggccgtagccggttgcttcggtgcgtgcgagggagccgccgtaggagagacccttaccggtgaggacgccggtgaattcgttgcggagtctcttgtactgaccgaagaggaagccgatttcgcgtgctccgacgccgatgtcgcctgcggggacgtcggtgtcagcgccgatgtgctttgagagttcggtcatgaaggactggcagaagcgcatgatttctccgtcgctcttgcccttcgggtcgaagtcggagccgcctttaccgccgcccatcgggagggaggtgagggagttcttgaagcactgctcgaagccgaggaattttataaccgatgcgttgaccgacgggtggagtctgagaccgcccttgtaaggaccgatcgcggagttgaactggactcggaagccgcggttgacctggactttgcccttgtcgtcgacccaggagactctgaactggatgaagcgctcgggctcgactatacggtcgaagatgcctgcctcgatgaggtcgggacgcttgtcggcgaccggctcgagggactcgaggacttcgcgtacagcctgctggaattcgggctcgttcgggtttctcttgcagacggtctcatagaccgaggcaaggtattcgttcttgaaattcattttgctttccccttttttgtttgtacctctccgtttcgggagggggtgtattcttttatcacacgaggatgaacccaccgggtctgtaccctttcgcgtggtaattcacgataagaacattatactatatttctgtctgttttgcaagaggagaaaccaaattattcatgggtaaaaatgtaaaaatttttttatcgtaatatttcgtccggagcgtctgagagactcatttttccccggtgatcaaaatatattttataaaagcgaaaaacaggctccggaacgggggacagaataatgccggcgaaagaaattaccgtgaaatcgtttgtacagagaaaaatatgctctgtatgcaatataacagagagaaaactccggtttttccgcgacggggcggtgctgaccgcgacggggcttttcatgcgggcggtcggggtcgcgtattcggcgtttctttcgtcgaggctcggggcggacgggctggggctctggacgcttattacgtcggtctgctccttcgcgctgacattggcgtcttcggggctcggtcttgcagcgacgaggctttcggcttccgcggggactccggagagggtcaggcgggcgctcaggggatgcttcgcggcggcgctcgtctcgggcgggatatcggcggcggggcttttcttcggggcggggttcatttcggagagagtgctcggggatatgagatgcgctcttcctttgcggctcgcggggctcgggatgccgttcgcggcgatgtcgggggtgcttcacgggtatttttcggcggtcagacgctcgcctgtcagcgcgggggtgcagattttcgagcagttgtccggaatcggggcgactgtgcttctgctcggggcttccgggcgggatatcgggagcgcgtgcgcttctctcgtcgcggggagcgtcatttccggcgcggcgtccttcctcgcggcgcttgtcgtttatcttgccctgagacggcgggatatcgcgtcgctctgcgctcagggggacaggaaaagcgccgggaatccgaagagtccggcgcgtgagatattgtcgattgtcctcccggtctccgcggcggcgtgcctgcgctcggcgctgtcgtcggttgagcatatacttatcccgcgcgggcttaagaagaacccgctgaccgccgcgacggcgctcgcgtcctacggcgtgctctgcgggatggcgcttccggtcgtgatgcttccggcagcgtttctttactcgttcacggggcttctggtgccggagtacgcgctcgccgaggcgcggaaggacgagagggggatatctcggataagctcgagggcgatatccctcgcggtgttctactcggtcggcgcggcggggtttctgtggctgttcgcgggcgagctcgggagctttctctataacagtaccgacgccgggatattcatccgtgttctcgcgccgcttgtgccggtgatgtacctcgaccacacggtcgacgcgatgctcaagggtctcggggaacagctcttctgcatgaaggtcaacatcctcgacgccgcgatgagcgtcgtgatggtcgctgtcctctgcgagcggatagggatatggggatacgtcgtgacgatatgggcgaccgaggtcgtcaacgcgtctctcagcgtgtggaaacttgtcagacgcgcctcgccgagggtatcgctgtcgatagctccgaggctcatcctgtcgctttccgccggggtcgccgtcgtctcgttcatgggcggggagggaattgtcagcttcatcctgcgcgccatggtctatgtgatgaccttcgcgctcgtctcgcttattaccttgccgcggaagacaaggtgagacggattatcgtctcgtcgagcgacgctgtcccgtcgaaataaccagcgcagatttcctttatcgtctgccactgtttgtcgggcatcggcttcccggcgtcctcgatcattttcgcgtagcggcggaagacgctctcaggtatcggcgaccgctcgccccagccgagctcggctgcgcgttcgtcgtccgtccatatattgaacaatatctcgtccccgttctgatagaagcagaacagcgactcgttgtccgtgaagttcttctcggacgcgcttttcagcgtgtatcctgttcttgtgccgataagcaggaagacgtatatccagtattcgtcgtgatgctcgaaacggtaatccggaaccgtgtcgaggtaggttttgagaaattcccacgccgcgcgcttgttcttcgcgccgtccggaattgcgcagaagtcggacggataaacggcaacgccgctcgacacgccgtccgcggggagaccgtacatttttactcctgagccgaagccggtttttcctggatcgtcgtttgagccgtatttgttcgtttcttctctaagtatattgactatcgacgcgcgctcgattccggcgcggatcgtctcgttcttcgccgtctcgagtatttcccggaattccggcgtatcgaagtcgccgccggggatgccggcggaaattatcagcgcgcggagcagattctcggggctcatgacgtatactatttcgtcgtccgaatctctcattatgtcgagaaactcatcggcggtgaacctctccggaagccccgcggacttcgccgcgagaagaccatagggggtgtaatgcgccgggagcgcggggagctttccgtcgatctcggaattcttgagaaggctacggtagaacgagccgcgcgcgaccgtgtcgtcgctgtcgatgaagtcgtacaggtcgcagaggggaaggttgtttatcagctcttcgctctcttcatctgagcagatgattatgtccggcgggtcgtcatagtcgagcggcgcggcgtcctcgctgtccgtgtcctcgaggactacgcggtatctttcgttcgattcgttgaaggcgactatcgcgtctcctaaaatcggggagaactgccctcgcaaacgcagtatctcgcggcgcggggtcagctcgtcgggaatcctcgtcatgcggaagacgcggtcgtagcagacggcgtagaagacgtcgtcgccgtcggtgacgatgcagttgccgacataatatgtgtttatcccggacgtcaggtagtcgcagaaatcgtccggaccagagcctctgatgaactgactgttctcatcctcgggaaagacattatcggtctcgccgacagatatgagcgacaggtcgtcgccgtacagcgcgacgcgcatatcgtctctgataaacccgtataattcaaagccctcgtcgagcacgataaccgatttcggtatgaaattgtccggcagctcgatttcttccttatagaacatattgtgcgcccgctcgccggacgagcaggagaacaggaacgccgcggacagtatcagcagaattatcggaagcttgcgcaaaatgctctctttcattaaaatcagttcctttcggagatataagtcgacacgcgggactgtattacctttacagtctcgtcgaggtctttcgccccggcgaagtagatttcggcttcctcggagattatcgaccagagcttcgagttttcggagacgcttttcccggcgccgtcaaggagttttattatctgctccgcgtcgctctcgtcgagacggacaaccacgccttttgtcgtgtcgaaggtgtcgggcgtgtatttttccggcggtacgcttctttcggtgccgtcataggctatatacttgacgtatgaggtgtcgcggacaaagtcaaccgccgaccttatctgcgttttcgtaaatccgaggtttccgaccggatttctgccgttttcggtgacagtcatcgagatgaagcgccacgcggcgtccttcacgtcggactttctgcttatcgtgaatatctgcccgccgttcagtctcacgccgtttccgccgcttgacgggaagccgacaaggcgcttcttggttccccgcgcttcgtcacacttctgattccgccagagatcgacgccgtccattatcctgtaattcagcgcgctcccgcttgccgacatccggcaatccttcgcgaaggtcagcgcgtcgcggaaaaggccgcggtcaaagtcgcagacggcgttctcctcgtcgacaaactcgtccatcgagcaggtcagcatataccagaggagctttttccggtcggtgtactttgagttcattaccgaaccgtcgtgactgttcccccagtcgatgaattcgcgcagagtccagccgtccggcacgctgtcgtcacttgtcgagaacagctcgaacgccacccacgtcggaagctcgtacagaaccccgttcgtctcgccgagacgcagaacgccggacagcaggtcgttcttgtcgaaattctcgtcactttcgaggtatggtccgaggtcggtgaacatcccctgccgcacatattcctcgcggtatttctctgagtacgggtcgctcccgaaaatgacgatatccggtattctaccggcgatgatctcgtttttcatgacgtcggcggatatctcgttccagacgctgtagtcggtcaggactacgcggtaatctttgttcgcgcggttgaattcgaccgccttttccgcgaggaattccgggatgccgattccggcgacgctgatgacggcgcgcaccgccatctccctgcctgcgaccgcggtcatcatgtacagcccgccgtcatacgcggcgaggaaatgatcgtcgtcgatgaactcgaggtcgcttatcctgccgtacgacatatccgagttcagaaagtcgcatatgtactcgtatttctcaccctcgcaggcgtagattccggtcgaacacctgacatagtaccgcccgccgctcccggcgtaaatcttgatgttccacgcggagaggtcttcgggaattgagaatttgccggatattttcccgctcgcggggtcgatgaagctgactattccgtcacgacttccgctgcggttgaagagcatgaatctgccgtccggcgagaggtcgtatgattcggcggcgccgctcgtcggcacgtctccgatgagctcgaggtctgatgaaacgaccatcgccttgaactgcccgacgaacaggatgtttccgtcagagtccgccgcgacgggggatgtctcggtatacccggcgaaggtgtcgtcgaccattccgggcttcgttattccggtgtacggtacggtgagcggtttgttcccggagcgcacgatatccgcgccctcggcgtacactatgtcgccgtccggaaggaacgctgcgttagaggtcgtaatttcgccgctgtctgtcacgttcatttcgccgtcgagcctgacaaaccgccggacgccgtcttcgtcccgcgttgagacaacagcgaagccgtccgccgcgcggatgaccgtgtccgccgcgaagccgtcgggaagagctatctgttccgaagagtaaacccccgtcagtatctctccgctcccgcaggacgaaagggaagatatcgtgataaaaatgaccgccgcgagcaggatggaaataatacgcctcataccggcaccgcctttccttttatgattatagtataacatattacaggcggcttgtcaatatttacgcacaaaaaaataccgcgcggacacgcatttttgttttgtcgcgcggtattgtttcacaggcgtttcagtattatctctttcgcgtcagagagggcggattttatcttctccggctctccggagtttttcgcgtagtttatgttctctatgaccggcgttatttccgaaagggcggggagctccattctctcgcggatttttctctcgagctcgcgcggagtgtcggagggcttcagctccgggatcatgcctctgatcaggtttgtcattacccggtaggaatagttcagcttttcctcgtcgctcttcatcattcgcaggttcagctcgtattcgcggacagtcaggcgctccgggatgacctcggcgcgctcccggcgcctcgacgcggcggtcattgtgctgactaccgtgtcggcgtagcttatctgcggcggcggggcgtatctctcgccgccgaggaagaagctgagaaccgcgtcgacaagaccctttatcgcctcaaggatccgtttgaccgcggtgttcccggtcgcgacctcgaagaggattatcaggattatcaccgcgacggcgaagaccatgtttatggcgtcgcccgccgaggtctgccgcagcaggttctggtactcaccctctccgtcagttcccgcgaaatggtgccttgtcgatgagcttgagccgcggagaatcgacagcagaaccgtgaagaagatgtatttgaggagagtgtacatcccggagaggaacatgtacgcgagcaccccggcgatcagcgtcaggaacagcccggcgagtatcatccgcatattcgcgagccgcgcgcggttgttgatctttgtcaccgcggcgccgtcgaaggagcgggtgacacaggtctggttcaggatgaccaccccgcacgccgcctgtacgcagaagcagatagtcgccatcccgcccgcctgaaaaacgagcgagagcacacagatgaccatgctcgccgagaaatacacgaagaactgccgcatagagtaaagccggtcgtaagggtagaacatagcgtacatcccgacacacccggcggcgataaacatgacgggcgaccacggcagcagcagagccaccggaatcaccgcgagaccaagcgccgcgagcgtcgggagagagtacctgaaaacaaaatacctcgtcccgccgtcccatgagcgatcaaccttcatccgccatccgagccgtctcagcacgaacccctgaaagaggaacccgaagatatacccggcggcgaccggcggcaggaagaccgtgtaaaatcccgaaatgttgcgcatgagagacactatttcgagcgtgaacatgagtatgccggcgcccgcgatcagcttgcaggcggcgtcgactttgttgtattccggcgcggcttttttcgcggcgcgcttctgttggttatttgtcatgacatatcacccgctttcaggctgtccgaccatgtgcggtagaatatcctcacctcgggcggaatgtcggcgtagacgcgtcccgtcgtcgtgaggtagaatattacgtctatcccgcgcttcgccatctcgcggtgaaacacaagcatccgcccgtcgaagaccgccgtcacgacgacgatgttcccgctctccgcgaatatccccggctcctcgaggatgtagtcgaacagtttctcggtcggcatcgaatagagcatcttaagctccgctaaaacccgcatcgcgtctaaaactccgtatttcccggagaacggcggggtcacgagtatcttcttcccggtctcgtcctcgcccgccgtgaagtcggagtggatagtttccggcggggtgttcgcgatgagccgcaccgggacgttctcggcggcgaaacgcccgatcagggtcgccgcgacggttatgttgtactcgatgaactccggcgcgccgggaatttccgggtcgggctcgatcatgtgcgagcacatattgacgatgatattagcctgtaatttctgcaccttttcctcgacattgacgaggagcctcccgtgcgcggcggtcgacttccagtttatcctccgcatcgggtcgcccggcgtgtagtcgcggactcccgcgcgcaggagcgggtcggagagcagactcttctcgacgacgacgtcgcccgaaaaataccggctcgacgtgaactcccgctcgaggtcgaccggagcggggagaacggtcaccgacgcgctctttccggtcggcgggtcgatctgctttgagaccgggttgaacccgatgaggtcgttcgagacgacgagcgcgccgccgagcgtgtagacgccgcgcttcatgcaggttatccgccagcgtctcgttatcctctggtgccccttcacgacgaacatgctgtcgactgtgggcgtgaatctgtccatgacgacgcgcccttttctatcctgcgcgccggagatctcggtcaggcggaagacgaggccgtccggcagggtcgaggtcgccttgagatagggtatcgggagccccttgtcgttcgttatctcttcatataaatatatatcgtccccgaccgtgacctcggtctcgtcgagcttctctgtgaaggtcagatcgtcgaagacgtgccgtctgaatatcctcatctgtacgaaatacgcggcgatgaggacgagagccgccgctatgaacgccgtcatgtcagtctatcggcgcggcgaccgaatcgaggatgtatccgatcaccttctcggcggagtcggtgagcctcagggcgctctgggagcgcgttattatcctgtgcgcgaggacagagggcgccgccgccttgacgtcgtccgggagaacgttatcccgcccgtcgagcgccgcgagcgcctgcgagacgtgcatcagcgcaagggaagctctcggcgagacgccgaggcgcacccggtcgctcgtcctcgtcgcctcggctatgcggacgatgtaatcgcttatcttttcgctgacgaaaatctgtctcgcctcagctttcgcctttcttatgtcgtcggtcgtgcataccggcttcagcgtcccgagcgggcttgccgccatgtggtccgagagtatccgcttttcgctctcccggtcgggatatccgagcgacaggcgcatcatgaagcggtcgatctgcgcctccgggagcgggaaggttccctgcgactcgatcgggttctcggtcgcgac

SEQ ID NO: 358 - DNA, 19401 bp, Unknown
  16S sequences of unknown bacteria
ttttcttctttccacagtgttgaaatcaggctggccaggggcttcatcaccagggccttgttgggagccgggcagatgttggcgcacaggccgcagcccatgcagtccagaggatcgacctgcatgacaaaggtgtaattctcgcagcccttgccgatcatcttcttgcccttcatggaagcgggagcattcttcatttcttcctcgctcacagcatagggacggatggtggcatgggggcagacgaaggagcactgggtgcactggatgcagttttcaggaatccactcgggaacatccactgcaacgccgcgcttctcataggcggaaacgcccatggggaaggtgccatcggcggccttctcgaaggtggaaacaggcagctggttgcccttctgctcggagatgggaaccagaacgtccttcacaaagtccaccagctcggccttgccctcgtaggtcttttccacgggagcgtccacagcggtcttccaggactcgggcacattgatctcggtgatggaatccacaccggtgtcgatggccttgtagttcatctgaacgatgtcctcgcccttgcggccgtaggtcttcttggcagcttccttcatgtactgaacagcgtcatcgatggggatgatgttggccagcttgaagaaggcggactggaggatggtgttggtacgcttgcccatgccgatctcacgggccttgtcgatggcgtccacgatgtagaacttgatgttgttgttggcgatgtagctcttcatggaagcgggcagatgagcgtccagctcctcaggcttccactggcagttgagcaggaaagtgccgccgggcttgacatcctgaacgatgtcgtacttgtccacataagaggggttgtggcaggcgacgaaatccgcacggctgaccagatagggagagcggatgggagacttgccgaagcgcaggtgggaaacggtcagaccgcctgtcttcttggagtcgtagtcaaagtatgcctgagcatacatatcggtgtggtcaccgatgatcttgatggagttcttgttggcgcccacagtaccgtcgccgcccaggccccagaacttgcaggagatggtgccttcgggggtggtgtcaggagcgttctcaggatccttcagggacagctcagttacatcatcgttgatgccgatggtgaacttgcgcttcatatccttgctgttcatgttgtcatagacagcgaagatgttgctgctgggagtgtccttgctgcccaggccgtaacggccgccgatcacatcgatgttccggccggcctgctgcagagcggccacaacatccagatacagaggctcgcccagagagccaggctccttggtgcggtccagaacggagatggtcttgacgctctcaggcagagcagcggcgaacttctcggccacgaagggacgatacagacgaaccttcagcaggcccaccttctcgccatgagccatcttgtagtcgatgacttcttcgatggtgtcgcacacagagcccatagccacgatgacatgctcggcatcggcagcgccatagtagttgaacagctgatagttggtgccgatcttctcgttgaccttgttcatgtattcctctacgatgccggggatggcttcatagtaggggttgcaagcttcgcgggcctggaagaagatgtcggggttctgagcggtgccccgcagaacgggatgctcaggattgagggcgcgggcacggaattcctgcacagcgtccatatccaccatttccttcaggtcttcgtaatcccactgagccaccttctggatctcgtgagaggtgcggaaaccgtcgaagaaatgcaggaagggaacgcggcccttgatggcggacagatgggcaacagcgcccaggtccatgacttcctgaggattggtgctggccagcatggcaaagccggtctggcggcaagccataacgtcctgatggtcgccgaagatggacagagcgtgggaagccagagcacgggcggagcaatgaatgacgcccggcagcagctcgccggcaatcttgtacatgttggggatcatcagcagcaggccctgggaagcggtgtaggtggtggtcagcgcaccagccgccagggagccgtggacagcgccagcagcgccagcctcggactgcatctcaacgacgcggacttcctgtccgaaaatgttcttctgaccattggcagaccactggtcggccaagtcagccattacggacgagggagtgatggggtaaatcgcagcgacatctgtgaacgcataggacacatgagccgcagcggtgttaccgtccatggatttcatttttctagccatggggatctcctccttcaataatatatgaaagctacctaaataaccgtatctattttagcagattctttcccaagtgtccacaaaaggcgggtaaaaaaataaaaaattcactgaagtgaacagaacaccggaaatagtgaaaaaattttggctccctggggaaaaaccgaaaagctggtggaagaagggggaagcatgggggaaaaaccgaaaaaatagggcgtttgacaccgacggggcgctattgtatcatggatgcagaggaaattggaagctttcggaaagaaagcggggaaggagagaaaaaggatggtatccaaggtcatggccgccggattgcgggggattcagggggtgccggttttgtgcgaatgcgacctggccaacggtctgcccgcttttgagatcgtgggcctgcccgatgcctcggtgaaggaggcccgggatcgggtgcgctcagctgtgaaaaattgcggttttgattttcccctgcggcgcatcactgtcaacctggctcctgccgacctgaaaaaggaagggccggtgtatgatcttcccattctgctggggattctgtgggcatcggggcagatcccggcggtgagcccccggcaggcctttctgggggagctgagcctggacggggcgctgcggccggtgaccggtgtgctgcccatggccctggccttgggagaagagggagtggataccctgtttgtgccccgggagaatggggcggaagcctcggtggcggcgggagtgaaggtcatccccgtgtcccatgtgaaagagctggtagaccatctgcggggagaagcaaagctccagccgctgccgccttatgattatgccgggcggcgggaagaggggccggatttttccgaggtgatgggccaggaaagcgtcaagcgggcgctggaggtggccgccgccggttcccatcatgtgctgctcatcggcccgccgggggctggcaagagcatgctggcccggcgtctgccctccatcctccccgatctttcctatgaagaagccctggagaccactaagatcttttcggtggccgggctgatggagccgggagaacccatggtggtcagccgccctttccgtgcacctcatcacaccgtttcggctgccggtctgtcgggcggcgggaaaaatccccggcccggggagatctctctggctcataacggggtgctttttctggatgagctgccggagttccggcgggatgcattggaggtgctgcgccagcccttggaggatggggtggtcaccatatcccgggtggcgggagcctgttcctatcccagccggtttatgctggtgtgcgccatgaacccctgcaaatgcggctattacggccatccctccggccggtgcacctgttcggaacagtcggtgcgccgttaccggcagaagatctccgggccgctgctggaccggatcgacatccatgtggaagtgccttcggtgggctatgaagagctgcgccaacggaaaccggcagagccttccgccagcatccgggagcgggtcaacaaggcccggcgcatccagcaggagcggtaccagggctcgggcatccattgcaacagccgtctgacccctgggctgatggaccggtattgccggccggaccgggagggagagcagcttttgcgggcggcttttcagaccctgggcctgacggcccgctcctatgaccgggtgctgaaggtggcccgcaccattgccgatctggcggggagcgaacaggtgggggccgagcacattgccgaggccgttcaattccgttccatggacaaagaacgcttttattgaaaaaagctttcataacatcctgtttatacacgggcgaataggctgttgtgggcaacagggtgtaaactgtggacaactctgtggatactgtggacaacttgttgacagcacaagattccttcttttatctccaatctgtggataaggaaaaaagaaggggaaagatgtcgaaaattcaacaaaaagtaatcaaaactttacaagtaagctctttttgtcaagagaaaaagaaaagagagcaaaaaaagcaaagtttgaagggaggaacccatggaagtttactttggtgtggacatcggcacctccagcctgcggtgcggggcctttgacgaagcgggccggcggctgtggatgagccagcaggagctgaacctgtttaccgacacccagggagcggccgagcaggacccggaagaggtttggcaggctttttgtggggctctcagccagtgcgctgcgaagggaaagccccagggcgtggggctcagcgtttatatgcactcccttctggcggtggacgaaagttggaatcccttgactccggttttcacctgggccgatagccgggccgcaggggaagggaagatgctgggcagtctgcctcaggctccttccctttacaaaaagaccggctgccgcttttctcaccccatgagcccggcggccaaaatgctttggctcaagaaccaccggccccaggtgtgggaaaaagccgctcatttggtgacgctgaaggaatttctggtgcaccggctatggggagaaaatgtggtggatctgtccgacgcatcttccatggggctgcttcagatgggccggggagagtgggaggaagagatgctggccctggtgggagcggaaaaagaccgtttgggggcgctgcacccctgtaccagagcgcttccgcctctgccggccttcatggcggaaaagctggggattccggcagataccccctttgtgctgggatccaccgatggcgtgctggccaatgtgggagcgggggtcttttcgcaagaaaggatgaccaccaacatcggtaccagcggcgctttgcgcaccatgctccctgtgccctatgaagacgaggggctgagcctttggtgttatgccttccggccggagatgtgggcggtgggaggctccatcaacaatgggggactggtgctcaaatggctgcgggaccgattccttgtgccactgggtggagatcaggcgggagcttatgccctgtttgaccagtgggccgaaaaagtgccggtgggatgtgagaggctggtgatgtccccggctcttaccggcgagcgttcccccgattggaacagtgccgccaccggtgggatgcatggcctgcgtcccttccacggtatcgagcacatggctcgggccgccatggaaggggtgcttttccggctgtacagtatttaccggctgttgggagagcggggatttgtcccgggagaactggtggccgggggcggctatgcccgctccgcggtatggcttcagatgcaggccgatctctttgattgtcccatccaggtgccccgggaaaccgagtccaccttgctgggagcggcctacttggccatggaaaaccgggggaaagtacagtttggtcagttgctggaggggatggaaccggtgcgccgctatgagccccgaaaggaaaacaggggcccatggcaggaggcttatggccgctaccaggagctataccgccgtttggaacaagggaaaggggaatgatcatggaaagggaacaaacttgtcagggtgggctcatcggcctgggggtgatgggctggaatctggcccagcagttgggggaaaaaggtgtgtgtctggggatctataaccgcaccggccaggtgaccgatgaacgcctgaatggatatgacggagaaaatctgcatcccttttacaccctggaaaagctgtgcagcgctttggagcggcctcggaaaatcattctgatggtcaaggctgggcaggcagtagatgggcttttggaaagccttctgggtttgctggagccaggggatataattatcgacggcggaaattcctatttcaaagacacacagaaccgggcaaagcggtgccgggagaaagggatcgtttttgtaggggccgggatctccggaggcgaggaaggggccagacacggggcggccatcatgccgggatgctctcagcaggtgtggccgctgatcgcacccttgcttcttcctgccgcggctcaagcggagggagagccctgctgcacgcctctggaaggggacggagccggacattttgtgaaaatggtccacaacggcattgaatatgccgatatgcagctgatcgccgaatgtgtttatctgctgcgccaaggggcaggctggacgccggaaaaactggcagcgctgtttgaagaatggaaccagggggaactggaaagctatttggtggagatcaccggtcatatcctttcccagcgggacgaagagacaggtaggcccatggtggatgtgatccggggccgggcgggaaacaaaggcaccggcaaatggaccaccatggaagggctggatctgggtcagccggtgcccaccatcgcccaggccgtttttgcccggtatctttctgcccaggaggaggaacggcagaaggctgcccaggcgctggaagggggaacggcagcctttgtgatgaaagaggaacaggatatggcggagactttgcgccgggctttgtattgtgccaaggtctgtgcctatgcccagggctttgctctgatgagccgggccggacaggaatatggctggaagctgaaactggaccgggtggctgccatgttccggggcgggtgcatcatcagggcccggtttttgaatgaaatccgaaaagcctatgaagagcagccggatctgtccaatctgctgctgcatccggctttttcccggaagatgggagagtatgtcctctctctccgccaggtggtggcctggggtgctctcagcggggtggctctgcccgccttttccagcgccttgagctattatgatggcctgcgggacccggtgggttctgcctccctcatccaggcccagcgggattatttcggcgcccataccttccagcgggtggaccgggatggaatgtttcaccgccagtggttttaacagaaaagaacgccccaggctgcggcctggggcgttcttttgtttggatcagggcacatattgctgctgaatccgggtgactgcgccttgctggacggtgatccagtagggacttgcctggaaataatcctggctttcaaataactgggaaaattgggagaaatcctcacattcccggctttcaaaattgccatccgggtccaggtaagtacaggtcacctggggactcaccgaaacgctttcccattggatttccggattgtggagataaaacccgccaggcatatcttccggagtgatccccgctttcttcatttcctgggtgtcggtatcggtgatccattgggccttgtccaaagagagggaggaagcggcaggatctggctgggacaggaaggccagataccggccgtcttcggcctggacagagggagaagaccgggggctaaagaggaaaaacagacacaaaatcaagatgcctgccgtcagaagagccagaatccaggcagcgggtttgcggaaagaaagcacccggcggatgcgtttttgggggctgacctgtccaaatgcagggggaaatacggcccggcccggcgctgccagtgccagcagggaaaaagaatagtcctttttttcttccgaagaaaacgagcggatggttttttcatcgcaggccatctccatatcctgggcaaagaggaaaaaggcgacccacaccaggggatggaaccaataaatgcaggcggccagatagaataagggtttgaacacatgatccagccgggcgatgtggctcttttcatgggcgatgacaaaaggacgcatggtttccggtgtgtgggccgggagaaggattacaggccggaaaatcccaaagacaaagggcgtgggaatgcgggaggaaacatagatgttgtcacatagcttttggactccttttagccgctttttcagagaaagaagagaaatcagccctttcagaaggaaaaaggtcagcccgatcagccaaagcaagggcagaaggcccagccagtcgaaagatccggctgctggcgctggctgaggagcaccggtgagggctggggacagcggtatcactggtgcagggatggccggaagagggctcgcggcctttggcagagaaaaggggcagagaaggcgaaacagcacacccagccacaaaaggcaggtgagatacttggggaaggggcggagacaaagccgcagcagaagcacaacgcccacggccacagcgatctccagccatccttgactcaggatcagaaagagagttttcatcacggtgttcactccttccattggcgaatcatctgttccagactttcgatttcctcagaactcaattttgtgcgggaagtaaaggcggcgagaaaatgaggcagggaaccgccaaaggtctctttcacaaaatcctggctttgcaaagccagaaagtcctcccggctcatcaggggacgcacctgcccgtcccggttttcgaaaaggccctgctggcacaagcggcgcagcatggtgtaagtggtggattttttccattgaaaagcatcgctgcacagggttaccagttggccggagggcagtggggcatggtcccagatcagctgggccagccgctcttccatcacacccagtttccgttccatgtgatcacctccttggtttaatagttttaaactgtgtcttgagtttaacactattaaaccagaatgtcaagaaaaaacaccccgatttccggagtgattgaaacggttggaagcctatatggtgaaaagaacctgttggcccttcgtttatcaattcgtaaaaaccggcgacctgtgcgccggtttttacacttctcaaggggccagtgtacgccaaaggcgtgcatgcagccccttgcaaaaactcggaaaagtggcctttgccactttttcgttatggctcttcctggcaaaagcggtccagtttcagtaggttttctttcagatcgccgcccaccggcaaggcccgctctcccagctttttgggagtggaggggtagtcccggttgaagcggatcagccgggcgtttggccatagccaggtgaggcgctggaaatagtgacggatcaggccaggggagttgaaacccacacccagctccagaaacagggtggaggagtgttcggcctctttcataaaatcctcaaagggctgtctgttcttcatggtctcccgagggataaagcagtccggtccccgcaggttctgcaccagaggagcgccgcagtgagggcagtgggggatatcctctgtggggcaggagaaggaaacaggatcgatgtcccgggcgatctgccggtaaaaaggttctccgtcccacagggtatcgcagcagggacgggagcactgcaaaagggcgatggaaccttgaggttcaaagacccgctggggatcaaaccccgctttgatgaactggccgtcgatgttgctggtgaggacaaaataatccttgttttggaggatgcggagcagatgggtataggcaggaatcaccgggtagtcaaaccgggcccacagggcttcggcggccagcatggcccatttctgttcctgcgtgcgctccgggtcccacagggctttccaaaaatggtcatacccttttttggccagctggggaaagacctgctccaagatttcatggctcatatagtccattccaccggcagccgagagaccggcggccccgcccactacgattttatccgcctctttgatccagcgggcggcttggcgcagggtgggggtgttgtcctgggaagccaggagagccgcatgatgggcataggcttccattcgctcgcgataagtgctcacggtttttccccctcttcatcagatagtaacaggataccgtttttcccggcaaaaagcaaacaaaaaaacagggcaggatgcttcctgccctgaaaaacaaaaaacgcagcagcctgcagctgccgctatgataaaactgccgaagcagtggatgaccgccggaaaggcccaggctatttctggctcacatagggggtctccccaccgaaaatgaaatcgtccagatcgcccacggaaacggccttgatggcatttgtggtgtttttcatatgctcctcctttcttccttattacaaatacagtatagggaaagtttgtgcatttgcaacaacgaaattgtaaaaaaatcgtaaatgtgcacaggctgcagcggttccatagaccattttatgcagtgagggaacaattagtacgacaaatcgggaaatgggcagttaagataggagaggaaaaacagagatgctctttttcgtcagtgtggacaaaatccccgcttcccaagaattgcgattgacaggggaaggtggggaagatacaatatatagcgggttttaaaaagagaacatacaatttacaggaaacgccgggctcttgggggctgcggcaggaggagagaaaagagcatgaatattacggaaaacgccaaaacggtgttggaaaagcgctatttgatccgggatgcccagggcaaagcgctggaaacggtgccccaactgttccagcgggtggccagtgccattgctcaggccgatcggaattatgatccccaggccgatgtggagaaaacggctcaggaattttacgacactatgacagaccttcgctttttgcccaattctcccaccctgatgaacgccgggcgggagctgggtcagctttcggcctgctttgttctgccggtgggcgacagcatggaggaaatttttgaagcggtgaagcaggccgccctcattcacaaatccggcggcggcacaggcttttccttctcccgtctgcgtccccggggcagtgtggtcaattccaccggcggtgtggcttccggccccatcagctttatgaaggtgtttaacaccgctaccgaagcggtgaagcagggcggtacccgccggggggccaatatgggcatcctccaggtggaccatcccgatattctggattttatctcctgcaaaagcgataacaacgaaatcaataacttcaatatttccgtggccatcaccgagggctttatgcaggccgtgctggccggggaggactatcccctcatcgatccccgcacaaagcaggaagtgggccgtctgaatgcccgggaagtctatgacaagatcgtggacgccgcctggcgcaatggagagccgggtatcgtctttatcgaccggctcaaccgggacaatgtggtgccctcccagggccgcatcgagtccacaaacccctgcggcgaacagcccctgctgccttacgaatcctgcaacctgggttccatcaacctggcccagatggtcaagggcgaaaagaaaaaggagatcgactgggacaagctgggacagactgtggacactgccgtccactttttggacaatgtaatcgatgtgaacaaatatcccatcccggagatcgaccgggtgacaaagctcacccggaaagtgggtctgggagtcatggcctttgccgatttgctcatgctgctgggtgtgccttataactcccaggagggcgtggagatcggtcagcagatcatgggctttatccagcggcgggccaaggaacagagccgccgcctggccgaaaccagaggggccttccccctcttcggagagagcatctacaaagacgaaactcccatccgcaacgccactgtcaccaccatcgctcccaccggcaccctgtccatcatcgccggtgtttccggcggggtggagccggtgttcgcttttgccttcatccgcaatgtgatggacggggatgagctgatcgaggtcaatcctctgctccgccgccgcttggaggagcggggcctttacagtgacgagctgatgaaaaaagtcattgcccagggctctttgcagcacattgaggagattcctcaggacatcaaggatgtgtttgtctgtgcccacgatgtgtcgccccagtggcatatccggatgcaggccgcattccagaagcacaccgacaacgccgtgtctaaaacggtgaacttcccccattcggctaccagggaggatgtggacaaggtttaccggctggcctatgagctgggctgcaagggtgtcaccatctatcgggacggcagccgcggctcccaggtgctcaacatcggcaaggtgagcaaggaagccaaaagcgatgaagcgccccaggccgcacccagcccggcgcagcagcagaaccgtctggagccccggccccgtccggcggtgaccatgggcatcaccgaaaaggtgaaaattggctgcggcaatctgtatgtaacggtgaattacgacgaaaacggcatctgtgaggtctttaccaacaccggccgtcatggcggctgccccagccagtcggaagccaccgcacgcctggtgtccatcgccctgcgcagcggcatcgatgtgcagaccatcatcggtcagctaaagggcatccgttgtccgtccaccattcgccagccggggatgaaggtgacctcctgccccgatgccatcgcccgggccattgaaaaggtgatgcgcagccagaatgggggccagatgccttcggccgtgcaggaaatggagcgggaactgaaccagggagcccaggaagaggaaatggatcattccattgccgggatgcggttctgtcccgaatgcggcgcaccggtggtgcatgaaggcggctgcgtcatctgccgtcagtgcggctattccaagtgcggttgattcttttgccttatttacaatttagccattcacactgtatgaaaaagtggtaaactaaaaggaccggggaagatcttccccggtccttttgccaagcgaatgaaaatgagaaaaaaccgccctacggcggatggagggaacaccatgaagattcaaacggcccgcttgcttctgcgggactaccgtccggaagatctggacgcctatttcggcctgcattctcaggcgcaggtgtgggaacaaagtcaggaaaaagccatttcccagaagggagaggcttccaagctcctgggggacctgatctcccatcaaatctccagcgatgtgggctatcgggccctgtgcctgaaggatggcacttacatcggggaagcgggaatcctgcaagtggagaaggattatagccgctgccggttgggatgcaatctgctgccggagtactggggggagggctacgccgctgagatcacccaggctcttttgcacctggcctttgccatgctcaaactggagcgggccgaagcctacgccctttcggacaatgcccgagcttgccgggccatggaaaaggccgggctgatgaaagaaggagtgctgcgccactaccaccgggaaggaaaaaacttccgggatgtgtgcctttatgccatgatccggcaagactggaaagaatagaagaaaagaaaaatgccgcagggaatttcctgcggcattttgattttggtttgttatttgtttttgctggcggcccggagacgctgggcccgatccagttcccgcttgcggatacgcaggctcttgggggtgacttccaaaagctcgtcatcgctgaggaattccaggctggcgtccagactgagaacggtaggaggagtcaggcgcagggcttcgtcgctgcccgaggcacgcatgttggtcacatgcttctttttgcacacattcacatccaggtcctgggacttgggggagtatcccaccaccatgccggcataaaccggtgtgccgggggtgataaacagtgtaccccgttcctgggcattgtagaggccataggtcaccgcctcgccggtttcaaaggcgataagggagccggtattccgacgggcgatgtctcccttgtagggctcgtagccgtggaagatggtgttcatgatgccttcgccccgggtgtcggtgagaaattcactgcgataaccgaagaggccgcgggagggaatcaggaactccagccgtacccggctgccctggggagtcatatgggtcatttccgctttgcgggagcccattttttccatgacagagcccagagcatcctcgggaatgtcgatgaccagctcttcgatgggttcgcacttgaccccgtcgatggtcttgtagagcacccgcggggggcctacctgaagctcatatccttcccggcgcatattttccaccagaatggacaggtgcatttcgccccggcccagcacacggaaagcatcggcgctgtcggtctcttccacacgcagggatacatcccgcagcagttcccgcatcagacggtcgcggatctggcgggaggtgacgaattttccttcccggccggcaaagggactgtcgttcaccgaaaagaccatttccacagtgggttcggagatctttacaaaaggcacagcttccacagcggcggggtcgcacacggtgttgccgatgttgatgccggcgatgccagagaaggccacaatgtctccgccggtggcctgggccacaggcacccgctgcaagccttcaaactggtacatggatacgatcttggctttgtaggatacatcgggattgtgataatccaccacagccacttcctggttctggcacagctggccccgctcaatgcggccaatggcgatacggcccacatagtcgttatagtcgatggaggagaccagcaccttggtggggccttccacatattccggagcatcgatgtggctcaggatggtttcaaacaaaggcaccagatcactgccggcgtcgtcgggagccagggaggcggtgccctgacggccggaacagaagatgacgggggattcgatctgctcttctgtggcgtccagatccagcagcagttccagcacttcgtccaccacttccaggggacgggcatcggggcggtctaccttgttgaccacaacgatgatcttgtggcccagttccagcgccttttgcaggacaaagcgggtctggggcatggggccctcaaaggcgtccaccagcaaaaggacgccgtccaccattttcagcacccgttccacttcgccgccgaagtcggcgtggccgggggtgtcgatgatgttgatcttcacatccttatagtggacagaggtgttcttggccagaatggtgatgccgcgctcccgttcgatggcgttgttgtccatcacccggtcctgcacagcctggttttcgcggaaagcgccgccctgcttgagcatttcgtccaccagggtggttttgccgtggtcgacatgggcgataatggcgatgttgcgcaaatcgtttctcagcaagtatgtcactcctcaaaagagaataaaatcacagaaagggcggaggatatcctccgcgccattttgacaaattattatatcacagcttcggggtgtttgcatcccttttttcaaaaaagttctccaaatcttttgcaggaaagaggaactcggtaatggaaaatattattgaacaataatgattgacactttcgctttgagaggttatattaaatagtaagatagctgtacaaaatagggatagaaaaaggatgagacaaaaatgatgagattgaccaaaagtgaaatggaaattatgaccgttttgtgggaagcggatcatcccctgtcccggacagaaattctggaacattccaaggaaaagagctggaaggacagctccattcatattctgctcaacagcatgctggaaaagggcgctgtggaagtggctggatttgagaagatgggcagccattatggccggacctatgcaccggctctcagcgagtcccagtatgcagcgcagcagatcaagtccatgtcctcctataaaaagtcccagggacaggccatgcggtgtattttcagcgcattgctggatgacagcaatgtggatgatgaaaccctgcgggatctggaaaaaatgctgcgggaccggcgtaccaaaaataagtaaccgttccgcttgctgcgtgtaagttgttatttcccatattgtaagcaagcctcgctgcaggtatttctgcggcgaggcttttgttttgtctttttccataaaattataggaaatatttctcatattctgtccatattcaatatttcaagagtatgatacaatgttggaaattagtttaaatatttattatgcaaaaatattttaagaaacggaaaattaagaattgcagataagcgaataaaaatgcatcgaaggaggaatcgggatgaatcagagaaaaagagtttggagtttgctgctggccgtgctgcttctgctttcggcctgccagaagagtgactcggcccccaaagaggacacagcaccgaaacagcaggaggagcaaaaggaagaggaaactcccctggagccggtggagtcctttgacccggcgtcttacaccaatgccatgatgttggaagactatgattttttctggactactctggaagagaattgcgccacattgggattgatggaaacaaaaaggcctttgaaaatagagcagctgaaagaagaataccgggagcgagttgcgactgtaccggatggacaggcagagacctttttgcgcattatggatgatttgaatggggagatacgaacttttgcccatatccaggcagtcagccccgttctttattatcggtatgtggatggcggtgtatgggaaagcgacacccaaaaagaattgtttgcctcgccattggtgcaggggttttacagttgggcgcagtcccttcccagtgtgaagaaagaactggaacaggtgcagaagacggaaacggtggaagacagcagtgattatgcttctaatgttcttttgtcccgggagggagacacggcgatcattcagctgaaaacgcttgccttttatggggaggaagcgaatcaagctgtgataaaaaatttgagagatttttgcctcgagaacttggatgcacaggattttatcatcgatatcaccggaaatccaggaggaaacagccagatctggtcagaaggcttggagcctttgtgggctggaaagacattcactcataaagaagtagcagcttacaaactgggagaggtcaatgtacagatgtgggatggttggccggaaaacgacccggatgtggaattgaaatcggtttctgatctgactgccatgaactatcccaagctggacatggaatctttgaaagactgcgacggggtggccatcaagacttttgtggatgattacaccgatgtggaaaacccgggtgggaaggaatttgaaggccggatctggattctgatcgatggaggcgtggcctcgtccgctgaacttctggttcaatttgcaaaaggaaacgagccctgcactttggtgggtacccaaagcggaggtacgagtggtggtatggcgccgccttctaatatggatgccgcaatgcccaactgtggcatgttggtgcggtatagtccgttctatttcatcaatgaagacggtacttgctgggatttggaaggcacccacccggatatcgagatcgagtccggtgagaccgccatgcagcgttgtttgaaggagatcaaaaagctgcagaaataagaggaggttgtggaaatgaaatcacgaaagcgtttacacagtgtcctttcgctattgatggccagtgtgcttctgctgtcagcttgccaaaaaagcgatccggcccccaaggaggacacagcaccggaaaagcagcaggaggagcagcaggaagaggaagttcccttggagccggtggagtcctttgacccggcgtcttacaccaatgccatgatgttggaagactatgattttttctggaccaccctggaggaaaactgcgccccgttgggtgctcttcgcgaggtggccggggccgatttggatcagtggaaggcggaataccgacaaaaggtggccgctttgcaggatggagatgcagaaggattttttaacaccatgggggagatctcccttcgttttagcggagctgcccatattcaggtggtcaaaccttctttgtattctcgttacatgggcggtggaagcgaatgggaaagcgatacccaaaagcaactactgcaatcggacaaagtacgggctttttaccagtgggccgaaaccctttcccaatatcaacaaggtggacagagcagcagcgctgcacaagaggaaactcaggaagccatcgatcagcagatttctgaaaagctcaacctgtaccgacagggagacactgccgtggctatggtgcgaggatttgatttttacggagaagaatccaataacaccgcagtgaaaatgcttcaggatttttgtctgaaaaatctggatgctcaggattttatcattgatctttcccggaacagcggcggcaatgcttacatctggacggaaggatttgctcccttatttgtggggaaaacccttacctgccccatggtggccgcttataaaaatggttcggtaaatgtgcagatgtgggacggatggccggaaaataacccggaggtggaattgcaggagctttcttccttgagcacagaggattatcccaagctgaatatggcttctctggaaggctgtgacggcgtagccgtgagcaccgccaccatcgactatacagaggaggaaaaccccaatggggaagagtttgagggcagactgtggattctcactgatggagaaaatatgtcctcggccgagatgatggtccagtatttgaagggtgaggatttctgtaccttggtcgggaaacaaacggctggcgtcagcggtattatggccaatccagccaatatgtatgcacccatgcccaactgcggcatgctggtgcggttcggggccttctacttcctcaatgaggacggaacctgcaacgatctggaaggcacccacccggatattgaaatcgaatccggcgagaccgccatgcagcgttgcttgaaggagatcaaaaagctgcaaaaataaacaggaaacaggttttccagttttagtgaatatttggaatatttatgagagaagagcccttctccgcccac

SEQ ID NO: 359 - DNA, 32759 bp, Unknown
  16S sequences of unknown bacteria
tttggggcagagccccaaagccttatgccgcagcattttccacgagcgttgcgagcatccgaaggacgcaagaaacgcggctttctccaaattcagggtttttcaacggtctgagggcgcggctgacaggccgcgtccttcccctcctttgccggtaccgctcactccatgccgctgagccactcgtccgccgcgcgaagcagcgcggcggtttcattttggatatgaccctccactgccatgcgccacagcgtttccagcaggcgtcccatctgccgggcgggcacgccccgcgcggtcagcagcggcatcagcgcgtcccctccgacggccagttccctgagcgaccacggcgcgtccctcaatgcgtccaacgcgccctttgcgcgcgcctcgtccgccgcatccccaagcgcctggaaagcaaccgccgcataggtcaccgcatcgcggcccagctgcaccgtttcaaaagcgccgtcttgctgcgttgcaaaatgccgcaatgccgccccataccgtgcggccagcaccgcatcgcgggtggaaaagcgcaggcgcaagagagcgctttgcagttcggacggcttcatttccctcagcagcagcgccagcctccccgccagcggcgcgtcctcccatcccagagctgccagggcgttcaccgcctccacatcataaggcgcgtccagcagatagggccacgccccgcagtcccatagggttttaagcccgctggcggtagccggagcgcggcgcttgagcattgggtaccgaaggtcagccaaaagggttttctgccattcatcgcgcaagcgctcgcaggcgatgtcctggagcagcgacgcatgccgtgcgaggctgtccagcagcgccggcgtgggcgcaaggtccagttcagcctgaaagcgcgccgcgcgcaggatgcgcaggccatcgtcccggagcacgcggtccgggtcaggggtcacggtgtgcaaaacgccctgttcaaggtgcttctgtccccccgtcgggtcgatgaccgggcccagtttgccgtcatacaggcggcgatagagggcgttgacgctgaaatcgcgccttcgtgcatccacgccgatgtccgtggtaaagcgcacggcatccggccgatggccgcagcggtagctgtcctcgcggaaagtggtgtattcggccatatgccgcacgccatcctcgtccgtcacatgcagctccacggtgccgaagtgcgccgcgcgcagcactgcccgcacctgcgtaccctcgcacagcgccatgacccgctctggccgcgccgggccgcacatgtccacatcggacagggacagccccatcagcgggttcctcaccgccccgcccaccaggtagaccgcctctcccgcccgctcaaaaacgcgcgccacagccaaaagccatggcgcgcccgtcaatgcatctttcttcatcgccgctcgcacaggtgctcaaactcgtccagttccccgcggaacacatccagcgcgccgcgccagtagtccacgctggctacatcgatccccacgcccgccgccacgtcacgcaccaacccgctcccgcaggaggccagcagcgcgtcatattcgggcataaaggccgcgcccttttccagatattttttgaacacgcccaggccgaacaggtggccgaaggcataggggaagttatagaagtgcaggcccacgctgtagtagtggctcttgttgatccacatgccggaatgcatgacctcggggtccagcccgtcgccgtagctctcccgctgggcatccagcatcatgtggttcagctctgcggccgtggggatgtgggtctttcgggcctcaaacacggcgcattcaaacaggaagcggctgtagatgtccacgatgacctgggtagcctccatcaggctgttttccaacagagcaaagcgcgtctcgtcagctgcggtcttgcgcacctcgtggctgagcagcgtttcgttgaagatggaggccgtctcggcaaggggcatgggcgggtcggccatgagcaccggcacgcgctccaggcacacgttgtgccagccatgccccagttcgtgcgccagcgtgctcacatcgctgaagctgcccacgaagttggtcagcacccggctgatcttcatctgatggaagcccgcgcagaatgcgcctccctccttgccttcacggggatagaggtcgatccagcggttttcaaacgcatggtcgataaaccggcccatttcggggtgcacctgcgaaaagacacgcaccagcagctcccgcgcctccgctacggtataccgcttggtatcccgccccatgggcgcgaacaggtcatagaagggcaggccgttcgtatggcccagcagctccgcctttttgcgcagatagcgccggaaatccggcagcgcctcacggatggcggtccacatggcatccagcgtctcgtggtccatccggctttcggccagctgctggctcaatacgtcggaatagcccttggcctcgcacatggtcagcgcctcgcctttgatgcagcttaagcagaaggccatgggcgtttcgatcttgcggtagctggccagctccgcctcataggcggccttgcgcaccgcggggtccggatcgtaggccatgccgcgcaccgcgggcagaggctgggccttgccgttcaggtccaccgtatgcgtgccaatgagccggtcgcgcagcttggaaaacgcgtctcccccatccagcgacatgcgaagcatccatttttccagctcggcgggcagcatatgcgccgactgccgggccatctcccgcaggatgaatccgttttcccggagcgcttcacggccttcaatcagctgatccaggcctctcacgccacccacatgccgcacgcagcggctctggcacagctgtacctctaccatcagggcgctgagctcatccatcaggcggagcgccccctcattttccgtatccgccgccagcgtcagctcggcatagccgtacgcgcgagtcaaacggttggtcatatcctccaggcaggagaccatcgcttccaggcggtccgcctccgggcggtcctgcgcgagcaggttttccatgccctccgccgcagcgcggatcgcgtcgatatcgccgcgcagggccggatcgtcaaagtcctgataaaatacgctcaaatcccaggtgccctcgttcacgaaatgcgccttccttccttcaaaaacccgttatttctgcgcttcattgtgcttaagcttgctttcttccagggccagcagacaggtttccttgctccgctcgatgtgcttgcgcatcagcttttcaaaggattccaggtcccgctgttccaccaagtccaccagctggtgatgctcccggtgcgccgcgtgccgccgcgtttcccgcgcgatggacagcgccgaaaagcgcgtgatatactgatcctggctctcaatgacgcgcaggatgcggttcattttggacagccgcgtcagctgtgtatggaaggcgcgcgcacgaggcgaaagcgcctcgatatcccccgtctcgtcaaaggcgtccatttcttgcagcagcgcacggagcgaccggatgtcctcggcggtggcattgcggacaatggcgggcagtgtcagcatttccagggcgttccggatggtgtagatctcctcgacgtccgcgatggtaaaggcgcgcaccaccacgccccgtctgacgacatattccaccagcccgtcacgttccagcttgcgcagggcctcgcgcagcggcgtgcggctgatgtgcatgcgttcggcatattcggtctcaacaatgcgcgaacctgcgggaatctccccggtgacgatcgcgtttttcagggtttcgtatgccacctcgcggatcggcttgctttccattgacggagccaggctcatcggtaccatcaggccgcccccctgtactttctttgtatttctttttcattgtagtacggtgtgcggcggattgtcaaggttggattggatacagatgaaaacggctcccgttctggcgaacgggagccggtatgcaaacgcggccaagccgcggagttttttgtcgcgcccggaagcggagggaacgccatgcgggatcaaaggggcgcaagaccgcccaaaaagcagccgccgcacagccggaaccatccggagcaggaaccgtatctcttgcgcaagagcttcccttcgcaccgcttccgcagcgcatttcgtctttatcgacgatctaaggatagcaaatgattatggcggcgttgtgaacagaaaccgaacaattggagaataacgccatgcaagcgggtgaacgcggccaaagcaggtatcatggattgacccacacatgtgtcaccgctccaatcaggcggccgtcctgcaggatggggctgccgctcatgccctgtacgatgccgcccgtgcgctccagcagctccgggtcggtgacccgcagcaccatgcttcgctgcgcgggctgggactggcgcgccacctcgacaatctccacatcgtattcacgcatgccgtcggtccccacggtggagaggatggtcgcaggacccgtgtgcaccgcgtcacgccgtccgatgggtacgccgtcgggatagagcggatgctccgggatctcctccagttcgccatagatgccgtactggttgttcacaaagatatcgcccagcacccggttttccctcagaaagctccccttgagctcacccggaaagccggcctcgccttttctgacatccaccacatcggcctgcatgatctgaccccggcccacggtgagcacctgctgggtgtcgctgtcggtgatggcatggcccaacgcgccaaagcgcgtatcgcccccctcctccagcgcgccatagaaggacagggttcccacacccgcggtgctgtcgcgcacccaggcgccgatgcggtagtcgccgctctggccgtcgcgctgtggggtgagcgtcacctccagcgtactgttgccacgctgaatggtcaagggcagcggtgcgtcgcccatggcggccaccatctccgtcagctgcgcggcgctttccagcggcttgccgcccgcccgggtgatcaggtcgcccgcctttaccccagccagacgcgcggggctgtacgcgccgctgaggtcgctggtgcccaccaccagcacgccctgggtgtgcagcgccacgcctaccgcctgcccgccgggatagagccgcagatcatcgctgatgtcgatttctacctctcgcaggggcaacagtcccaaaaagctgatggtagcggtgcttgtccccgcgccttcctccaacgtttcatccaaagacgcgccggcggatacgtcctctcccgcctcaacggtcaggggaaagggcgcgtcgagcacggcctgctggcccacagccacgctgagcctggcgggcagggtccgaagcagctgtgcctggggagaaaagtacaccacgagcagaaaggccgagagcagccagccgatggtttttttgagccgggtgggtggttttcgcatgaaaacgcctctttctgatcttgcttcgcagggaagtgtttgcagaaagaggcgtttttcatcgtggtaaagtttgtggttttcgtggaccggatcagacggaatgcttcacgcggtcgcgttcctcggcacgcttgccattgttgaaacggtccagggtgcccaccagatagcctgtgatgcggcggatgcgctcaaaggcgtggccgttttcgctgcgtccgcacttggggcaggtatcgccgatgatgccgttgtagccgcagtccgggtcacggtccacaggatggttgatgctgccgtacccgatgcccacgtcgtgcatgtaacggaccaccttttcaaaggcgtccaggttcttggtggggtcgccgtccatttcgatgtagctgatgtggccggcattggtcagcgcatgatagggcgcttcgatggaaagtttttcaaacgcgctgatggggaaatataccggcacatggaaggagttggtgtagtattcgcgatccgtaacgccggggatgacgccgaatttctcgcggtcaatgcgcacgaagcgtccgctcaggccctccgcgggcgtagcaaggcaggtgtagttgagcttttccttctggctgaggtcgtcgcagtatttgcggatgaagcccacgatttccagacccaggttctggctgttggggtcctcgccatgatgggtgccgcgcagggctttcaggcactccgccagtccgataaagccgatggacagggtgccgtgcttgagcacctcgcgcacgctgtcgttccagttcagcttttcggaatccagccacacgccctcgcccatgaggaaggggaagttgtagacctttttgttggcgatgatttcaaagcgctccagaagctgctcatgcaccaggtccagcatgcgctccagctcctcaaagaaccactgcacgtcgccctttgccttgatggcgatgcggggaaggttgatggaggtgaaggagaggttgccgcggcgggggcagatctgccgggtgggatcgtagacgttgccgatcacgcgggtgcggcagcccatgtaggcgatttcggtttcggggtggccctccttataatactgcttgttgaaaggcgcgtccacgaagctgaaattggggaagaggcgcttggcgctggtgcggatggccagacgatacaggtcgtagttgggatcgccgggattgaagctgacgccctccttgacgcggaagatctggatggggaagatgggcgtttcgccgttgccaaggcccgcctcggtggccagaagaacgttgcgcatcaccatgcggccttctggcgaggtatccatgccatagttgatggaggagaacggcacctgcgcgcccgcgcggctgttcatggtgttgaggttgtggataagcgcctccatggcctgataggtcgccttgtcggtttccttttcggcatgctcgcgcacgaagtccagaacgcgggtatcaacctcccggccggcggcgggcatggcctgcgcaatcttctcaatcagcgcccgatcatagccgggatcggcggccaggctgggctttttgccggtttcctgctccagctcgtccaggatgcgcgcagccacatcagccgcgtcctccacattgcccagcagctccagcgcacgggccaggttgtcgcggaaccgcttgaaataggtctttttgacacccggcgccatgccgtagtcaaagttgaccacgctctggccgccatgctggtcgttctggttggcctggatggcaatgcacgccagggcggaatagctgtagatatcgttgggctcacgcagcacgccgtgacccgtggagaatccgccgtggaacaattccagcaggtcgatctggcagcaggtggtggtcagggtgtaaaagtccaggtcatgaatatggatatcgccatcgcggtgcgcctgtgcatgccggggattgagcacatacatctcatagaactgcttggaaccctccgagccgaacttgagcatgctgcccatggcagtatcgccgttgatgttggcgttctcgcgcttgatgtcggagtcgatggcatccttgtaggcgatgtcctcgaagatcttcatcaggcgggtattcatctcacgcacccggctgcgttccgcgcggtagaggatatagctcttggccgaacgcacgaagccgcgttcaatcagcacgcgctccaccacatcctgcacctgctccacggagggcacagcgggaaggttttcatcccgctcgatttcctgaacgacgacgccggccagctcctgggccgtttcctgcgacttctggctgccgctggccataaagctcttttcgatcgcctgctcgatcttctcctgatcgaaggggacaatgcgcccgtcgcgctttttaatggatgtaatcatgtgcccgatgcctccataaattgttacataacgtgtcggccgcctcccccaaaacaagggggttttttgagcgagcaccaccattatattgtgctcatcggataaagtcaacactaaatattgatttataaagtgtaatattttccagtttcgcagttttcaacgctgtcgaaacatgcgataaagtgcgaaaatacatggttttgtaacattttccacatggttttccatggctcaaaaaacttttccttatcttttcctcttatgtagacgccgttatggagtgcgtatggaaggtataaggaaaacttcgcgtaaatcctgcggttttccatgcgttttccactgtcgaagcgccccttttccacatttcaaccacaaactgccggttttccatgagattttcatatgcttctcatccaatccaaaccaaatcccaaagcatccagcgtgggcctgtgctatgatgaacccgcaatccagaaaaacgtccatcaaggaggagccgattatgtcggaacagcgtccctatccatcccaggagaagcagagcggtcagacccgctggttcagcttcctgtatcgcacgcgcgtcatggttcatcagggagacatccccattgtcaacctgtctctggcctttgcgctgctcgtggcggtcagcgcgccatgggtcgcagtcgccgggctggcggtggcactggcactgggctaccgcattcatgtggagcgaaacgcgccgggcttttccggggactttcagcaggtggtgcatgacgcggcggagcatgtgaaggccgccgtggacaaagtggtgaaggacggagaaaactaagtgcgcaccggcgcaaaaagagcggaacggctattcgtcccgctctttttgcttatctgcctacagcttgttcatctccgaagagagcatggtgttctggagcatctgcttgtagtcgttggggccgctattgatcacgcccaggtacagcgcctccagaataatcatttccacgatgcgtttggttacgctgtcacggccgatactcatatcgaccgacgaagagtacagtgagatatcgcagtactttgtcagcggagaacgtcccccctgcgtgatacaacaggtaaaggccccctgctcatgggcgatcttcatggcgttgaccacattggtagacctgccactattgctcagcgcgatggcgacatcggattcgttcagacgcatggctgtttcgtactgataaaacacatccgcgcacacgaaagcgggcagcccaatgcgattaaactttgtgcatgcatactggcaggaagtcacggcgtctccggaggcaaagagatagatggaacgcgcccccaaaatcgcagccagcacccggtcataatcgccggagatgaatgcgttcatatcctccatcgaccggttgacagactgaatgagcttggcggtaatggcaggcatggcatccgccacgctgatgggttcgggcgaatcgggatgatcctcattggcggcaaaggcaaaggcctgacgcagctggatgtaggaggaatacccaagccgcctgcaaaagcgcaaaatggtcgcttcgcttacggacgtttcgtccgaaagcatggacagcgtcatgtcggacatctgcgcgacatgggcggccatgtattccgcaacagctttttcagccctcggcaggctttgaagcatgaattgcaggcgtaccagcagcttgttcattccaaacacatccatttcacagcgccggaagcacatgcgggcgggaacattgctattcaaaggagaaccccaggccggcaagcatatgcatatcgtcctttacggaggtgtagacatgcttgtagatttcataatagcgattgtacagctcatgattctgccaattggggcaaaagaccatataggacttcgtccagctgtcaatctcctcaaagccggcaaacacaccgcccgccacgccggccataaaggcatctcccatcggcgcttccacgccgtctctcatgcattccagcttcacgcccgtaatatcggccagaatttgcacccatagcttggaggctgtgccgccgcctacgatgcggcatacggaatcccttgcgaaggaaaagccgtacgcttccattacatgccgaaatgcatatcctacggattcgagcaccgcccggtagatgtgggacgagctgtgcttcaccgtcaggcccagcagcatgccgcgcgccttggaatcccagatgggtgtgcgttcgcccatgaagtaaggtagcatcagcaagccctcactgcccgccgggatttcagccgctgcctgttccagctcccgaaacagcagctttttctccctttcttcataaccctgaacgcgcgtgccccccgcaaggtttcccgcgaaccattttgtcagcgctccagctgtagaaataccgccataagtatatcgtaagctttgttcttttgtcaaatatggcatggttatgtattgtggatttttttgccgctgatcgtgcaacaggccccagttgaggctggtggccagcaccgccacggtatgccccgccgtgtaaaccccggaggacagggtcgatgccaggcaatcgatgcatccggcgcacacaggcgtgccgggcatcagacgcagttccgccgccgcctcggccgtaaggcggcccaggatatcggtgggatcaatgatgcgctgtggcagcatgctgcggggaatccccagcagctccagcatttcatcggaccaatcgttgcgctcatagtcaaaaatgccgccgaggttacctgcggaggtgcggtcgatggcaatctctcccgtcaaatgatacgccacatattgattcggcgtaaggaacagcgagatgcgtttccagttttccggctcgttttccttaatccatagcattttggcaaagccaaaataggagtcgatgccattttcggtaatttggaacagccgctgctcatccacggtgtttttcaaccggtcgcacagggcctccgcccgccggtccatccaaatgatgcagggccggaccacctccatatcagcatccagcggaatgccggacccgccgtaaagaccgctgatacacaatgctaccacctgttcgggcggtaccgcgctttgcttcataacggtacgtatggtatggcgcacggcattctcccatacatccggccactgctcggcccacgcgttttgcgggcagagaatatcatagctttccacggcggaggccagcacattgccatgctcatccgtgataacggttttggtggaggatgagccgatatcggtaccaagcagatattgatgctccatagattgttctcctttcttcaaacgggcggcagggacttgctaacagtctattagaatctgcgttttaagtcaataataaatttaaatttttttgaatttgttttttaaaaaacgaagtgttttggcggaaaagtcctcggtcggatttcatgaatgctagtaaaatcaacgtttttccgatttcctcttttgcttttacaatttttatgcttcgttttttaaaaaaattattgataagttcacttcggatatgtatactatgctcataaagcagagagccaccaacgcggaagatggggactcaaaacaccaacgaaatatgaatggaggaacatcccgatgaaaaagaccagaattttaagcgttgttgccgtcctgtgcctgctgcttggcatgtttgccggcgcagccgtcgcagaagaaacgcccgagctgaaaaagatcggcgtcgccttcatgaaaaatgaccccttcatggttccgctttacaacggtatgaaggaagtctgcgatgccaatgggatcgagctgatcgaatactacgccgagaacgatatcgaaaagcagatttcccagtgcgacgacctgctccagcaggacatcgacggcctgatcgtaatgcccgtggactttgagggcatcaccccggcgctggacgccgcgcagaaggccggtgtgcccgtggtttccgtcgatgcggcctgcgccgacgcggaaaagaccatcgcctacatcgcttccgataactacaaggccggctggctgtgcggcgagcacgtgctcgaaacgctcgacagcgccaagatcctggtgctcagccaccccgagatcaagtgcaccatcgaccgcctgcagggcttcaaggacgcgttggaaggccacgagggctatgagatcatctccgagcagccctgctccggcctgtatgacaagggcatgaccatcatggacaactggctgcagcagtacaccgacttcaacgttgtattcgccatcaacgacggttccctgcagggcgccatcgcctccatgcaggctgccaaccgcctggagggcgtgcagtcctatgcgatcgacggccagcagcagatggctgattacatcctggaaggcaagcagacggctgaggccgctcaggacccctattccatgggcaagggcgctgtggaactgctcatcaagcacttcaacggcgagccctatgagtacgagaacctcctggaggttacgctgatcaccaaggacaacgcggcagattatgttggcttctaatttgcgtgatcgccgtgtaaagtggctgctttatcaaagcatctaagcgtgctttgcatggagttgtcgcagcaatgcggcaactccatccttattcctggcccgcctcgcggcgcgtgccagttacgcagagaaaggagcatgcgcaatggcggaccttcttttgcaagtcaaagacgtgtccaaaacatttcccggcgtaaaggcgctggatcatgtgaacctgcaaatcggctatggagaggttcacgggctgattggtgaaaacggcgcagggaaaagtacgattatcaaaattatcgccggcatttatgaacccgacgagggccaggtaaccttcatgggcaagacctgtcagcatgaaagcatacgccagtcgctctcgcgcggcatcagcgtgatttaccaggagctgtgtctggttccgcacatgaaggtatacgaaaacatcatgctgggctatgagggcctcaagcatggcggatattcggctgaaaaggcccgtgcccgtgcggctgccattttggagcagttgggcctggaacttcccctggacgcctacgtacgcgatctggacattgctgttcagcagatgatcgagattgccaaggcgttctcgcgggacgtcaagttgattattatggatgaaccgacctcctctttgaccaacaaggaggttgatcaattatacaaaattatccgaaacctgaaacgagagggcatctctacgctgtttgtgtcccataagctggaggaaattgaggaaatctgcgattgtttgaccgttttccgcgacggcaagaccatcacctccgccaaagtgggcgaaatcaccccggatgagatggtgtatgccatggtgggcagggaaatcaccaattactacaccaccatccacaagccgcaaagcgaagtcgtaatggagcttaagggccttggaaaggccggagtcattgaggatgtgtccttcgcgctgcataagggcgaagtgctgggcatgaccggactgatcggcgcgggccgcacggaaacggcgcatatgctgtttggtcttgatacgtttgaaacaggccaattgcttctggaaggaaaaagtgtgcgcttcaagtccacgcatgatgccctggccgcaggcgtggccctcgttccggaaaaccgcaaggaacagggcattattccccagatgggcgtgggcttcaatatcaccatcagcgtattggagcagttcatgcatctcgcgcgtgtggaccacgcaaaggaaaaccgcctgatcgatcatttcttccaagcgctgaaaatcaaggcttattcccccgagcagcttatcagcaacctcagcggcggcaatcagcaaaaggccatcatcgcccgttggctggcggccaaacccaaggtactgattctggacgagccgacccgtggcattgatatcggcgccaaaaaggaaatctacgagctgatcgaccagctcgcccaggagggcgtggccattcttctgatttcttccgagctgcctgaagtcatcaacatgagcgaccgcattgtagtgatgcggcagggcagggctgtggcggtgctggaggacaaggcgcagtttgatcaggaaaacattatccgctattccctttaagcagtgcaagcataggagaggtgcaacacgatggaaaagagatcagataccttcgtaaaaaagttcggcgggcgtttcttggcctggttcaagcagaacatcggcattcttattggtctggccgcgctcatggcaatcgtgagcctgttttcggagtcctttttcaccgcatccaacatgtggaacatcctgcgtcaaatcagtactaacgcgctgctggccttcggcatgacgtttgtcattctgattggcggaatcgacctgagcgtagggcccctgctggccttttcgggcgtatttgcggcctatgtgatgggtaacctgggctggccgatctgggctgccatcgcaggctccatcatcctgtgctcaatggtgggcatgctcaacggcgtcatcgtcaccaaaaccggcattgcgccgttcgtcgtcaccctcagcgtgcagcagatcttccgtggctttgccatgctgctggctaacggcgcgcctatccgcatccgggaccagggcttcatcaacatcggcaccacctacatcggccccgtagcttttccggtcatctacatgatcattatcatggcgctgtgctacgtggtgctaaacaaaacgcagtttgggcgccacatatacgcactgggcggcaacaaaaccgctgcgcgcttcgcaggcattcgcacgcagcgcatcgaggtcatggtctatgcgctgtcgggcttcctggcgggcattgcgggcattgtgctggcggcccgcatgacggcgggcgtgcccgccaccggcgacggctatgaatgtgacgccattgctgccgttgtgctgggcggcgccagtttcaccggcggcatcggcaccatcggcggtacgctgatcggcgccatcatcatcggcgtgctcaacaacggtctgaacatgctcaacgtcgcctccttctggcagtatgtggccaaaggtgtggtgattttgctggcggtcatggtcgacgtactgcgcaagcaaagcaaggacaagagaaaagcgctgcccaaaaaagccgccaaggcgtaaggcaggttgacgaggaggaattacagccatgcgcgaatcggtaaaacagcttgaaagcagagccagggaattgcgcaaaatcgcgttggaaatggcctatgtttccggtacggaaggcgctcatatcggcccggcgttctccctgatggacatcatgacggtgctgttttttgacacgatgaactaccgcgtagaggaacccgactggcccgacagagatcgtctgatcctaagcaaggggcacgcctgccttgggctgtatgccccgctggtaatgagcggctatctttctaagcagcaggccgacagcttcaatcagccgcacacgcacatcgcgggtcatcccagcggtaagggggttcacggcatcgagcatcctgccggttcgctggggcacggcctgtcggtggcatgcggcatggccaagggagcgaaactgacaggccgtccctacaacacctatgccgtcatcggcgatggcgaaagcaacgagggcagcatttgggaagcggtcatgtttgctgcccagcacaagctggataacctggtggccgtggtggacgccaacggcttccaatacggcggtccttccgccgagctgatgaacatggaaccgctggaccaaaagtggcgtgccttcggctgggatgtcaaggaagtgaacggcaacgacatcgcgcagcttcagcaggctctggatccggcccagcgggcaaaagaaaagcccacctgcgtgattgcccgcacggttaagggctatggggtaagcctgtttgcaggaacaaacgagtggcatcatggcgtcatcacccgcgaagtattcaacacggccatcaaagagctggaaagccaggaggtatctgcatgatgaatttggctgaacttgcgaatcgcaaaatgaagttcagaccctccttcggtctgatgatgcgcgacctgttgttaagccgggaggatgtggtgtttcttgtagcagactccgcacgtgcctgccggtttgagtgcccggaatcgtgccaggaccgcctggtggaatgcggcattgcggagcagaacatgatcggcgtagccgccggcctggcgcgtgcagggaaaaagcccattgccttcgccttttcccccttcgcctgcgagcgttgttttgagcaggtgcgcgtggatgtggcctacagcggcctgggcgtggtgatcgtaggcagcgagggcggcgtgggcatgggcacgcagggtgtaacccactatggctgggaagatatggcggtgatgcgttccttgcccggtatgacggtcatggatcccgccgatcacgtggagttgtaccactgcctggaaaaggcgttggatatgaacgcacccgtttacattcgcctgagcggcgggcttcccagccccgtttatctcaacgactgcgagcttgagataggcaaagcccacgagctgcgcgcaggaaccgacgcgacaatcatcgccgtaggcaccatggtaagcgtcgcgctggaagccgccagcctgcttgaggccaagggcctgtccgtgggtgtggcggacatgtggagcttgaagccgcttgacgaaggctttgtgctgaaatacgcctccagcgtttccgccatcgtcacattggaggaacacagcgtggtcaacggcctgggaagcgccgttgccgatgtgctggcacagcaccattcgcgtgcccgtctgaccaagcttggacttccggatgcctatccgccgagtgtatcgccctatccggtgatgctggaggattatggcctgaccgccggacaggtggctgcctccgtggaaaaggcgattcgctctgcgcgtgaatcacagtgagggcaaagcgatgaaacattttgacattatgaccttgggcgtacctattttggaattcacccggatggagctggataagccgttttcccaggccgggctgttttatgggcctgtccccgcgggcgatccgggaatcgccatgaacgcatgtgtccggcttgggtataccggcacctatgtaggtgcgaccggcgaagatgcctttgcagatcgtttttttgcacagatggaagccagcggcattgacgttgcctatctccgtcgggattcttcgcatgacacggccttgtccatgctgacccagttttccgacggaagcagagatttcgtcttcaccgttcctcactctgccgccgccacctgctgtgaggacgatgtgtgtgaggaactgctcaaaaacgtgagctggattcacctttccggttttgccatgtctatcagcgagtcgtcggcccgggcccatcacaaggtgatcgcgctggctccacaggaaacgcgcatcagctttgaccccaatttccgcccccaggtcatcgaccgcgatacctacctccgacgcgccatgccgctgctggagcggtgtgattgctttttgcccagccgcggcgaagcggcgcttttcgcccggcccggtgaaagcgaagaagcggtttgccagcggctatcgtataacaaggctgtcgctctcaaggacggcagcaatggcagctatgtatttcacaggggcgagcagcggcacctgtccggctaccgggtagaggaagtggacagcaccggagccggcgacacctacgacggtgccttcatcgccgccctgatggacggcaaggacctatggtctgccggcgaatacgccacagcagccggagcggtagccgtaacccggcgcggtttgatggatattgcgcccacgcgcgaggatattgcagccatgatgagccgtggcagataatccaacgcatatgtgagaacacgggaaaggaagatggatatgcgggtggtcattggttatgatcccaacgccggcagccacgcgcgcgtcgcgcgagatgtgtgtgaaagtatgggcatcacggtggtagatatgcgcggtgaagacccaatctatgcaaatacagccattcatgcagccaacatgatcgtgtccggccaggcagaccgcggaatcctgatttgcgggacaggcattggcatgtcgattgcggccaacaaggtgcgcggcgcctatgccgcgctgatcagcgacgcctattcagcggtgcgggcggaaaagagcaacaacgctaacatagcctgcttcggtgcctttaccctgggtgaaaaagtgatggagtctctcctgcgcatttggcttagcgcggaataccaggacggcaccccttctgcgcccaaggtgcaacgcattgtagcctatgagaacgaagccgcgcatgaccagtgccaatgacgaagccttacagactggggctgtacgaaaaagcattgccggacaccctgacctgggaacaaaagctgatggaaacacacatctgcggctttgattggttggaaatcagcatcgatgaatcgcagcccaggctggaccggctgaccatgagcaagaaagagcgagcctcgcttcggaacctttcctttcggcttgaaacccccatcagtaccatgtgtctaagcggccacaggcgctatccgctcggctcacatgatacgcgcaaacgaagcaaagcacttgaaatcatgcggcgtgccatcgaactggccggagacctgggtgtgcgtgtcattcagctggccggctacgacgtatattacgaaacggcggacgacagtacccgtggatggttcctggaaaacctgtttcagtgcgttcacatggcacagcaatacggcatgctgcttggctttgaaaccatggaaacgtcctttatggataccgtttcaaaagcaatggcctatgtggactgtgtagcatcgccctaccttggcatttacccggatatcgggaatctcaagaatgcccatctgctttacggaagcgatatggatgccgatctcaaggccggcaaaggacatatattggctgcccacctcaaggaaacgcggcccaacgtgtatcgaaatctgtttttcggcgatgggcatacggaatacgttccctgcgtgcacgcgctttacagcatgggcgtaaggatgttcacggccgaattctggtgcaccagcgcggaaacagatcgcagtcgtctgcttcaggcttccctgtttctgacgcggcaaattgatcaggccgtatcgacttgcaaagaggaatagtgcaaaagaaagcccggctaaaagtcgggcttcagtctgctgacaaagtgcggggtgcagggggatcatccccctgccagggtttagggcagagccccaaacccttatgccgcagcattttccacgagcgttgcgagcgtccgaaggacgcaagaaacgcggctttctccaaatgtcagaggtttttcaacggtctgagcccggctaaaagtcgggcttatttttgttactcccccatcacccgcgcaagaaacgctccgacctcctcccacgcagcccggctttccggcagcaggtccagcgatccctggaacacgtggaacatgcccggatataccgtgagcgtgcagtccacgccatgggctatggcgttgtcatagaccatttgactgtcgctgagcagcacctccaggtcccccgcctgcagcagcatgggcgggaagcccgcgtaatcgccaaagctgggcgagaggtagggcgtctttgcgttcagcccgtcgggataggtggtatcaacacccacgggcgtggagccgtcccactggtccggctccacgccgaaactgggatccttcgtggcattgtacagatgcgacggcccggaattgctcagatcagcccagggcgacatggccacgatgccggcaggaagctcccgcccctcgtcgcgcaggcgaagggtcagggacagcgccaggttgccgcctgcgctgtcgcccacgacgaaaatgtggtctgcggcataacccgccgctccggtcaggtagacccaggcatccatggcatcgttctgctgggagggatacggatattgcggccacaggcggtaattcagcgtgtaaacgcaggctccgcctgcaaggctgctgtagcggaccgccatcatgcggtacaggtcgttcaccccgctgacaaacgccccgccatgcagctgcaaaacggcccagtcgcttttttccctctcaggcatgagcgcctccatggtacttgccgggagccgcacggtttccatgcggtatccttccggcggccgccataccgacagtcccatcatgccggccgtcactttctcttccgcaggcagatgggtaaacagccacaccgtgcccccgccaatctgccccggcagggatacgtcccatcggggccggctgagggacagtcccgcatacgccgccagaaaagccagcgtgaagcacagcggcgcatgccaaccgcgccagaatcggctgcggcggatggccaccagcccggcgaacgccacaaccgcgatcgcccagccataccagtgcgcccggatggccagaaggcagtagaagatgggaacaaagatcagcaatgtcaaaatataaaatcgcctgggcacgcgcgcatgattcagtttctcggtcatgcatcgtcctccttgggcgcggcaagcagcgtggtaacgccggcaaacgcccgcatccgggcgcgcagctcatccgcacacggcagggtggcccgcaccagcgcatgaaacgcaggcgaatgatcgggatgggtcagatgggccagctcgtgcacgatcacataatcgcacagcgccatggggcagtgcatcagcgccgcgttcaggcgcaggcagccgtcggccctcatgctgccccagcggcgcttcgccgccgtataggttatgctccgcacgttcaggcccatacggttttcccacaggtgcacgcggggcgtaagcacctcgccggcacggcgttttcgccagtcccgcaggagggcgcgcgcatcaccgccgcgggggaccagcagccatccgtcgaagtccacacaaaacggcaccccgcaaaacttcaggcgcagctcgccccccagccagggaaggcacgctccgtcccgaggcacaaacggggcacgctgttgtgcagcctccgaacgctttcgttcaatccacccgcgcttctgctcgataaatgcctcaatctggctgatgggcatagacagcggcgcacgcgcaacaagcgcacccccgctttcgatcgtcagcgaaagggtgcgcctgttagagcgaaccagccggtagggtatcttcatgccttgatcccccagggcaatatcagtcatagttcatgccgggataatagcaggccgtgcgcacaaaggtagcgctgcagctggcagccagcagccgctgctgctcattgcggcggatcacgtccgcctccacatggttgacgcccttctcggccaaaatcttcatgcctgccgcgatcagcgacttcgccagccccagccggcggtagttgggcgatacgtacaggccgatcagcttggcagcctgtccgtcgccggtgaaggcgatctcgcccaccacctcgggtccacggctcatatacagcgccataaaatgcggaaagctcatataccgctgaagcatcgcgggcgaccacgcatccagccggtaggtgttcatacgcatgagaaacgcctgcctctccgccgggtcgctcatgggcacatagcccatgtcgtagcccatgggggcggcgggacgggcatttggcacgcccagtgccaccacgtccagcgcatcgttggcgtcaaagccactttccatataaaaggccatcatcggcgtatcctgcgggctgacctgcgcaaacagccgcgcgggccattgaggggtctgctccctgagctgctgcgcacgggccagcagcgcacccatgagcatatcccgccccggtcccttggagcgaatgctcataaacagattgatgggccggtcggggaacaggtagggatgataggtcggaatcaaaaacccatccgcgacggtcatattcgcgctgtcggccacataaaaggtgttctccggcggcagaccgttcacgctttgcggagggtgaaacacgtgcatgaggttcgctcatcctttccgaacggccgcaggggcagttcctttccatagtatgatttattgtaccccaattcgccaagatatgcaagccgaagcgccttcccctgccttctcatttttgcggcagacagccccgtctgccgtccggaagcaggccgcatccgaaacagggtctttccccctgcccgcgggcaggcctccgcctgcctgcgccgccgtggaccggttgcatttccggtcgaagtttgttacaatacagtcagtcgttagtaatcgcggaggataggtctgccatgttcaacatcggtttttccgaattgattctgatccttctggtcgcgtttgtgatcgtcgggcccaaggacctgcccaaggtggcgcgcgcgctgggccgtggcgtacggaacgtgaagcgctggattgatgaatttaaggaagaaaccggtctggacgaagccattgacgagttcaacaaaacctcgcgcgatcttgaacgcacttttaaggaagccgatcctcgtccggagctgaaaaaagcgcgtgacgatatcaaaaccgcgctggacgacgcatccaaagctgcggaacacaccttgaaagatcaatcccaacaggaggaatagcttatgcgcatcggtattacggagatcctggtcattctggtcatcgtgctggtggtgttcggcggcggcaagctggcgggcgtaggcaaggcgctgggccagagcatccgcgatttcaaaaaggaagtcaaagccgacgacgagcccgccaggaaggaagaggacaagggcggggacgcccaataaccttctatgaacacagataaaaagcaggccctttcggtccacctcaaagccatccgccggatgctgatcgtgtccgtcgcttcggtggcggtgctgtttgtattgtttttctatctgctctgtgggccgctggtggacttcgtgctggcgccggtgcgggcgcgcggcatcgaggtcatcaccaccagcgtatccgaggccttgatgatgcagttcaaggtctgcctgatcgcggcggtcatcgcaggcatgccggtgattatctggcaggtgtgggtatttgtcgcccccgcgttgtatccacaggaaaaacgactgtttgccgccctgttctttgtggcgctgctgctgtttgtgggcggcgtggtattctgctactgcctggtgtttcccatggcaatcgacctgttttggtcggcggcggacggtgtggcctccacgctatggtcggtgaaggaatacttcaacttcgtgctgtctttcgtgctgcccttcgggctgatgtttgagctgccggtggtggtctatatgctggcccggcgcggcctggtcacctatcagaagctggcgcactcccgcaaatatgtgattctggtcattgcgatcattgccgccatcctcaccccgccggatgcggtgagccagtgcatgctggcgatcccgatgattcttctctatgaggtggccgcccagctggcgcggctggtcaagcccaaaaagccggccgaggcctgatgtcccacccgcagccaacggaacccaataaaaaaacgccgccgcgtttccctcacggggagcgcggcggcgcgtatggttttacttgatctgagacagcgcgtcattcaccgccgcgatcagggcctcggaggtcttggtcgcgccgctgactgcatccacgctggtggactgcgccgcaatgatggcctcggggatctgctcaaaggcggcatccgagatgccggcggtctcgttgtggctgaggacctcgatcttggcgatcttatcgccgtccatcgtcaccttcaccttgatttcgccgccgatttcactggtgcccacgccgatgtactcgttctcgcccagcgtctcttcttcctcggcaggcgcttcctccacaacgggagcggcctcgaagccgaagtgaatgttgagcagctcgatggtcttgacggccacctcagcgctcaggccggcacagcgggccagacggccgggatcgctcatggcgtagcccgtggcttccatgtacgcgcccacggaatccgcgcacagcacagaattggcaaccgtggtgacggattcgatctcgggctgataggtggggaagggctctaccttgtaccactcatagagctgatcgcgcagggcgcgggcatcctccgcctcgcagaacagaccgatcaccgcgcaggcgccgcccagcgagccgcacagggaagcaacgccatagccggccgcgccgttggcaaacatcttgccgttgagtacattatagggtgcgccataggcatcgcccatggtctccatgatgccggcaaacacggccgcgcagcagccgccatgggaatagaagcagtcataagtgtgcttaagcacggcatccttgtctacctgctggtaggtccaaggataggcgggagacgccgcggtttcagccagtgcaggcttgagcacggacgggatggcggtcagcgcggcggcgcccagcacgcccttgcccgcagcgcgcagaaattcacggcgagtctgttcgatgggtttcatgcggaaagaacctccttgcttgattggggcaacgtccccctttgaattgtttatctggtgtaactataccgcatttcataaacattgtcaaccattcggcacgccgcagcgcgaggcagaatccccttttccgttgggcaggctgcatttccggcaagtgtgttcacggtcctcggtccggattttccatatcggcgaaataatcaaaaatgctgtgttttcgcatgagcgcggaaagtgtaatctggattttttccttgagcattccatttctttgattgctgcacgtttgtccccagtcgccatcgcttcgggccggatgggccctattttatttgaatccgctgtatagaatcagcacctgttttaatatttctatattcttgatagaactggattttatcatacacaaggtgaggcaaaatgcatttgcatttttgtaaaatatgatgtcttgaatcgtaagaaggcaaaacttataatgatagcagcaatttgattgcaaatgaataaaggagttggtaccttgaaaagcctcaggaaaatggtgtccatggtccttgcctttgcgcttgtcctcagcgcctttgctgcttacgcgctggagctgcccgacggtgtttataccggcacaggcgccggcatgcaaagcaacatcgttgtggatgtaaccgtgaaggatggaaaaatcacctcggttgacgttgtttctcacaatgaaacgcccggtatttctgacgcagccatcgaaaccatccccgccgcgattgtagaagcgcagtctacggatgtggatgccgtcgccacggcaaccttcacctccaacggcattaaggaagccgttgataacgcgctgtccggcgaggctgctaccgtgcaggagctcaccatcgatcccgatctgatcgtggttggcggcggcatggccggcattgttgcctctgtgcgcggcgctgaattgggtctgaaggtgctgttgctggaaggcagcgcccgcatcggcggctgcatccactacgccggcggcacgatttccggctccaactttaaaattcaggaagaaaacggcattgaggattctcctgaagcgttctatgcggacgtcgtgcgcctgggcggcggcgaaagcgagcttaacccggagctctccaaagcgcactgcgaaaagtccggtgccgccatcgactggttggatgaggacatcggcgtggattttggcagccgcacgctggttgccggcgcttacgccgcctttgacaccatgcgtgtaacgctcgccggtgacaactccggtctgggcggcgcgctcaattacctcaatccccttaccgatcgtctgaacaaggccattgaagaaggcagtgttcagcttatgctcaacagcacggtaaccgagctggtggtgaaggatggaaaatgcaccggtgtgaaagtgggcgaagtggaatacagcgcccccaccacgctgctggccaccggcggctactgccacaatgaagagctgctgaagatggccggttttgacaacatcgtgtcccaggcgcccaagacttccaacggctccggcttctatctggcccaggcggttggcggtgtgtttgataacatggacaagctggccacctactatggcggcggcttgatgaccgatggcttcgagatgacctatggtgcgaacaccagctatccgggccgcatctacgtcgatcttaacggtaaccgcgttggcgacgaaaccaccaatgatgtccatctgtggatgaacgcaccggaggacaagctgtatctgctcatttccggcaacatgatcgacaaggataccgttctgctgaagtacggcatttccactcgtacgcccctggcgaacaacggctgggatatgatggacgagctggccgccgaagaaaactgcgtctataaggcagagaccatcgaggagctggccgagaagatgggcgcggaaaacctggttgcgacggttgaaaagtataatgcggacgttgctgctggcgaagacacccagtttggccgcgccgccgataccatggtcgccctggaagaaggccccttctacgcggttgaaacggttccctacgcctacactggttctaccggcggtgtgcgtgtggacggcaacggccagctgcttacggaggacggcgtatcgatcgagggcctgtacctcgccggcgaaattctcggacccacctgcatttccggcaacgtgatcttcggcggcatcaatcacgccatggccgccacctggggtctgaatgcggctgagaacgctgccaaggcggttgagtaatccttactctttggtaaaacaaacacgtcccaaaagccaaatggcttttgggacgtttcttgtccatataaagaggcctccatatcaacatcaacgccggccatctgatatgaccggcacgcgcctgtgccgacagcacttcttatgcggctttgagtgcaagaaaagcgctgcccgctcgcccaaaacccgtcggagacgtttcggttcatgcttgtctatatcgcaaggaaaaaccaaacgccatagaccatcgcagcgagcgcggcaaacagacctgtataccccacgatccaacccgtttttcggccgcaagcacgtcccgcggcaaggcccagcgcacacagcaaaagcagcggcgcaacgtagcgaaagttaaaggagcagatgtaggggtaatccagacaaaacttcaaatagtaacccacaagcaccacgccgtacatgcccaaaaatgccgcgccgaggccggacagcccggcaggacgccttaccagcatacgcacaaacagcacaagccctatcagcagcaggaccgcaaacatcgccatcagcaaatagcaggcgtaccacatcaccgtgccgttttcaaacagggtcagctcgtcaaacacaccggttttcagtgtttgcatccatacgttatggtccgtttttcgtatgccggtgtaaaacagtccccgccgtgcaaaccagtccggaatcccaaaccgtttccacagggacagatgccccacgtagatggtctcggcaggcagacggacatagttgagcggcatatcaaacgccatcagatgatacagcggccaggccaccgccagcggcacgctgactgccagaaacgccgcgaactgtcctatataatgctgccaccgcttcaaatcccggaagaacgtcacgataaaaaccaacgccacacagggaatgagcagcgcagcggacagcttggccgccattcctgcccccaacgccagcgccacgcccagaatatcccccatgcggcgtgtgcgctcccagcgcacggtaaagaggatgcaggccagaatgcacaggatggaaaggatatcgttattgagcgtcgctcccagaatccacagcgacggctgaaaggccatcgccagcgcaccggcgcgcacgccccgttcgtcaagtcccaaaaagcgcatcaggtccactgccaccaacgggcatgcggaggcaaacagaagtgttatcacctgcaaattttccagcgccacgctctccggcacctgcagccataggttcagccgcatgaatcccgcttgaatcaaatggtacagcggcggattgtaaaatacgctatacccctccacgcgagggtccacaaaaggcaatgtgccgttttccacaatccaggcaatatagcccagatggccgtccggttttgcctcaccgctgaaatccgcgctgtaggaagccagatcatgccagctgaagttgtatggcagtctcaggatgaaacacagtcccatcagaaacccacctgccagaatcagcgacgtacaggcgcgctccgtccagcgccggcccgttcgaagccggatggccagacacagccatgcaaccggaagtacggcacaggcggcatccagcgccaatcctcccagggacgcggccagtgtgttgagtacccatgcacccagcccggccacaaacagcgcggtgtatttccgcgattctccggcagcgtttgacatgaatgcacccttccccctttaactatcgtgctcggcctgagccatacctcaaggccccggacgcagcctgcgttccggggccctgatccatggtgcggttactcctcgatttcgtccatcagggccaaatcgggatcttcctcttccgatgctgcggcggccgggggttctgccgcattgtttgatgcggcagccatcgcttcctcgcgcacgatcttctcgatccggtccgccagctccggatgatcgcgcagatactggcgcgcgttttcgcggccctggccgatgcgctggtcctcgtaggagaaccaggcgccgctcttgtggatgatgtcgcgctccaccgccatgtccagaagcgagccgaacttgctgatgccctcgccatagatgatatcaaactcggccaccttgaaaggcggagccaccttgtttttaaccaccttgaccttggtgcggttgccgatcacctcagatccgttcttgagctgctctccccgccgcacatccaggcgcacgctcgcatagaacttgagcgcgcggccgccggtggtggtttcggggttgccgtacatcacgcccaccttttcgcgcagctggttgatgaagatggccacggcattggtcttggagatgacgcccgttagcttgcgcagcgcctggctcatcagccgggcctgcaggcccacgaagctgtcgcccatatcgccttcgatttcggccttgggcaccagcgccgccacggagtcaatgaccacaatatccaccgcgccggaacgcaccagcgcctcgcagatctccagcgcctgctcgccggtatcgggctgggagatatagagatcgtcgatgttgacccccagcttcttggcatatacggggtccagcgcatgctcggcgtcgataaacgctgccacgccgcccgctttctgcgcctcggcgacacagtgcagggccacggtggtcttgccgctactttccggcccgtagatctccaccacgcggccgcgcggcagacctcccacgcccagcgccatgtccagatccaggcacccggtggagatgacctgcaggttggtatcggcaaccttgtcgctgaatttcatcacgctgcccttgccgtaggttttgttcagctgggtcagcgcattttccagcgccttcatcttctcctcgcgcagctcgtcctttttcacaatttcctttttgacggtttctttcttggccatcttcccataaacccctctttcgtcctgcttcgtatcgggcggcgtacctactccagggcctccaacgccatctccagcgcgcgggcggcgctctgtgcgcgcacctgcgcccggtccccggtaaagtggcattcttctacgcgagtgcctttggggctgctcacgcccagaaataccgtgcccaccggggtctgcggcgttccgccggtggggccggccacgcccgtggcgctgaccgccacatctaccttgagcacgcggcgcgcaccctcggccatctggcgggcgcacggttcgctgaccacgcccacggtgtcgatcacctgttgggatacccccagcacctcatgcttcacgcgggggtcatagctgaccacgccgcccatgagcactgcgctggccccactcacatcggccaccgaagaagcgatcatcccgcccgtcaggctctctgccgtacccagggtcctgtgtgccgccccgaagcgggcgaccacctgctcgctgatctgctttagccgcgtcacgccgctcaccttccttatatcatttcatcgttttacgccggtccggtcagcgcaggccgccggcaaacagcgcgcggttcttccagaaataatccacgccgctccacagcgtcatggccatggccaccgccagaagcgtccagttcagtgccggaacacgaagccagccgatggcgctcagcagataggccaccagcatggccatctgcgtgcaggttttgatcttgcccagcttgccagccgcaatcacccggccctgctccatggccaccagacgcaggccgtccaccgccagttcacggaagagcaccaccacgcaggcccacgagggaatcaacccctgcccgcacaggctaatcatggtggacaacaccagcagcttgtccgccacggggtccataaatttgccgaagttggtcacgatcctgtagcggcgtgccatccagccgtccgcccaatccgtcaggccgcccaccagaaacagcgccagcgccacgccataggaccaggacgcgccgataatgatcatcagcacgatcagcgggaccagtccgacccgcaggagcgacaatcgattgggccagttcatagcttttcccccgtcagatcgtaggtatcggcgccggtgatgcgcgccgtgataaagcagccgatatccgcttccgagacgccgcccacgcggatgacgccgtcggtctccggggcctcggccgcggagcgcgccacgcccaggccgtccgcgcccacgctttccaccagcacccgctcctcgctgtccacgcgaagccggttgcgctccagtgaaatggcctgctgctccgtcatcagccggtccagccgccgctgtttcacgtcctccggcacctgatgaggcatagctgcggcgggcgtatcatcctccgccgagtagcaaaacgcgcccagccggtcaaagcgcacgtcccggacaaagtccatcaggcgttcaaactgctcgtccgtttcgccggggaagccggtgatgaaggtggtgcgcagcgtaaagcccatctcccgcgcctttttgagaaatgcgcgggtctgctcgatatcgccccggcggttcatccgcctgagcagctgcggatcggcatgctggaggggcagatccaggtagcgacagatgttgggccgcgaggccatggcctccagcagggtatcatccacctcgtcgggatagcagtagagcacgcgcagccattccacgccggggatatccgccgcgcggaccatcagttccggcagcaggctgcgcccgtgcgtatccatgccgaagcgcgaggtgtcctgcgccaccagcacatgctccttcacgccctgctccgccaaagcgcggatttcatccagcacgctttgcatgtcgcgggagcggaacccgccgcggatgagcggaatggcgcaataggcgcagcggttgtcacacccgtcggcgatgcgcacatacgccgtatacggcgcggtggtgagtacccgctcgccgcacagcacggttgactccggcgcgcagtagctgggccgcttgcccgccagcgcctcctcgatcgcgcgaggcagcatggggtactggctcacgcccagcaccagatccacctccggcatatcctgcaaaatcgcctgttcatagcgctgcgtaaggcagccggtagccgccagcagcttgagcttcccttcctgtttataccttgccagggacagcagcgtatcgatgctctcctgcttggccggttcgatgaatccgcaggtattgacaatcagaatatccgcctcgcgctcatcggcggtgatgcggtagcccgccttgcgaagaatacccagcatcagctcagtatccacgcgatttttgctgcacccaagggaaacgacgcctacgctgtacaccgtcccttttccctcctatcgcttcttgacggatcgacgcgcacacatgtttgtctctcctggcgttattttaccatagtttcatcagaatgcaacccaccgccgccgcttccggctccttttgcggtttttcggaatttccataaaaaattgacttcctccccccgggtgtgatacgataatttgtgccggcgtttcagcgccgcgcgcaggaagg

SEQ ID NO: 360 - DNA, 32759 bp, Unknown
  16S sequences of unknown bacteria
ggggtggattcgaaccaccgaagtctgcgacggcagatttacagtctgctccctttggccactcgggaacctacccatgttctttccaaaggtggaaagtggagccggcgatgggacttgaacccgcaacctgctgattacaaatcagctgctctgccaattgagctacaccggcacagcccacggcaaagaagatggcgacccggaaggggctcgaaccctcgacctccagcgtgacaggctggcattctaaccaactgaactaccgggccataatgctggtgggccttcagggacttgaaccccggaccaaccggttatgagccggccgctctaaccaactgagctaaaggcccatagccattgtaaggaaaaatggtgactcctaggggattcgaacccctgtagccgccgtgaaagggcggtgtcttaaccacttgaccaaggagccacgctgttggtgccgcgtttctggtcggggtgaagggattcgaacccccggccccatgctcccaaagcacgtgcgctaccagactgcgctacaccccgtcacatcagcccgcacaggcgacgatgattattgtactcattttcccctgccttgtcaaggggtctgaacaaaaaaattgggaaagcttccacgcgtggtgaaaaatgcgttttccggccatgaaaacgccctccgtgcgttttgcagcggagggcgtccaggggtttccccctgtggcaaggggaaaaggaggaatttggatacccggccggattacctctgatccggcccggtctacggaggtcaccggtccacgggatgtgagggggtaattcgcatcccgtcttctgatgacatgcacagcttaccagacaaatgtggcgaatgtgtgatgaaattgaaaacgatacgcgatatttttattcccgcaacaccacaccgtcctcgccataacgcccgcgaagccgggatagcgtctccgcctccccatcgcaccagaacatccggttgagcagaagggcgatgccttcatccttgagctttacatacacgggcacatcgccggggtgcgcggcgcattcggccttgatgccctccatttccgcgcggctgggcgcgagcacatagagctttcgtccggcgcgcttggcaagctgcgcgtcggtcagagcgggcgcttccgcgggggcatgcccccgcgccgggcgcacgtcccgccggggttccgtccgagcggaagccatcttgagcggctctgccatgcgctgggcagcgttgcgcccgtccagcggccgcacggcgtccaccagcagtttgggttcctcctcctcccggaaggacagctttccatcgagaatgaccaggctgtccacattcagcaggggtacgtagcgctcgtacaccttgggaaacaccagcccctcaatctgcccggtcagatcctccagggaaaggatgcccatcatcgcgcccttcttggtgatcttgcccttgcacagggtcaggatgcccgccatgctgacctgcgcgccgtcatagtctgcgccgtgttcctcgccctcggccatttcgcgcacgtcggctacggtggtaaagcccgagcgaagcagatccgccgcctcgtccagcggatggccggtgatgtacacgcccgtcatttcccgctccatgctcaaaagcgccttgcgcggatgttcctccatgggcggcacatcgtacattatgcccgagggcgcgcctgcccccagccccatatcgaacagcgacatctgccccgccacattctgacgccgcttctgcgccgcgtcatccatcagacgctcgtacacgctgagcagctgtgcacggttgaggcccagctcgtcgaatgcgcccgccttgatgaggctttccacggtgcgcttgttgagcatctccccgctgacccgttcggcaaaatcgaagatgctggcgaaagccccgtgagcgcgttccttttcgatcagttccaccgcgccgtgccccacgttcttcacgccacccagtccgaaacggatgccgggagtgccgttttcgtcggtgtccacgctgaagcgccatacgcttttgttgacgtccggcttgagcacgggaatgccgttctgacggcaatactgaatatagccggccaccttgtccgcattatccatcatggagttgagcgtcgcagccataaatggcacggggtagtggcgcttgagccaggcggtctgcacagccaccatagcataggccgcggcatggcttttgttgaaagcatagctggcaaaggcgctcatttcgtcgaagatcttctctgccactgcacggggcacgccgcggcgcaccgccccgtcgataactacgttgcccgcctcgtccgtcatgccgtcaatgaagtattcgcgctccttggccatcacatcgcgcttttttttcgccatggcgcggcgcatcaggtcgctgcggcccaggctgtatcccgccaggtcgcgcacgatctgcatcacctgctcctgatacaccatgcagccgtaggttacctccagaatggggcgcaacagcggcgtttcataatgcacggtcgaggggtccgtcttgcctgcgatgtagcgggggatggactccatcggccccggacggtagagggagatggcagcgatgatatcctcgaagcaggagggcttcatattctgcaaaaacagccgcatcccgccggattccagctggaacacaccgtcggtgtcgcccgcggagatcatgcggtagacctccgcgtcgtccagcggtatgtcctccggcttcatgtccaccccctgcgcgtgcatcatatccagcgtatcgcggatgaccgtcagcgtgcgcaggcccagaaagtccattttcaaaaggcccagccgctccagcgtacccatggggtactgagtggtgattacgtcgtcattgagctgcaagggcacgtattcggtcacgggtttggcggtaatcagcacgccggccgcatgggtgctggcatggcggggcatgccctccagcgtgagcgacatgtccagaagtcgccgcacctgcgggtcgctctcggccagctgcttgagctgcgggctgatttccagcgccttggtcagcgtcatgtccagcgcgaagggaatggccttggccacctgatccacggaggcatagctcattcccagcacgcggcccacgtctcgcaccacggccttggccttcatggtgccgaaggtgatgatctgcgagacgtgatccgcgccatatttgcgcgccacgtaatcgatcacctcctgccggcgttcatagcagaagtcgatgtccaggtcgggcatgctcatgcgctcggggttcaggaaacgctcaaagagcaggttgtatttgagcgggtccagcatggtgatgcccagcgtataggccacgatgctgcccgcgccgctgccgcggccaggaccgaccatgatgccgttgcgcttggcgtagtcgataaagtcccacacgatgaggaagtagtccacataccccatgcgggaaatcatgtccagctcataggcaaggcgtgtggacggctcactccgggggtcattcgcctgatcgggatagcgcgccttgaggccctcacggcacaggcgggtgagcatttccagcgccgtttcacctgtatcgatgggaaagcggggcaggtgaagcttgccgaattcaaacgtcacctgacagcgcgcggcgatctcgcccgcctgatgcacggcctggggacagtcggcaaagagcgaaagcatttccgcctcgctcttgacgtagagttcctcggtttccatgcgcatgcgcgtctcatcctgaagggtcttgcccgtctggatgcacatgagcacctcctgggcggccgcgtcctcgcggtagagatagtggcagtcgttggtcgccaccagcgggatgcccgtctcccgcgccagcgccttgaggcgggggagcaccatgcgctcctccggcaggccatggtccatgatttccacaaagtaattgcccttgccgaaaagcgcctgcatctgaagcgcatactttttcgcgtcctccgtgcggccctgcaacagcagcttgggcaaatcgccgctgaggcacgccgacaggcagatcagcccctcggtatgctgcctgagcaggttatagtcgatgcgcggcttgtagtagaagccctccgtaaatccggcgctgacgagcttgaccaggttgtgatagccggtctggttttcgcacagcagaatcatgtggctgtattcacgcgccgcgccgtgcttttcaaagcggtcgggacagatatatacctcacacccgatgatgggggtgatcccctcctccagacaggcgttatagaagtcgatggcgccgtacatcacgccgtgatcggtcacggcggcatgcgtaaagccaagctccttaaggcgcctggccaggggcttgatgcggctggccccgtccaggaggctgtattcggtatgcagatgcaaatgggcgaaggacatggctgtctcctttgggccgggacctctaatcggtcaccagccagctgttggggtcattgtaggccatttctgccagcgcggcggcgatggcctgctgggtttcgcggtccgccaggccattgacggtttttccctccatgccggcctggaagtccatcacggcgcggcgcgtgttgccgccgaacgcgccggtgaggtgcttttcctccaggtagcccagggtatgcagcgcctgctggagccagagcactttgtcgccccggttgccatagcgcatggtggtgcccaccacatcctcgcacgcgccaaagcccagcacctggctgttgttgagcgagtaactgttgcgctgtacgctggaggggttgttgccctcaatgacatggatgatgacgttgccttcggcgtcccgggtgcagtattccaccagggccacatgctcggtatccccggcctcgttgtagctgaagaacaccaggtcgcccgcgcgagggatgtattcgtttttctgaagcaaatgatcgctgcccagcagccactggtagccccagtccggacagttgcccttgcggtagacgaagcggccccgctcgatgaaccagtctcgcccggtgttctggccgctgtagttgggatagaccacatcgagcaggttggtgccgtagcgctgatccacctggtccacgcaccagcagatgaactcggcgcaccattcagcgttggcgtctccgctccacaggccgtatttggtgaagctgtgaggcccctcggcatagcccagctcgccccgcgccacctccagcagcttttccacaaaatccggccgagtgccttcctcgatgcgggtttccccctcctcgccaggattatctacatccgaaatggcatatacctgttccggcggcacgggcgtggcggcagggtcaggcgtcgcggtagccctctcctgggcggcgagaacttcctcgtccaggtcctcgtaggaggtaccccgggcaccgggcgcggccagcagcagcaccgccagcagcacggctaacggacgtttccggctcacggcgttcacctcctcagcggccaaaggcttcgatgccgcgcagcaattcaaattcccggatggagcgaacagtggtgaacatcttgcgcgtcaggatggcgcctgtacggtagaacaggcagatgaagggcacgtccgccgcgaactgctgctgaatggcctggctggtataggcgaaatccgcctggttttcctgggtgcgcagggtgtcaatcagcgaggtcatctcgctggagttatagcggccataattctggtcgttgccctttcgcaggaagaatcccacgtccggcaccacgtccatctggaaggagcacagagccaggtcaaatcctccgttttccagcacggccttgcactcgtcatagctgacggtttcaatatggatgctgatgcccacctccgcgagcatgtctgagatcatgttggcggtttcaaagcgcacatcgttttccgggtcctcatacacccacaggcccagcaccagatgcttgggctcctctgcgccttccactggcttgtccagaattccgttgccatccagatccacccagccatcctcggccaaaagctctttcgccttgtcgggattgtagacgaaggtgctctcctgatcgtagtacagccagctgtccgacggaatgggggtatcggcgtcggtggtcatgcccatatagacgttttgcgaaatggaatcgacgttgatggcatagcggatggcctggcgcaccttgaggctgtccagcgggaaggaacgctcgcggtggttgatgagcaacacctccagctggcgcgtcgaataggaaatggaaagcgaattgatgccgctcttgtactgcgcggccgccaccgaacgggtgaacaccgtatccacgcggccgtactcataggcgttgatcatgtccttgttgttgggatagaaggtaacggtgatttcctgcacctggggctgggtctgccaccaggcggggttggcgttgagaagcatgtagctggcaggctcaaagctgctgatgacatagggacccgtgcccacggggttggccatttccacctgggaggccggcaccacggggaaggtcatgctgtaaagcaggccgtaataatcgcgcgcggccttgaccaccacggtgcggtcatcctgcgcggtgaaggaggacaccatatagcggatgttgccgtaaaagccgcggtccaggccctggtcgttcttggccaggttcaggatatactgcccgctggctaccacgtcctgcgcggtgagcggcgtgccgtccgaaaaggtgatgttctcgcgcagggtgaaggtccaggtctggcccccgccgctctcggtccagctttcggccagcaggggctgaggcaggccgttgtcgtccacggtgaccaggctttcatacaccacgccatacagggacacgatatcgcgttcctgcggcgtgaggggacgaatctccgtggtgcgggtggagatcatgcccacaataagagagtcctcgacgttttcgccgaaggcggacaggggcacaagcatcagacaaagcagcaggcaaagaactcgtttcatgcatcatcctccgtggcttcgtaataaatccgcttataggcggcatagtcgttcaggacacgggtggcgtactgcttggtaggaccgtcgatcatgttctccagcgcaatggtcaggccatcctggctgtagcgcgaatcgttgagccagttctgcacctcgccctggcctgcgtggaagctggcggccaccagcaccgggtcgccccggaagcgttcgctcaaaaagttcagataccagcagccatattccacgttggtttccgcgtcgtacatgctgtcgaagctgtacgctccggtgccgcccatcttttcatagatccagccggcggtgtcctccatcagctgcatcaggccccgagcgcccacactgctttccgcgtcgggccggaaggagctctcgttgagcacgatggccgccacaaaggcgggagaaaggttgtatttgccggccttctcctcgataagttcctcatagcgcaggggatgggcctcccggatcgcctcctcctgggccgcgcgggcggcaagcacctgctcggtctgccggtccatgctcatgcgggcaatccacagcccaatggccgcaaacacgcatgcaaacgccgcgatgcccagccacgggatggaaatccgggcgcggtgcggttcctgttcttcctcatcctccacatgccagccctgatccggctcgaggggggcggaggggtccggcaggggaacgtccaggtcgccgtatcccaggcgggcggcataagccctcaccggatgggtatccgcgggctcaaaccgggcggcggcggcataggcctgcgcccggtccgcctggggcgcgggctgcgccgtctcctgtatgggcgcggaggaacgggcctcgcgccgttcccattgagcacggtccggcggataggaccggcgtgaagcgggcgggggagcgctctcgcttttggcggcttcgcgctgccggctcacggcatactgcgcgccgtgccgccggtgcacgggctgctcggcctgccggcgttccagctgcagctgctcctgaagcagctgacggggatagcccgcctgctcgtaatccgccatggtctggggaagcgggccggaggggcggggctgcgcgggcgtgcggcggcgcaggggccggcccagcagatcagtaggcgcgggtgcctcttgggagggcggcgcggcctgtacgcgcgggccttcggggcggcgcagcggcaaattgttctgctgtgccacgcgcagccattcgggcatgtccggacgggccggaggctcgtagcgtgagccgtcctccgccaccatgacgggcggatcggcgggcatggcgatgcgcgcgcccgtgccgggggcattcaccgtggttgcggcaggcaccccggcttgcgcggccggagaggttccgtccgcttcgggccgcccggcaccctctgcggtttgagaggcgggacgggcactgcgggtgcgccggggcggccggggcgcttccggaggcgggtcgaacgggttatcggggatggcataatcttcgggataggcgatgctttgcgcaggcgcggggccgtccgctgcggagggcagctttttcatcacggtacggcgggtggacgcctccggctccgcgggcgtccttcgggcccgcgtgccgtagatatccaccgcgtcccgttcgtagggggcggcgcggtgccgcacgatgggggcagagggcgagtccttttgatgaatcgcctgctcctgctgcctgcgccggccttcgctgacggaaggcacatagctgtagtccagcggcgcgccgtcatcgtccgggctgcggaaaaagacgggacgaacgttcatgacaattcctttcagagtgagaattccgggttgctccactgcagatagagggcgtgcacctcgcggcgaagttcttccatcggcttgtcggtatggatgatgatgtcgctgcggcgctccttttccgcaaggggccactggctgtggatgcggcgcagcgcctgctcgcggtccagaccgctgcgggtcttgagacgctcgatctgcttttcctcgggggcggaggcgcacacggtcacatccgccaggctgctcagacccgtttcaaaaagcaggggcacatccaatacaacgaccagcgcgcccattttccggcaggtttcgatctgctcgagcatgtgcttctgaatcaggggatgcgtggcggcgttgaggcgctgcagcgcgtcctcgttcccaaacacaattgagctgagcacggggcggttgagcgttccgtccggatagaacacaaagtcaccgaacgcctcatgaatcagcggcagcgcttcgcctcccggcgcggtgagctgagcgttgatggcgtccgcatccacgatggacgcgcccatgcttttcagaaggcttgcgatcgtggactttccgcaggcgataccgccggtcagaccgatgatcttcatttacagaacccctttctatgctggatccggaaaagcaccctttccggaatcaatgcgccttttcccagtcgctgccgcgcgatacctcggccagcagcggcaccttgaggctgaccacgccctccatggtgctttgcaccagggcgctgacttcgtccgcctctgcgagggggcattccaccaccagctcgtcgtgcacctgcaaaatcagccgcgcgcggtaaccgccttcctcgagccgccgtgccacctgtaccatggccagcttgatgatatccgccgccgtaccctggacaggcgtattcatggcggcgcgctcgccgaagctgcgcacgttgcggttggggctggccagctcgaacagctcccgccggcggccaaagagcgtttcggcataccccaaagcgcgccccttttccacgcatgcgtccatgaaggcgcgcacgccggggtagcgctcaaaatacgttctgataaagccatcggcctcccgccgggtgatgtgtgcgttgcgcgccaggccaaagccgctgatcccgtacacaatgccgaaattcacggctttggcggaacggcgcatctcaggggtgacctggtccatgggcacgccgtgaatttccgcggccgtgcgggtatggatgtcctggccgcgccggaatgcgtcgcacatggcggaatcgccgctcatatgggccagcacgcgcagctcgatctggctgtaatccgcgtccagcagcacgtttccctcgcccgccacaaaggcgcggcggatctctctcccctcctcggtgcggatggggatgttctgcagattgggctccaggctggaaatacggcccgtgacggtagcggtctggtcaaaggtggtgtgcacgcgcccgtcgcttccacgcagcttggtcaggccttcgacataggtgctttgcagcttggccatcctgcggtagcgaagcagcggctcgatcatggggtgatagggcgccagcccctccagcacctcggcagtggtggaatagccgctctggctttttttctgtggggcgggcaggcccagcttgtcaaagagcacctcgcccagctgcttggggctgttgaggttgaactcgcccacgcccgcggaagcgtacacggcggcgcggcattcctcgatttcacggctgaaccaggcgctcagctgacggagcacgccctcatccaccagaaagcccacccgttccatatcaaacagcacgcgggtgagcggctgctccatatcccgaagcaaagcctgcaggccgcgcacctccagccgcttctgctgcctgaggaacagcgcatacacgtcgtaggcggtgggcgaggggaacgccgccccgccgtgctcggcgctcagcgacaggggcagggaataatccttctgcgccgtatgcagcagataagcggcgatcatggtatcatgcttcaccacaggcaggggcaggcggtagcggtccagaagccgccatagcgccttggcgccatgcaccacaaagggagcctgcgaaaacagctccttcagcccctggtaaatctgatcgtcgtacaggcccgcgccggtcaggtcgcgcaaaataggcatgcgccgcaaaagcatatccggtgccagcagggtgatttcatcctccgcctggcacagggccagccattcgggcttgcgggcaagcagcgcctgcgcggccgcgcggatttcctcctccgtggtcagcgtctgttcgccggccagcggcgggggagagggcaggtccttctccggctccacggccattacagcgggcgcggaagacggcttggcgtcctttcctgcggcgcggcggctggcagcggtgctgcgcgcctccacctgcgtgggcgcgggagtttctccgcccagcagggcggcgatgctgcggctgatggtcttgagcccatattgctccaaaaggggctcgcccagcgccatttcatcccagcggcagcggtcaaagtcgatctccaggggcgcgctgcggcagatggtgcccagctcgcggctgagcagcgccagatcgcgtccggcacgcagcttttcgcccagcttgcctttcacctgatccgcatgctccagcacgccgtccagcgagccgtactgggtgatgagcttgagcgccgtcttttccccgatacctggaatgccgggaatattgtcgctggcatcgcccatgaggcccttcatgtcaggtacctgcgccggggtgaagccataggtatcatatacgccctgcgcgtccaacagcaggctttcggtgatgcccttgcgtgtgaggatgatttccgtttccccgcccaccagctgcaggctgtcacggtcgcccgtgagcacataggcgtgaatgccccgctcgttggccaggcgcgcggcggttcccagcagatcgtccgcttcgtagccctccagctcgcagatgcgcacatgcatggcctccagcatctttcgcaccagaggcagctggggccgcagttcctccggcatgggcttgcgggtggccttgtagccgtcgtagagggtgtggcggaaggtgggagcgtgcatgtccatcatcacgcacagcccatccgggcggtattcgcccagcgccttgatcagcatgctgaaaaagccatgcacggcattggtataggttccgtccggagcggtaagcagcggaagggcgtgaaagccccgaaaaatcagactatacccatccaccagcaataccgtctgcttgtgcgtgtcgctcatgagacctccatcggggcggcacggccggcacgcccaggtttgttgtaccctttattataccacaggtgggaattggcaaacaaggcatgcgggtcatccctcggtgtagcaaacgtaaaacttatccccggtgcgaagcgctcgtgacaaaggctttcatttttggtatactgattgttaacggtttgacagacattggcgaacggcccgtttgcagggggaggggcgcaggtgacggaggatatcctgttctttttcgaccgcgaaccacaggctttgagcctgttcgagctgctctgtgaacaggccatggcgcgctggccctccagcaccctgcgcgtgcagaagacgcagatcaccttttccgatccgcggggatatctgttcgcctcccgcccccggaggcgcggcggcggcctgatggtcagcttcggcctgagcgcgccgctgcagagcccgcggctgtttgcagttgccaaccccgcgccggggcgttatacgcaccatgtacaggtccgtgatttctccgaactggatgatgaactgatgcaatggattgcgtggtcgcatgagaatatggccgcaaggcaaaggagataaaaggaaatgaaaaggaaaatgaagaggcgcctgtgttctctgctcctggcgtttgcgctgctgccggcggtcgcaccggctgaggtggtggggcgggatggcatgtatgccgaccggtatatccaccgcatcgaggcgccgaacggacaggcgctgtattatctttctacggaagaagatgcgtttgtaaccgctcgggacgtgaactttgacggcgtggacgaccttgtggtattctctgcacggggcgcgagcaacgcctgggtcctgttctttgtatgggacgggaacgcgtatgtgcgcgcgacctgggacgcgggcgaggatacgggcctgcccaactacgagcttctgcccgaagacgcgctcctgctggccagctgcgacgacggcctggcaggcgggcttcaccgctactggctgtaccggtgggaggggacggacctgcgccttgtgcgcagcgcggtgagcgaaatggatcaggaaacggcgattgacgcgcaggccggtaccatcgtcaccacggtccgcaacaaccgcatgtccgtgcgcgtgaccgagccggacgggcagggcggatatcgcgtgctgtgggagggcatcgtgaccgaggagcaggcggccaatgatccgcaggccttctctcaggaagaggccgccttctggcagggattcagccgcagcccgattttgtaacttcttccgcgaaggcctcggctctgtacgaacgaagacaaatggtgtacaataggcgttgaattgtgttctgcttgaaccgggaggggagggacgttcatgcgcgtcaggcggctgcgcacgctggtttgcgtgctggcgatgctgttcgcccttgcgcctatccgcgcggggtgcgcatccgacgctgtgacgcaggacgaggcctctgagcttcttgatgcgcaaagccgcagcgaatatgcgctgctcattggcgtggaccattttgtctcccgcgcggatacctatcccagctccaccaacaacgtcaacgccatgcaggaggtctttcagggcgcgctcaatcccttccgcgccatcatcgtcccgcccaacccggtgaccacggtcgagcagctgaccgctctggttcaaaagacgttcggcgcggccgggaaaaatgacgtgtgctatctctacctgtccacgcacggggtatatgatcctgccagcgggcaggagccgctgcttttgctcagcgacggacagaccgaaaacggcatcacccccgcgcagctggaagcggccttcgacggcatcctgggcaccaaggtaatcattttggatgcgtgcaattcgggcgcgtttatcggcaaggggcttccctcgcttccgcaggaggtccacttcctgggcgacgatttcaaggtgctcacctccagcggggcgctggaggaaagctggtactggagtgtggacgatcaaaacgaaagcggcatggccggccagggttccttctactttacgcaggcgctggcgcagagcctgagcgcggcttacggataccccgcggaccagaaccgcgacggctgcgtggtgctcagcgagctctacgaatacctggtgctcaaccatgctgcctccaccccgcaggtgtatccgcagtcggatgattttgtggtcttccgctacgatgtctcccagcccctgcctacgggcctggcccgcgcgcccatcatggatgtgaccttttcgggcaccacgctcagccgttcctcacggcagattaccattgaatttattgccatgcgcccggtgcgcgtggcttatcaggtggtctaccagcgcgacggcaaatgggagtttgagcatgcccagctgatttatgacgaggccgagcgcttcaccgcctacggcgaccagcccggcgccatctccgcgggccgaaaggtgcgcaccctcactttgggtgagctggacgagggggtgtatggctacgcgatggtgcagctggtcaccatcgatcagggcaagctgacggtgcacgccggccgggtcatcagcattcctccggacgcgacggatatggttctgaccgcctccgtggccgatacgtttgatccctccggcggacgtgagctgagcatctttatcgggcacgaatatccctgtgcgctcagcgtaagcattttggatgaggaggaccgggttgtctaccgcctgtgccaccgccagagcacccgccccatgcagatgaacccggagggtacggtgctgtactgggacggccatctcaaggacggaaccgcggctgaaccgggtgtctaccgcgtgcgcgcggaggctgtgatgaacgacgccgccgtgacggtgatttcctcggcgtttaccatacagtaaaggaggacccagatcaatggccgacaaattgatggtggttatcccctgctacaacgaggaggaggtgctgccggaaacctcgcgcaggcttgtggaaaagatggctgagctgacccggaagggcctgatctcgccggagagccgcgtccttctggtggatgacggcagccgcgaccgcacctgggagctgatcagcgccctgcacaaggaaaacccgctgtttgagggggtcaagctcagccgcaaccggggccaccagaacgcgctgctggccgggctgatgaccgcgcggggccgctgcgacatgtccatttcgatggatgcggatttgcaggacgatatggatgccatggaccgctttatcgaaaagtaccgggaaggatgcgatgtggtctacggcgtgcgcaaccggcgcgataccgataccgccttcaagcgcggcacggcgctgatgttctatcgtctgatgaaggcgctgggcgtggatatcacctataatcacgcggattaccgcctcatgagcgcgcgggcgctggaggcgctttcgcagtttggcgaggtcaatctgttcctgcgcgggctggcgcccctggtcggctttcaaagcgatgtggtgacctacgaccgcagtgaacgctttgcgggagagagcaagtatcccttcaaaaagatgctggcttttgccatcgacggcatcaccagcttttccgtaaaacccctgcgccttatcaccacggtgggcgtgattatcttcatgatttcgctgctgatgctgctctatacgctggtatcctggatcgccgggcatgcggtgctgggatggacgtctaccctggcctccatctggctcatcggcggcatccagcttctgtccctgggtgtgatcggggaatacaccggcaagatctacaacgagtccaaggcgcgcccgcgctttatcatcgaccggtatctcaacgaccggggcgacgcccccgtggtggaccggcgctgaatggacaaggcaacgaaacatgccccgcggacgcaccaatccgcggggcattccatgtccggaaatctattttttctttgtcgtcgcactctgcggcacaatatcgcctacgccgctgagcacatagcgcggccggtagggaaatttgcgcatctcatgctcggtggtcacgccgctgagcaccagcacggtatcgatgccgcactccacgcccgcgacgatatcggtatccatgcggtcgccgataatggcgcattcctccggcgatacgcccagcaggctcaggccatggcgcatcatcagcggattgggcttgcccaggtaataggcattgcgtcccgtggccagctcgatggggctcatcagcgccttgcaggccggcacgatgccgccctccacaggaccggtcaggtccggattggtaccgatcagcttggcgccggcgcgtaccagctgcaccgcccgctcgattttttcaaagctgtaggcgtgggtctcgcccatcaccacgtagtcgggattgacctcgttcatggtaaagcccgcttcgtacaaagcgcccaccagaccgggctcgccgatgacataggcgctcccgccgggacattgctgcttgaggaaggcagccgtgcttaacgcgctggtatagaagtgtttttcatccacttccaggcccaagcgctccagcttctgctgcagttcctttggcgcgcgttcgctggaattggtcaaaaacaggaatttcttgttctcccgcttcaaaaaatcaacaaactcccgaacgccgggcaaaagcagattgccgtgatagatcacgccgtccatatcgcagatgaagcccttcttattgcgaagcgcttccagtgtataagcatgcgcctccaggttggtaacagtcatggacattcacctcatttcttggtttgctggggaaaagtcccctgcacatagtatatcacgtttctggaaaagagcaacatgacgtgatatggttcaatattattccaatatgaacatttttattcccgctggatggacccttcctttgagcgcaatgtaaaacctggatacaaaccttgacacctttcccgtttacgtgttatgcttcgttcgtatattcctatttatattgaggcggcgtattctgcgccgcgtggaggggtctgtcatgacggaaaaccgggaacaattgcgcttgatcgcgcttcgcatccgtgatctgcgcgacatctccggcctgagcgcccaggaggtcgccagccgggccgggatcgatgaggacgaatacctggcctatgaaacgggagagcgcgatttttctttttcccacctgttcaatatcgccgaggtgctgggcgtggatatcagcgatcttctgaccggcgaaagccccaagcttcacggctatgtgctcacccgccggggacaggggctcaagttcaaccgccgccagcagtacgaataccatcatctggcctacaacttccgtgacaagctggccgagcccttcatcgtaaccgtgcgcgaggatgcgcccggcactcagaagcaggcccacagccacgaggggcaggagtttgactacgtgctggagggaaccctcaaaattgtgttgggcggcaatgagctgtacctgcagcccggcgacagcctgtactatgattccagcctgccccatgtgatgtatgccgtggagggggattgccgcttcattgcggtagtcatcaaagagggggcgaaggcataatgaaaccgctttgctatgactacctcaactgccccacgaccttctccacctatgatgatttcaacaagaaattccgcattacccgcccggagagcttcaactttgcctatgacgtggccgaccggatcgctcaggaggaacccgaccggctggccgtgctttggacggacgaaaccggtgcctgcatccgttatacctttggacagctgaaggaagaaagcgaccgcgcagccaacctgttcaagtccctgggcatccgcaagggcgacaaggtgatgctgattctccgccggcatctggaattctggcctattctcatggctctgcacaagctgggcgccgtgggcgtgcccgccacccatcttctgaccgaaaaggatgtgctctaccgcgtggacgcggcgcgcatccagatgatggtcatctcccacaaggacgagggcgtgctcagaagcgcggaagtcgccatgcaaaagtgcgaaagcctcaagcacgtgatgattctgcgcggccagcgcgagggcttccacagctatgagcaggaaatgcccctgcaaagccccgtgtgggacaagcccacgggggacgcctatccgcacaaccatgaccttttgctgctctacttcaccagcggcaccaccggcatgcccaagatggttacgcatgaccattattatccgttgggacatatcgtgaccagcctgtactggcagcagtgcgaggacggcgggcttcacttcaccatttcggaaaccggctgggccaagagcgtgtggggcaagctctatggccagtggctgaccgggagtgcggtctttgtctacgactttgagcgcttcatcgcccgcgacatcctcaagcagatgagtacctatggcgtgaccaccttctgtgccccgcccaccatgtaccgctacatgctgcaggagaacttcgcgggctatgacctgagccacctgcatcactgcgccgtggcgggcgagccgctcaaccccgacatggccgccgagtggctcaagcgcacgggcattccgcttctggaggcctttggacagacggaactggtggtcacgctggctaccttccccttcatgaaggtatgccccggcagcatgggcaaacccagccccatctttgacgtggacctggtggacgatcaggggaactcctgcccgccgggcgtgacgggcgagatcgtcatccataccgatgacgacgcgctgcccatcggcatgttctccggctattatgaggacccggagctgaccaagaccgtctgggacaacggcctctaccacaccggcgacgtggcctggcgcgatgaatggggctactactggtatgtgggccgcgccgacgacgtgatcaagtccagcggctaccgcatcgggcccttcgaggtggaaagcgcgctgctggagcaccccgccgtgctggaaaccgccatcaccgccgcgccggacgagcttcgcggccaggtggtcaaggccaccatcgtgctcaagcccggctgggaggcgggcgacgcgctcaggaaggaactgcaggagcatgtcaagcgcaccactgccccctacaagtatccccgtatcatcgaatttgtcagcgagctgcccaagaccatttccggcaagatccgccgtgtggagctgcggcagaaggaccagcgctaaatgaacctgtcgaaaaggaggaagctcccccgatgctgcgaatgctgaaacgatgcgccgcgctcatgcttctgagcgcccttatgctgggcggcctgccccgtgcctcggccaagaccgtggaagaatggctggagggatttgagacgggcgaaacgtggttcggggaggacttcgcctacgatatcaccgacgaggaagcctgctgggagctgttgcagcggcccatcaccgtgctggacgccgggcagcgcgaggagatctatccccgcgtgacccccggcggcgagaaggtcaacgatgacaagctgggcggcttcatcaacggcgcgtccgccgccgtgcatgtgctgggcgaggacgaggacggctggacgctgattgaggggctggattactacaaccgcgtcatccgcggctatgtcaagaccagcctgctcaaaaccgtcacgcccaacgacaagtatggcgtgatcatcgacaagctgacccagcggctctatgtctttatcgacggaaagctctggtccagctgctcggtgtccacgggcctgcccaacaatgagcagccctacaacgagaccgccgccggcgaatacctgatcgtcagctgggtgggcgatttcgacagcgagggcatgatctgcggcatggcgctgcgcttcaacggcggcgacatgattcacgaggtaccgcatgtgctcaacgccgacggcaccaagagctacagccgctgggaggccctgctcggccagaaggccagccacggctgcgtgcgtacccagcgccgcgccaacgaggacggcctcaatgcccagtggctctgggacaatctcaagcgcaacaccaaagtcctcgtctgggacgacaagggccgcaaaatgccctacccggaggacgatttggaattgttctacaacccggaggggggccagtattaccatgcggatgcctattgctccagcgtgcgcgaccagtacctgcccctgaccggctttacctacgccgagctggaaacgccggcttacaaggagctcgagccctgtcttacctgccagcccccgcgtgccaaatccgagattgccaaggaaaacctggagcgcggcgcgattacggaagaggaatacctggcggcgctcacgcccatcccctatccggatgatgccctggaactctactacaatcctgacggcggacagtactaccattccacggccaactgctccagcgtcaaggaccgcttcctgccgctgacgggcttcacctacggcgagctggacacagggagctttgcgaagctgaccccctgcccctactgcagccccgtgcagcgcaaggcggaaattgacgaggaaaaccgggccatgggcctgaccacgcctcagagtacctcacagcaggcgtccgcctccgcagaggaagaagaggcgcaggctgtgccggccatggccgatatggatgaaaccgaagtgcatattcagatcaaggacgggccgtaacggccggaagggggtcctgatgaaacacaggcgttttttggcggcgctgctggccgcagcggtcctttgtccgcttgccgccctggcagccggagaaaagaatgtggacaacctgcccaccggcaacctggaagggtttgaaagcagcatcacctggttcggggaggatttcgcctacgacattaccgacgaggaggcctgctgggagctgttgcagcggcctattacggttttggatgtgagcgagaaggagctcgtctatccccgcgtatcgcccaatggcgaaaaggtggtcaacgagtggatgggaggcagcatcaacggatcgcttgccgccgtccacgtgctgggtgaggacgaggacggatggaccctcatcgagggcatggactactacgaccgcgtcatccgtggatatgtcaagaccagcctgctcaaaacggtcacgcccaacaacaagtacggcatcatcatcgacaaactgacccagcggctgtacatgttcatcgacggaaagctctggtccagctgtgcggtgtccacaggcctgcccaacaaggaccagccctacaatgagaccgccgccggcgaatacctgattggcagctgggtgggcggctttgacagcgagggcatgtactgcgaaatgggcatccgcttcaacggcggcgatcttctgcatcaggtgccctatgtggaatttgccgacggcaccaaggatttcagcaagtatggatcgcagctgggccgcaaggccagtcacggttgcgtgcgcgtggcacgcaccgccaacgacgagggcctgtgcatcagctggctgtgggaaaacctgaaaaagaataccaaggtggttgtctgggatgacgacggacgcactttgccctatcccgacgatgatctggaagtgtactacaaccccgacggcggcaccagttaccatgctacggccacctgccgctccgtgcgcgacaagtatctgccgctgaccgcctttacctatggcgagttggatagcggcaaatacgccagcctgaccggctgcaccaactgcattccggtcaagcgccgtgcggagatcgacgagatcaatcaggagcgcatcgacctgggcgggctgcttaagaatccggtctataccggcggcgccacgaccggcggaggtgcgcaggcggagggcagcgccgcgtcagacagcccggaggcatccgacggggtaaccatcaccatacggtaatcctgcacaaattgccccgcgtcctacaaggacgcggggctgcttgttacggattttcctgcgccagcatccattcaatgaacagcccatagcccatggtgggatcattgacgaacacatgtgtgaatccatgatgcccaaaggccctcacattttcggaagccggggatagaggtcaatcacgattttcccatcagggcctttctcgtattcaatccggcgcaaaatggccttgagcagcgtgttgcgctcgcggttggtcatccggtcgtagctttccaggagcgcctcggtcttgggaatcagatttgcatccccgtctctcgccgccgcaagccggtcacgcatcgcctccaatgacgctcttttccgggccagttcttcaagcgcagatgcgagcttttcgctccgctcccgaaataccgccggggtatagatgccctgctccaccaggtcgtgcgcgttgtccagctgggttttcagcttgtcctcctcgcgtgccagacggtccagccgcgcccggcaatcgtccaactcctcctcatagcccgtggcgtcaatgcgcacgtgataccccgaataccaggaccgcagcgccgcgatgatctcacgctccaccgcctgataatcggcactggcgttatggcagtttcgcccattgacacatcgcagccgcgcgcggctgtgctgggcggcggacagtgtggtacgtcccacgcggctgccgcagcgggcgcagaagatcagcccggcaaaggcattttgcagatcgaacgtcttttttaccctggcggcgggctggcgctcgcgccggaggtcctgtgcctgcataaaatccgtctcgctgaccagcggcgggtgcagcccgtcgtagagctggtaatcctccatgctttgacagcgcttgatgcgctttttcaccatgccgtcctcgacgcttttgacctgacggctccatccccggcgaatcttgcccatatagacgggattggcgagaatctggccaacggtggaatagctccacggaccgccgtgacgcgtgggaaccgacagatcgttcagtgcgttggcaatttgcttggtgcccgccctgtgcaaaaacaggtcgaacatctttttcaccacctccgcctcctgaggatgcggctccagcgtatagcccttctcgcccggcagcttcagccggcggtagccgtagggcgcgatgctggagatatactttccctccgaagccgagctgtcccgcccgcgaatcagacggcgggtgatggtcttatactcccggcggctcatgaacaggccaaattcaaagtattcctcgtcaaattcatcgctggggtcgtagaccttggcaggggtgataatcttggtgccggaaaactgaaatacctggctgatatacgcctgatcggcgctgttgccgcgcgccaggcgctccaggtctaccaccagcaccccggcgtacagtcctgcgttgacctcctccagcagcttttggatctccggccgtgcggcaatggattcgccggagacgacctcataataggttttggtcacgcggtacccgcgctctcctgccagacggtccaaaatggcctcgtgccgcttgagcgtttcttccacactcatttcagcataatcccggtcgaaacgggattttctgagatactttgcgtactgctccatgcgcgcctcccctcgctttcgggcagcaaggcaggctaccgtccctcagcggtccgcctccggtaggcgtcggtcacgattttgttcagcctgggcagccaggcctccggctcgctttcgcaatactcgtcatgaatgcgcacgagggcgcgctcaccctccgttcgggacgcaatcatgtctccttcaccccccacagctctttgcaggggtagtatggtccggggcatggaaagtatgccctttgcaaaacaaaagggccgtttgctttgcacacaagcaaacggcccgcggcgcatcttcactggaagatacgcaccacgtccttaaaggtgaaaaacgccataaacccgagcaagaacacatagccgcccagatgaatcatcgcctcgatcttctgatcaacgggcttgcggcgcacagcctcaatcagcatgaacaccaggcgcgatccgtccagtcccggaatgggaatcaggttcaccagccccacgttgatggagatcatcagcgtcaggtacaggaagatttccatgccgccctgctgggtctgctcggctaccagctgcaccacgcccaccggaccgctggtttcattgagcccctcgccggtggtgaagagcttgcccagcgccgaggccatggcggtggaggcgtccacacaggtgtcccatgcggcgggaatcacctgccctgcggggaggggttcatatccctgctgaatcatgatgccgatcagccagcgctcctcggtttcgtcataacgcggagtgatggtgagggtcttttgatcaccatcccgcaaaacggtgatgtcgatggccgaccctgcgcccaggctgccgatggcgtcgctcacatcggtcacggtgcgtccggtcatatcctgcccgcccacgctgacaaatacatcgcctgccatcaggccgctttcggcagcaggtgaaccttcggtcacgctggatacgaatggcgtggcaatcgtcacgccgtaagccgccattaggccgacagccaccacaaaggccagcacgaagttcatcagcgggcccgccgccacggagatcatgcgcttccatacgggggcattgttatagttgcggggatcgtctttcttttcgccgttggggtcgtcgtcggtatcgccatagaacatgcagtagccgcccagggggataggccggatggaaaacacggtctcgtgctttttgcttttccactgaacgagcttgggaccaaagccgatggaatactcctttacgggaatcccgcacaggcgggcagccgcgaaatggccaaactcatggaccgtaatcagcacgcccagcagcacgatagcaagcaaaatatacaatgcgatcaaaatcctttctttggagggatcagcctagcttatgcagaacctgccgcgcggtatcccgcgcaagacggtcagcctccatgacctgctccagcgacgcggccggcaggttgcccacgcgcgagagcgtttcctccacagtatcgaagattcgaccgatgcgcatgggttccttcccgctggattgtaacaattcgcctacggccacttcattggcggcgttgagcacgcagccagccgcgccgcctgcgcgcaggcactcgcgcgccaggcgaatggaagggaagcgcgcctcgtccggacgctcgaaggtcaggcctcccaccgaaaacaggtccagccttttgccgccggtgggcaggcggtcggggtaggccatggcgtagaggatgggcaggcgcatatccggcgtacccagctgggcgatcagcgtgccgtcggcaaattccacgccgctgtgaatcacgctctggggatgaaccaccacctcgatctgttcggggtgcgcgtcaaaaagccacctggcttcgatcatctccagcgctttgttaaacagggtcgcagaatcaatggtgatcttctgtcccatgacccagttgggatgcctgagcgcctgttcctttgtggctgcccgaatctcgtctccagtccaggtgcggaacggaccgccggaacaggtcaggatgatgcgggaatacggattcccgcccgctccctgaaggcactgaaagatggcgctgtgctcgctgtccacgggcagaagcgcatgctcgcccacgcgccgggctgcctccatcaccagatggccgcccgccaccagcgcctccttgttggccagcagcacacgcttgcctccggcaagcgccgtgagcacgcttttcaggcccaccatgcctaccacgctcaccagcacgtcgtctgcatccgcctgagcagccagcgtaagcgcttcggggccaaagacccattcgcagaaccgcaggtccgcaggaatttcttcccggggaatgggctgaaccaggccagccagccgcggacgaaaagcccgcacctgctcaaagagcttttcgcggctggaatacgcggtgagcgcggccacttcgaagcggtcgggatgcaacgcggccacctccagcgcctgcgtgccgatgctgcccgtggaacccagtatagccaaacggcgttttttcatgtgccaagacctcttttctcaaatggaagccagcaaaatcacacgataggaatagacgatgatggcggtaaaaacgatgctgtccagccggtccagcatgccgccgtgtccgggaaagatatggccgaaatccttgatcttgcagtggcgtttgaccatgctggcaaacaggtcccccatttgtccggcaatgccgccaaacaggccgcacagcatatcggcccaaatgggcgggaagcccgaaaaatcaggaaagcacagcgtaaagatgcggcctgcggccaccgcgcacaaaatgctgcccaccagcccgccggcagctccggccacggttttgttggggctgatgtgcgggcacagcttgggcccgccaatggcgcttcccacaaagtaggcgaaggtatcgccgcccacggcgatggcgaataccagcaccagcagaagcgcctggaggcttcgcggctcggtatccaaaatgccgaacaggcacatccccggcagcaccaccgtaagcatggggagctcgctcatgcagatatccaccagatccggattttcccgccgcatcaccacaagcagcacaataaaggagagcagcgccagaatgggaatgatcaccagagaggaatagaacatcatcagcggtacggagatggccagccccgcgaaactggtccaccaaaccggataatgtcctccgcggctgagagcggtgagctcctcgtacagagccagagaaaggcacaaaaacgccgccaaggcaaacagccagcttcccacaaagagaacgccggccaacagcgccaccagcaccgcgccggtgatgcagcgctgaatcatggaggatgtttttttctgcggattgctttcgctcatggttcctccttggaaacgttcattcctcgcgtttgccaaagcggcgctttcttccctggaactgcgcgatgcagcggtgatagtcctcgacggtgaaatccggccacagcaccgtggggaagagaaactcggcataggcgcactgatagagcaggaaattgctcaggcgcatctctccgctggtgcggatgagcagatcaacatccggcagatcatgggtatacaacctgtcggaaagggccttttcatctacttgggaaaggtccagcgttcccgactgcacctcctgcgcgatctgccgggcggcccgcgccagctcggcccgcgcaccgtaattgatggcgatgttgagcctcagtcccgtgttttccagcgtacggcgctcggcctcgcgcagcacgtcgcgctggcggggcggaagggcgtccttgtcgcccaatatggtgatgcgcacgttcttttcgtccagctcgtcgatctcgctggcaaaaaagtccagaatcagttgcatcagcgcctccacctcggcggcggggcgggcccagttttccgtggaaaaggcatagagcgacagggcctcaatcccgatatcgctggaggaacggatgatctcgcgcagcgtttcggtgccggtgcgatgccccagcgccaccttgaccttgtgctgcttggcccagcgtccgtttccatccatgatgatggccacatgcctgggcaggcggttgaggtcgatctccgcgtagagcggtgcggtcatgactggctcctttcccggggtatgcccgttaaaaagcgggaaacgatgagcgtgcgcccatcgtcctctacggccaccacacgcgtggacgcatagccctgcgcttctccctccggggtacgcagcgcgtccgcgggcgacggggcacgtcgcgggggagcggcggtggccttgacctgaacgccggtgattccgctggcccggagaatcgccagcgccgactcggccggaagccccagcaggtgctcaaaggtctgctgcatcctcaacccccccaaaaacagcggcgccgcgtatggcggcacagcctgcgatcgatttgtattgtactatggaataaaaaggactgtcaaggtgagcgggcttttggtccggcagaagacggcagggtgccagacgaattgagcggggaggaaagctgcgcagaaagtccatgcgtcccctttgacgggcctctcctgcagaatggctttttttcattctcatgattcaaatcgggcgccaatgtcaaaaaacaggataacaccggaaaccattgttttcatgccgggcgaaggctccggccctgcccccggacgatccgccgcggcaggaggcccgttttcgggcaaccgcttccgacaccgcctaagggatgaacagaaaaacagccggacgcgaaagcacacgtccggctcagaccgctgaaggcgggcggcacacaccgaaccggtgcggcgtcacactatctgcggatttttgcaagatgcttcatcacaaggttggctgccacgccggtgaccgcgcccgtgatcaggcccgcaaccatcagcaccgccatataatacatcaggcttggcgtgctcaaaatcaccatggccagcgccacctggcccacgttgtgggccacgccgcccaccatgctcaccatcacgggatgaaccccgcgcacgcggctgagcagcgccatgaacaccatgctcaccaggccgccggcgaaggcgtacatcatggcgttcacgcccccgaacaggagcccggacagcaccaccttcagcaccatcagcacaaacgccgtggggagattgagcatatagaccgcaaagatcaatacgccgttgctcaggcccagcttgatacccggcacgcctgctgcgaccggcatcaggctctctacaaaacccagcaccagcatcagcgctaccagcagcccgcacagggccacccactgggtgcgttcccgcagggtttgtttttttctgctcattcgtacgctcctgtcaggtcccggacagcatctgaatcagctcttcggtggtgtagagctccagcgttacctggttgggcaggcagatgatcatattgcccagcaggcggctgtccctgttgtccagcgagaccacgccctgcttgacgcaatcctgattttcgcaggtggaacttttcatgtcaacgctttccgtggtgacatgaatgacgttctcggcccccgtttcctcctggatgacggagtattcgccttcctcgataaggggaatgggctgataggtgatgctgcccgccgtaaccagcagccaggccttgatggtggaaggatcaaacgtcgcctgaggctcctcggaatcctcgggtacgggcgtggaggttgtgccggaaggggacgtcacggtaacaggcgccgtttcctccgccccggcgtcaggttcatccgtgccggcaggcgctgtggtggcggtaggctcggctgtaggctccgcggtggcggtaggctcgatggtaggctccgccgtctcggcaggctgggtgggagattctgccgtgggggtagcttcggcggcgggttcgaccgtggcggcagagccgatggtggcatccggcgccagcgcaggtgcgtccgatgccggagaggcgatgcgcgtgggcaacaccatggccaaaacagccaccagggcgatggctgccaccagcccgatcccgatccagatattcttgttacgcatgcgttcccttcctttccgtatatgaggcaacacggccatgataccgcatgaacgcgcgcccgtcaagcatggaaaacggaagcggcgcgccgccatggctctcacggacaggtgcgcggcgctgaagtgcggcggcgcatgccctctgttcctgcatttctttgcgggacagccgtttccctgcgttgctggggcctcggagagaaaaatgcttttcgcctttttcctcaagggaccaaccgacatggttgcgcgcagggcgcgatttgggtatactggccttacaccattctatgaaacgaatatgggggaaggatctatgccggtcatcatgaagctgctgagcagacggggcgccttacgcgcgctggagaacgcgcgtaaggcgctgggcgatgcaaccccgctcaaacgggactgcggacgcctgtgcggggccgcctgctgccaaccggacgaaaccggactcaatggcatgctgctgtttcctttcgaggaaacgtactatcgccggcccatagagggtttccccttccggctcgtggacgacgacacgctcttcaaaggcggcaagcgcctggtgtgcgagggaacctgcccccgcgaacaccggcccctggcctgccgcatctttccgctgcgcatccgcgtgcaggccgacgcgctgggcgatcatgcgcattgcacggcggagctggacccgcgcgcatggtgcgtatgcccgctgctggagcagggcgggctgcgcgcgatggatcaggcgttcatcgccgccgttgccagggcaggcgatgcgctcatccagaacgtatccatgctggaggcgctctataacgagcagcggctgattgatgaaatgaggcaactatgatgcatactctgatcatcggcggcggagcggcgggcatggccgctgccatcgccgcggcgcgggccgggcaggcggttacggtgctggagcgcggccgccggccgctcaaaaagctgggcgtgacgggaaacggacggggcaacctgctgaacgcaagcgcgcccgactatcccggcggaacggactttgccgcgcaggtgctcgccgccatgccctatgagcggttggcggcattctgggaggaactcggcgtaccccttcgcctggaggaggaggggagggtgtatcccgcgtcgttgctggcctcgacggcggtggatgcgcttgggttggctgcgcgcaggctgggcgtggaaatcatcgtcaacgcgcgcgtcacggacctgtcctccctgcccgggggcggctttgaagcacggggaacggtatgccgctacctgcccgacgtatcgaagaaaagcggcaaaacccggcccggcgcgctggcgcaggaaactgcggcatgctggcggggcgaccgcgtcatcgtggcggcaggcggggccgccgcgcctgcgcacggcacggacggcagcgcctacgcgctcctgacggccttcgggcacaagctggtgccgccccgccccgcgctgtgcgctttgcttgcggacccggagcccttgcatgcactcgcaggccaacgggcgcgcgcgtcgctgcgccttctggacgggcagggcgcctgtctggcccaaagcaggggcgaggccctgtttgcccaggatggcgtcagcggcattgccgccatgcagctggcgcgctggtggcggccgggctgttccctgcatatggacctgcgtgaaaccctgctgggaccgcgcgcggcgcagacccacggcccggaggcccttgcggaaacggagcgcctgctgcgcgcccgcgcgcagagccgggaggactgcctccttggcgatctgctgactggcgccgcaccacgcgtcctgaacgatgcgctgctgcgcgctgccgggttggagaggcattcgcgtgagccgctgcggccgcttctgtccgcccgacccggggcaatcgccgcgctggcccgtgccattgtcgattttcaggtggcggtcacgggcacgcgcggctttgagaacgcgcaggtcaccgccgggggcgtggcgacggacggcttcgatcctctaacccttcaaagccgcctgtgccccggcctgtacgcagcgggagaaatgctggacgtggacggcgcatgcggaggcttcaacctgatgttcgccgtcgccagcgggcttttggcggggggcgcgagataactcgaaatattttccttctgcccgacgccttgcttgaataattatcataatcatgctatactgagactgctgatccggttgtgaaaaccgaaacacaaaaacccataataggaggaagaatcaagtgaagaagtttctgtcgatgcttctggccctgaccctggttctcttcgcgttcactgcgtttgctgagaccgtcaatcccgacgacatcgaagacaccatgactgccgaggacggcaagtatgagcttgcgttcgtc

SEQ ID NO: 361 - DNA, 1715 bp, Unknown
  16S sequences of unknown bacteria
atcatagcgttgccgaaagacaagcaaaacttatttatttatcctcatgaatttttccagatatttcctgattatctttttccactcgggacaaaataaagccacggacagctgaggatgaattcatagctcagcgacccggacgtgcttaccacgatccaggactttcgcacgctatgataaatccgttcgtatccgaatccaggaccatgatccatctcatgggacatccctgttttcatccccgatacgagacgacccccactcattctctttcacagctggccgtgaaaaaaggcggaatcgcaaggaacacccttttggaagcaagcagcaacctctgtctcccttccaaaatgaggtatggctggcacatacgtgctaaccctttcccacgtttccgcctttgtgcattttatccatgcagttttgtcaacgcctgggtttctccaatggccagcagcacatctccctgttccagaacagcatccggcgacgggtttaccataatcttttttccccgcttgattgccacaatattgatattgtatttacttcgcacatcgctttctttcaacgattttccaatcagatatttaggcgcattgatctccatcatgctatattcctcagaaagctcgatgaattccagcacatcggattgcgcaatactatgtgcaaaccgcatgcccatatcccgctctggataaacgacccgatccgcacctagcttgagtaggatccttgcatgcttattgctgcttaccttgcaaaccacatgctccacacccatctccttgagcatcaacgtggtgaaaatgctcgcctgcatatcgctgttgcctatacctacaaccacgatatcgaaatttgttacgccaagcgaaagcaaagtctgctcatccattacgtctgcctgtacgcagtttgtcagtaccggagccatcttctccactaccgcttcgttggcgtctacgcccatgacgtcatggcccatttccactaacgtccttgccaacgcacgtccaaaccttcccaaacctagaatcgcgatctgtttcattctttcctccctgttagcctaccataatacggccttccggataatgaatcgtatcttttttcttccggttcgccaacgctatagagaatgtcagcgggcctacccgtccgcagaacatcaaaaacataagcagcaatttgctcatcggggcaagctgcggcgtaattccgcagcttaatcccactgtaccaaatgctgagacacattcatataggatcgtttccatcgttgcagcaggattgccttcttcgatgatgcagatgataaaggtcgctgtcagcaccaataccatggccagcacggcaatggccgccgcactgcgtaccaaatcccttccaatgctgcgtttgccaaccaccgcttccggccgtcctcgcacaatggcagccgttacaagcaaaagaatggcaaatgtagttaccttgataccgccgcctgtagacccgggcgccgcaccgatgaacattaaaataatggtcaaaagaaagctgccgccgtataggccgttttgatcaatgctattaaatcccgctgtacgggttgtcacgctttggaacgcacctgccatgatcttttcacccgctggcatggccgccatggtagcagggttgttccactcgatcaaggtaaacaaaaacgttccccccaatac

SEQ ID NO: 362 - DNA, 27870 bp, Unknown
  16S sequences of unknown bacteria
gcgacaatcaatggaaactgacggtcaaaacaaaggttttgacccataaaatcgagattttaactcgattttatataattgcatttgctaatgcaattattcagtagacattatttcagctttgacagccttgaggtattgactattgcgataagctccgtagtcttatcgagcaattcatcggggcttacaggtgcggttatttttccgtttttgcggaaggcaaccacattgaccgaatatttttttcggagattaagctccttaaggctttttccgacccattcgtcccgcgcgttaagctccacgagcgataaatcgtcggaaagggtcaatacatcgacgaatcccgaggtcagcagatttttggcaaggcgtgtgcccgattcgctttcggggaataccacctcatccgcaccgacccgcttcataattttacggtgagtttcgtttgcgcattttgcaatcacggttttaacgcccttttccttacaaagcgttattgcgagaatgcttttctcaaggttgcttgccattgcaacgatcacaacatccgcgtttgaaattccgagctccgaaataacctcagggtctgttacatcggcgcatttgcaaataggcagatatgccgccgcgtcctgaacgatttgttcgttattatctacggcaattacatccgtaccgttttttacaagctcctttgcaacggctgcgccgtatctgcccagccccaaaacagcataagtttttttctgcataccgaattctcctttagattatacaatacaatcggataccctgcttgtattgactatcctatacttatttcttccgtaggatttttaataatatttcggctcggattttttccgccgaaggcaatagccatggatataggcccgaccctgccgaaatacattgttaaaattataattattttcccgacattattaagcgttccggtcaggccgcgcgaaagccccacggttgcggtcgcactgaccgtttcatacagaatatcaagcgcgggggcatcggttacggcagagagcagcagggtggatacaagcattacagagaaggacattacggcaacggcaaccgtcttgtaaaccgcctgatttgagatcgttctgccgaaaagcgacactctggttttcccgcctatcatggaaacggtgatggataaaagcaccgccgccgtcacggttttaattccgcctgcggtgcctacaggagatccgcctatgaacataagcagtaaggagaggagtgcagtcgggtttgtcagatcttcctgcggcactcccgcaaatcccgccgttctggttgtcaccgattgaaaaaacgaggcctgaattttttctccgagcggcaaattcgctattgtaagcggattgttatattcaaaaaagagggtcagtcccgtgccggtaataagcaggactgctgtggaaataaggacgattttactgtgcagggtgagacttttaaaaaatctgccgccgttttgccttcggttttttatcacgcgcgccgcgtcccaccaaactatatagccgagtccgccgagaataataagcaccgcggtggttgcggttatgagcgtattccccgaataatcgcaaaggctgttatcgcctataatatcaatacccgcattgcaaaatgccgataccgaattgaagatcgaaatccaaattccctttgcgccgaactgcggcacaaacacgagcgtataaaagcatgcgccgattccttcgaccgtgagcgttcccgcaagcacctttttaacgaaggtcacaattcccgaaagggtattgaggttaaaggcgtcctgaatcagtaggcggtcggaaatattgatttttcggttaaacaggagcataacggcggtcataaatgtgattatgccgagtcctcctatttgaatcaagagcagaattacaatttgtccgaatacactccacgaggctgccgtgccgacggtgacaagccccgtgacgcatgtggcagtggctgcggtgaaaagcgcgtcaatatacggcagggcacgcccattcgatgagcttatcggcagagagagcaaaacactgcctatcagtataacgcacaaaaagcttaaaagtataatttgtgttgtggataaataaggctttctttgacttttcattttcagcacctgcaaaaggcgtatttacacctgcattttatgaatagtataacattttaaagaccaaatagcaagcatttaaaaacaaaatgcggcaaaaagtcccgaatttaaaaataatgcttttatttattctgaaaatatggtaaaataatatgaatactgtttcggagtgagattatgaactggactgaaataaccgtaagcgtgccgcttgagtataccgataccgccgcggcgatagccaatatgaccgtgccgtacggcatttatattgaggattattccgatttggagcagggagcggaggaaatagcgcatatcgatctgatagatgaggagcttgttaaaagggacaggacgaaatcaatcattcatatttatatttccgagtgcgataatgccgaggaaagccttgcttttttaaaggaaaggctcacggctgaaaaaataccgtttgacgcgggcgcctcaggtgtcaaggacagcgactggaacgaaaactggaaaaaatattttcacgcgaccgaaatagggaaaaggcttgccatagtaccgagctgggaaagctatgataatgtatccggcagaaaaattcttcacatagaccccggcgctgcattcggaacgggtacgcatgccacaacctcgctttgccttgcaatgctcgaaaattatgtgacagacggctcgaaaatgcttgatatcggctgcggcagcggaatactgtccattgcagcggtgctgctgggcgcggaaagcgcagtcggggtggatattgacgcacagtcggtaaaaacggcacgcgaaaacgcagagctaaacagccaaagcggcaagaccgaatatatcgtaggcgatctggcggataaggtgagcggaaaattcaatgtcgtctgcgcaaatattgtggcagatgtggttataaggctgcttgaaagcgttcgtgattatatggcagagaacgccgttctgctggtttcgggaattatagacgcgcgcgagcaggatgtgctgcttgccgccgaaaagcacggatttacggttaaggaaaagcagtataaggataattggtgcgcatttgcgcttatatagcaccttcggctcgctcctcggggggagccgagaacaaaaacgatttatagacattcttacgaaaacggaggaaaaccgatgctggaatttgaacagctaaagctccgcctggaaagcaacgagggcgagctgcgcgatttgaaggacgcgctgggctatgagcatttgaaaaacgaaattgaggaattggaggcaaagaccgccgctcccggcttttgggatgacgccgaaagctcgcagaagatactgcagaagaccggaaagctcaaaaacacggtcgagacctatgaaaagctttgctcctcctacgatgatttgctggtgcttatagaaatgggcgatgaggaagaggatctgtcgctggtcggcgagatcaccgagaatcttgaggaatttgaaaagggactgggcgcactccgtctgcagaccctgcttacaggcgagtacgataataataacgcgattttgacctttcacgcgggagcgggaggaaccgaggctatggactgggtttccatgcttgtacgcatgtatacgcgctggagcgagcgccatggctttaaggtgcagctgctcgactttttggacggtgacgaagcgggacttaaaagcgcggtaatgcttatagagggggataatgcttacggctatttaaagagcgaatcgggcgtgcaccgccttgtgcgcgtgtcgcctttcgacgcttcgggcaggcggcatacttcatttgcctcgcttgaggtaatgccggagatcggcgacgataacgacatcgaaatacgcgaagaagatattaaaatggatgttttccgatcgtcgggcgcgggcggtcagcacataaacaagacctcctcagcggttcgcttaacccatattcccacgggaatagtggttgcctgccaaaacgagcgcagccagttccaaaaccgcgaacaggcaatgaaaatgctcaaatcgaaattgcttgaaataaaggagcgcgagcaccttgaaaagattgaggatataaagggcgttcaaaaggagattgcctggggctcgcagatacggtcgtatgtgtttatgccgtacaccatggcaaaggatcacagaacgggttttgaatcgggcaatataaacgcggttatggacggagatctggatggctttataaacgcctatttaaaggcggcgtcaaagggcgaattacagaaaaattaggagcggaatatgaaaagattaatatgttttttaatggtaaccgcgaccgttttaggtctcgcgggctgcggcaaaaaagccaaaaggcagctttataacgataagctttcaaagtatataacccttgcggattacaagggcttaaaggttgatacaaaatcggacgaattcaaggaatattacgataacatgatttcctcggatgtatcgtcaaacaatctgtatgtcaaaaaaaccgagggtacggttgcaaacggcgataccgcgaacatagattataccggcaaaaaggacggagtcgcctttgacggcggcaccgcagaggggtatgaccttaaaatcggctcaaattcctttatagagggctttgaaacggggcttataggcaaaaaaatcggcgatacggtggatttaaaccttaccttccccgaaaactacaattcagccgagcttgcgggaaaagcggtggtttttacggttaaaataaactacgttaaaaccgaggaagaaagaaaacccgaggattattattcggagctcggctttaaatcgctcgatgaatacatcgccgatgtgaccgagcgggcggtgaaaagctatcttttcgacacggttaaaaaggattcaaaaatcaaggaatatccgcagacggaaatcgacacgatatacggctcatataaaaatatggtggagcagaatctgaagagcagctacggcgttgaccttgcgacatacctcacctctaacaatatgaccgaggattccttcaaggaggatatggtgaccaataagatcaagcccgcaatggatgagcagatggtggcttactcgatacttgataacgaaaagctgggactgaaggacgaggaaataaataaaaagattgacgagacggttaagagcataaacaattcgcaggtgaccgcagatacggttaaaagctattacggcgagtattattttgagtatatgaccgtaagcgaaaaggttgccgattttctttacaaaaacgctaaaatttcttaaatgctgtatgaaataataaatattcgcaatatacccgatgaagaataccgcacagcagccgcgctgcaaccctatgagcttaaaaaaagacttgaaaattgcaaagatgccgatataaagcgcacgcttgcgggcaggatactgctttttaaaatgataaagcggctttacggaagggattcgtttgaaatcaaatataatcctaacggcaagccgctttgcgatttttgcttcttcggcatttcccactcgggtgattttgccgcagtcgccgtttcgggcaaatccataggcgttgatattcaaattcccggcggctttaaaaagcgcgaaaaatatatgcttttctcccccgccgaaaacgaatttataaatgcggaaaattccgaaaaccgtttttacactctgtggacgtgcaaagaggcatatataaaggcagagggcggcacactttcggacgcggcgaaaatatcgcttatcggcggcggaaaatttaaagaaaagctcggagaatatcgctttgaaaccgaaaaaacggattcgtattatttgacggtgtgttataaataattatgaaaataggaagcattgaaattaaaggctatgcggctttagcgccgatggcgggcgttgccgaccgcgcaatgcgcgagctttgcagattttacggcgcggcatttaccgtgggcgagcttacaagctcgcgcggcgttgtgctgaacgataaaaaatcggcggcgctgcttaccgcgtcggataaggagcggccgttcggctcgcagcttttcggcaacagccccgaaataatggcggaggcggcaagggctgccttgcgctttaaccctgattttattgatataaatatgggctgtcccgcaccgaaggtagcttcaaacggcggaggcagcgcgcttatgaaggagccgctgttagcgggtaaaatagtggcggcggtggtgaaagccgtaaacatacccgtaaccgtgaaaatgcggacgggctatgataatgagaacataaacgctgtgtatttggcgcaaatatgcgaagacgcgggagcggcggcaataaccgttcacggcagaacccgcccgcagatgtacgccccgggaatagattataaaaccatagccgaggttaaaaaagccgtaaaaatccccgttattgcaaacggcgatgtaacgggcggcaaaagtgcggagtatatgtattcggcgaccgggtgcgatatggtgtctgtcgggcgggcggcagagggtaatccatttatttttgcggaaataaacgcgtattttgaaaaaaagccctatcaagagccgccgctttttaagcgccttgaggtgcttaaaaagcaggttgagcttatgagcgaatataaagatccgcatatagccatgcttgaggcgagaaagcacgccgcttggtatatgcagggcttgaacggcgctgcggcattaagaagactgtgcggagagataagcagcatggcggatattgaacgaatctgcgaaaaagcacttgaacagaacgggaacatgtggtaatattacaatagtatgtatatgctaggcaaatacgaaaggatgcattataatgtcaggacattccaaatggaacaatattaaacgcaagaaggagaagaccgatgcggcaaaggctaaagtttttacaaaaataggccgcgaaatttcggttatagttaaaaccggcggtgcaaatcccaatgaaaacagtaagctaaaggacgcaatagcaaaggcaaaggcggcgaatgtgcccaatgaaaatattgagagaataatcaaaaaagcggcgggagacggcgaagccaacaactatgaggaactgatatacgagggctacggtccctcgggcgtggcagtggttgttgagacccttaccgataaccgcaacaggactgcgggcgagatgcgccattatttcgataaatgcggcggaaatttagggcagagcggctcggtaatgtttatgttcgaccgcaagggcattattcaaatcgaggcggaagggctcgatgaggacaccgttatggaggcggctcttgaagcgggagcggacgactttaattttgacggcgatgtttttgaaatctctaccgatccgaacgagctcggcacggttcgtgacgcgctagaaaaggcgggctacagctttttatccgccgaggtcgaatatgttccgcagactatgtcgacaatagaggacgaggaaaccgcggcaaaaatggaaaagcttattgatatgcttgaagaaaacgacgatgttcaggcggtatggcacaactgggatatgcccgaggaataaaaaataaagtcaacaaaggaataacaaaatcacaggcttattagttttttcgcattctccaaaaataaataaggtgcggtgagacgaatgaaaaaatatttagcgataattcttgcaattttgacctttgcggcggcatttccgccgatagtcggctcggctgcggatgagcctgttcccgttgagatttcggcgcgcgccgagaaggagctgattgaaaatttcgatcttgtgccgggttcggacggtaacggaaacgaatattataattataatataaatgacgcaaatcccatgataaccgtcaaatacagcaatggtaccgaaacggaaaaatcccttgcggattggcagtcggaaggcgttatgttttattactcacccgtttttgcggagggcgaaaatctctggaaggcgggcagtcataaatatctgtttacctatctcgaatattcccttacctgctatatggatgtcaccgttgccaaaaacccggttgacagcatttccgcggttataacgggggaaaattcattctatgaaaatacgcacggttatatcaataatgatgaaaacggcgaggaatactactattactcttcggattggataatgagagaaatatttatgccgaccctgaccgtgaattataatgacggcagaggctctgtaactgtaaagtatggcgattgggacagctttcaagagcaaaccggctatcatatagaaatttccgattcacagtatacgaagcattggactctcggcgaaaataccctgacattgagctacttgggaatagagtgcgagctgccgtttacaatcaaggaattcccgataaaatcgataagcgccgccgccaccgcaacgattgcggagggcgacacacactcggcatataacctatgaagacggaagcgaaatcagctatgagtattacgagccggagctgacgcatcccacaataacgctcacattggcggataacaccaccgaggtatacgaatgggaaaattattataaaatttccgagaaatacggattacatctctattttgtaagcgagcagagcgccgatgtcaaatgggaagcgggcgttcacaccgcgacggtctgcttcggcaatctgactgcggattttgaggttgagatcaccgaaaatccgattgaaagcttttccgtaatacctacaaagaaacttatagaaaacataaacggtgttaatggagaagatgaaaacggaaattcatattttaattactatatttttgatactcaacctcgatacattataaagcttaaaaacgagaatgagccgcggatatatgagttttggcagagctatcaaatttatcaggatttcggaacatcggtttccattattgataaccagtcctacaataatcagttcaaattgggtaaaaacactgtgaaagccaaatttatggggcttacaacggattatgtttttgaaattacggaaaatccgatatccgagattacggtgaagccgaacggtgctttgtatttgggctgcaataaaaccgtggatataaataacaaagaaatatatgacctttattcaatcgaatataccgttaccgttaaatacaaggataaaagtaccgcagtatacagttcactttacgatttgtacgctgaaaccggatattcgcttgtgtttgatacggataatcagattgaaagcccatggaatgaagccggaatatatactgttaaggcatcacttttgggcattgaaacaagctttcaaatagaaatgcgcgagccgccttatgtcgatattctgataagcgaggtcggcaataagcttacaattacccttactcgcaacgacaatcaaaaagaagaatattcggtattatcacttgaaacaaacggcggagacttcgatatgcgcctcggcaccgttattacagacagcgaaaagctttataatgtgaagttccgttacgatacagagcttgtcggcagtgaagacaacgggatatataaagaaaatttcggaaaagatctttatatagagtatctgaaccttacgagcaataaaatcgattcaaaatggtttgaagcatatatggaattaaacaatattgctttagtctatgcgaatatcgattcctactccggtttcagaggaagagttaccgccgacaggcttgacgatatgctccaccttgcggcatatatcgatcaggattttaccatagactgccttcttaacggtaagaccgttccgggcgacagcgattatttcagcaattataaggtttctgcggagaaggctgcggcgcttcttgaaaagcatttcggaacgggcagcgcggatattgctctttcaaagaactataatcccgatgacaataccgtcataattaaaaacaaagcgctttttgagcttagtcacagagatatctgcgttttcaatcccgataataaggaatggacatacagaaacggagcaatcactattacccgcggagccgaggatacctccttcaaggcgggcgttacgggcgatgtggatcttaacggcagcgttgatgttcttgaccttataaagctcaaaaaggcggctgccgaggcaaacacagcttataatgcgttttacgatgttgacggcgacggcagtataacagcggcggatatcgcttatatcaagctctttatgtttgaaattcctgcaagagaaaagggcgatgtaaacggcgacggctctgtcgataaggcggataccgcaacgcttatattgcttatcaacggcagaaccgaggcagaatacgcaccctatgccgatataaaccgcgacggatatatcaatgaagaggatatttcggcactggaggcaattattaaagaggctgtaaagaaaaatacttgacatgccggtaaatatatgatataatctcacctgtaaagctctgaactttacaggtgaggtgcttttatggaaaaaaatttgcatatttccgctttgctggatgtttacggcgcgtttttgggtgaaaagcagagacagctgactgcctattattataacgatgatttgtcgctttccgaaatcgccgaaaacgagggcataacccgccagggtgtaaacgaccaaataaagcgtgcggttaaaagccttaacgcatttgaagaggaatgccgctattgcgagcgctttgaacagctgcgagctttagcttccgatttaaaggcgggggataaaaaagcggcggaaaaggctgccgaaattatagaaaagctttaggagtgtgtgtaaatggcgtttgataatttatccgataagctgtccggcgtgttcaagcgcctgcgttccaaagggaaattaagcgaggcggatgttaagaccgcaatgcgtgaggttcgtttggcgcttttggaggcggatgttaactataaggttgcaaaggactttacgaatgccgtcaccgaaaagtgcataggcgaaaatgtcatggaaagccttaccgctccgcagacggtcgttaagatcgttaaggaagagcttaccgcacttatgggcagcgagcaggcaaggcttaaaatatcaaataaaattcccaccgtcattatgatgtgcggccttcagggctcaggtaaaaccacccattccgcaaagcttgcgaagtatttaaaggcgcaggggcacagaccgttgcttgtcgcctgcgatatttaccgtcccgcggctattgaacagctgaaggtggtaggtaaggcggttgataccccggtatttgaaatgggcaccgaaaagcccgaaaaaaccgcggtaaaggcggtagcccatgcgcgggattacggctatgatttcgtaatacttgatacggcgggcagacttcatatagacgacgagcttatggcggagcttaagcgcataaccgaagcggttgaggtcaatgacatactgcttgttatagactcaatggtcggtcaggacgcggtaaacattgccaaggcatttaacgatatccttgaaatcgacggcgttattttaacaaagcttgacggtgatacgcgcggcggcgcggcgctctctgtaagagcggttacgggcaagccgataatgtttacgggcgtaggcgaaaagctcgatgagcttgatgaattccaccccgacagaatggcttcacgaatactcggaatgggcgacgtactctcgcttatagagcgggtagaaagcgaaatggaccagaaaaaagctgaggaagcagcccgaaagcttgaagaaaaccgctttgatatgaacgatcttttggagcagttccgtcagataaagaaaatgggctctttaaagagcatactttcaatgctgccgggaatggataaacagctgcgcgatgttgatattgacgaccgtcagctgctccgcattgaggcaatcataaagtccatgacaaaaaaagagcgtgaaaagcccgatattataaacgcctcccgccgcaggcgaatagccgcgggctcgggtatgagggtagaggatgtcaataagcttttgcgccagtacgagcagatgaaaaagatgttcaagcaaatgaacacaaagggcggtaggcgccgaatgatgcacaatatgcgaatatccggcaagaacggaatgggtctttagaataggtgttgctccaaataggctgaaacacatattttaaacatagatattatgaatacggaggtgtaataccatggcagtaaagatcagacttcgccgcatgggcgcaaaaagggctcccttttaccgcgttgttgtggctgattccagatatccgcgcgacggccgctttatcgaagagataggcacatacgatcccacaaaggatccggcagccgttaacatcgatgccgagaaggctaaaaaatggatatccaacggagctcagcccacagataccgtaaaggcgctgcttaaaaagaacggcgttctctaatattcttgtgaggtagaacaatgaaagagcttcttatttccattgcctcggggcttgttgaaaagcccgaagaggtaaacgttactgttgatgagccgaatgaggaaggcgttaccgtttatcatcttcatgttgctgaaaatgatatgggccgcgttatcggcaagcagggcagaattgccaaggctattcgtgttgtaatgcgcgccgccgccaacagggaaaacggcagaatatcggttgaaatagactgattaccaaggggtcggacagcgcttgtccgatcccctttttctttcggaggatttatgattaaaaaatatcttgaagcaggtaaaattgtaggcacacacggtgtcagaggaatggtcagaatacagccgtgggctgattcgggcgaatttcttacacgctttaaaaaactgtatcttgatgaaaacggcgaaaacagcgtgaccgttttaaaagcgcagccgcacggcggcgttgtaattgcaagctttaaaaataccgaaactatcgagcaggcagagaagcttcgcgggaaaacggtctatatcgaccgtgaggacgcttgtcttcccgagggcagatatttcgttgaagatataataggctgcactgcgtatgacgcggatagcggtgaagaatacggcagggtaacggatgtttcggctaccggcgctaacgatgtatggcatataaccaaaaacaataaggaatacctgattcccgcgatagacgaggttatagtatcggcagaacctgaaaacgagcgggtcattattcgcccgatgaaaggaatatttaacgatgaggattgatattcttacccttttccccgaaatgtgcgaaacggttatgagcgaaagcataatcggcagggcgcgcagagccgaaaaggttgaaatagtttgcacgaatatacgcgattttgcggggaataagcacaataaggtggacgatatgccctacggcggcggaatgggaatgataatggcggcagaccccatttacaattgctacaaaagtcttgtttccgaaaccgaagaaaagccgcgcgttatatatatgtcgcccaagggcgaaaaattcacccaggaaaaggcaagggaattatcccgccttgaacgcgtaatgctgatttgcgggcattacgagggggttgacgagcgcgttattgaagaaatagtggatgaggaaatttcaataggcgattatgttttgacaggcggagaactccccgcgcttactgtggcggacgcggtttgcagaatgctaccgggcgttttatcggatgatatctgctttgaagaggaaagccatttttcggggctgcttgaatacccgcagtatacccgccccgccgtgtggcacgaaaaagaagtgcccgaggtgctgctttcgggtaatcacgcaaaaattgccgaatggcgcagaataaaatcgctgcttataacaaaggagcgccgccccgatatttataaccccaccgcagaggatataaaaatcctcaaaaaggcaggatataaggaggaaaccgaaatatgaagatacttataatccgtcacggcgaccccgattatgaaattgattcggttaccgaaaagggcaaacgcgaggttctgcttttaagagacaggcttttaaagcagaatataggcgatatttactgctcgcccttaggcagagccaaagccaccgccgagcctacattgaaagccctcggtaaaaccgccgaaatatgcgattggttaagggaatttgacgggtatataaccgaccccgatacgggcaataagcgtattccgtgggatttgctgccgcggtattggacggcggaaagcgattattacgataataaaaaatggcttgaaacgccgcttatgcaaagcggagatgtaaaggaaaaatacgacgccgtgtgtgcgggactggatgaaataataggaaagcacagctatgtgagaaacggtaatatttataaggtggagcgcgaaaaccgtgatacggtggcgtttttctgccatttcggggttgagtgcgtaattctttcacacctgctcggaatttcgcctgtaatactttggcataatttctgcgcgctgccaagctcggttactacccttgtaaccgaggaacgcgagcaggggaaggcggctttccgtatgtgtggtttcggagatatatcccatttatacgcgggagacgaagaaccgtcctttcaggcacggttttgcgaaacctactcaaattttgaggaacggcactgattatgaagaacgatgtaattattataggcggcggagctgcggggctgtgcacggcagtggcacttaaaaagcgtaaccgtaatttgagcgtaaggcttttagaggcaatgccgcgcgtgggcaaaaagcttgccgcaaccggtaacggcaggtgcaacataaccaatagtaatattgatatttcccgctaccacggcaagcaccccgattttgcggaatatgcgcttacccgctttaacagaacggtttgcgaagagtttttcaaggaaatcggcgtagattttgtatttgagggggataaagcgtaccccgcgtcgctccaggcggcttcggttgttgactgcctgcgttttgcggcggaggagtcgggcgttacggtatgcaccgaaacggcggttaccaatattcaggttcaaggcgggctttacaaggtaattgcgggaaatatgagctttttggcaaagaacataataattgcggcgggactgctttcgggcggcgaaaaatacggctgcaccggctctgttttgcagattatgaaaaaagcgggctttgatacggtggagaccctgcccgcaattgttcagcttaaaactcctacggatattgtaaagcagcttaaaggcataaaaatcaacgcggatgtttcattgctcaaaggcggaaaggtattgcgcaaagagtacggcgaggtgcttttctgcgattacgggctttcaggcccgccgatattgcagctttcgggcacagcagagagaaacggcggctgtgaaatatcgcttgatattatgcccgacatagatttttccgcacttgaagcagagcttaatataagggctgaaaggcttaaagcgcgccgactggacgaatttttcacgggtatgcttaataagcggctcgggcagataattataaagagcgcgggtctcggcttatcaaattccgtaggaactcttacaaagcaggatataaagcggataaccgcgcttttaaaggatatgcgctttaaaattacgggcactacgggctttgccaattcgcaggtgacagcgggcgggcttgacacggcgcagtttaattgcaaaacaatggaaagctgcgataataaaggcctttatgccataggcgagatactggatattgacggcgactgcggcggctttaatttgcagtgggcgtggtccagcgcgctttgcgctgcagaaagtattgcgggagcgaataacaaatgctgataataaatagtgtaaagctgccgcttgattacgatttttccgatttgacttatgcggcggcaagggcacttaaaaccgacaggaaaaatataaaaagtgcttctcttttccgtaaatcggtggacgcacggcataaaaacgacgttcatttttgctgctcgctgctcgtctccaccgaaaacgataagcggtttgagaaaaacggcgcgcaactatatagtgacacagagtacatatggaaaaaagcaggcaataccgatatgcgccctgtggttgcaggcttcggccctgcgggaatgtttgccgctttagcgctggcgcgcgcgggtatgcgccccttggtgcttgaacgcgggcaggatgttgatacccgaatacgcgatgttgagagctttttcgcggccggggctttaaataccgaatcaaatgttcagttcggcgagggcggtgcgggaaccttttcggacggaaagctgaacacgggcataaaggacagccgctgccgtgaaatattaaaggtattcgtaagccacggcgcgcccgaaaaaatattgaccgacgcaaagccgcatatcggaacggatatattgtcgggcgtggttaaaagcatacgaaacgaaataataacgctcggtggcgaggtgcgtttcggtacgcggcttgataagataaaccgcaaaaacggcggtatttattcagttgccgccgacggcaatgaaattacctgcgatactctgatacttgcaacgggtcattccgcaagggacacctttagtatgcttataaccgaggaatttgagcttataagaaagccgttttccgtgggggtaagaatagagcatctgcaaagcgatataaaccgcgccttgtacggcgattttgctaaccaccccgcgctttccgcagcggattacaagctttccgctcaccccgataacaggggagtatacaccttttgtatgtgtcccgggggcgaggttataaacgcctcgagtgaaaacggcggcattgccgtaaacggtatgagccgcagccgccgcgacggagtaaacgcaaacagcgcgcttttggtaagtgtgctgcccgaggatattgagggcggcggcgttttgggcggctgcgagtttcaaagaaaaatagagcaagcggcatacagtattgcgggcggcggcgtgcctgtaagcacggttggggcatttgttttcggcaaaaaggcggaatttacgcgcgttaaacccaccgtaaagccgaacccggttatatccgatttcggcggtattttccccgaatttgtactgtcggggcttaaaaacggaattatgctttttgaccgcaaaataaagggctttgccgataaatcggctgtgcttaccgcccctgaaaccaggtcttcgtcgccggtaagaatagtaaggaacgaagagctttgcagcgtttcctgccgcggcgtttacccctgcggtgagggagcgggatatgccggcggaataatgtccgccgcggcggacgggcttaaaactgccgaaaaaataatagaaaacagcaacaggtgacaaaatggatatactaaaagcattaacagaggaattttcgcttaaaccctttcaggttgaaaacacggtaaagctgatagacgagggcaacacaataccctttatcgcgcgctaccgcaaggaggccacaggctcgcttgatgaccaggtattgcgtgagtttgacgaaaggcttaaatacctgcgcaatatggacgaaacgcgggagaagataaaggcgtcgatagaggagcagggtgctttgacggaggaaatatccgtcgcaatcgatagcgcaaagacacttaccgagcttgatgatatttacagaccctacaagaaaaagcgtaaaacgcgggcaagcgttgcaaaggaaaaagggcttgagcccttggcagagctgatttatgagcaaagccccacgacccctgagccgatagcactggccgccgactacataaacgaggaaaagggcgttgaaacggcggaggacgcgcttgcgggcgctatggatataatcgccgagaaaatatcggacgatgcggatgtaagaaagcggctgcgttttgtatgctcggtgcacggcattttaaatgtaaaggcggcggcagaggacgcgggcgtttacgaaatgtataaggattattccgaatcggtcgctaaaattcccgaccaccgcgtgcttgcaattaaccgcggcgaaaaagagggaattttaaaggtatcgcttgagcttgacagcgataaagcaatgtttattataggtaaaaatcatataaaagagggctcgcccgccaccgagaccgtgcgtgcggctgcaatcgatgcgtataaccgacttattttcccatctgtcgaaagggaaataagggcggctttaaccgaaaaggcgagcaattcagccattaaggtattttccaccaatcttcgtcagctgcttatgcagccgcccgttaaggataaggtgacgatagggcttgaccccggctacagaacaggctgcaaggtggcggttgtggacggcacgggaaaggtgctcgatacgggagttatataccccgttccgccgaaaaacaaggttgaagaagcaaaggcgataattaaggcgcttgttaaaaagcatgccgttcgggtttttgcaataggcaacggaacggcgagccacgaaaccgaggttttcgccgccgaggttataaaagagctgaatgacgggctttcgtatatggtagtgtcagaggcgggcgcaagcgtttattccgcttcaaagctggcggcggaggaattccccgattacgacgtttcactgcgcagcgccgtttccattgcacgcagattgcaggatccgctggcagagcttgtaaaaatcgacccgaaggctataggcgttgggcagtatcagcacgatatgccgcccgcgcagttaggcggcgcgcttgacggcgtggtggaggattgcgtaaactccgtgggggttgatcttaataccgcgtctgctccgcttttatcccgcgtggcgggtctcggtgctgcggttgccaaaaatattgtgacctacagggaagaaaacggcaaatttacctctcgcgcgcagcttaaaaaggtgccgaaattaggacccaaagcctttgaacaatgcgcgggatttttacgcataacaggcggcagacagccgcttgataacacgggggttcatcccgaaagctatgcggcagccgaaaagcttttaaagctgtgcgattattcggaaagcgatgttaaaaacggcagcgccgttggtttagccgaaaaggtagaggcaaagggcgcagaggaaaccgcacgcgagcttgaaataggcgtgcctacacttaacgatattgtaaaggagcttgagcgccccggcagagacccgcgcgacgagctgcccgcgcctatgttaagacaggacattatgtccatggaagacctgaagcccggaatggaattaaagggcacggtgcgcaatgtaatagatttcggcgcgtttattgatataggcgtgcatcaggacgggcttgtgcacatatcgcagataacaaatcgctttataaagcacccctccgaggttttaaaggtcggggatgtggtcaaggtttgggtgcttagcgttgatgtgccgaaaaaacgaatatccctcacgatgagaaaagagaagctgaacaatgaagaaaaataatttaaagggaagcttaatactttgtatgactgcccttatatggggcttggcatttgtggcgcaatcggacggcggcgagcttgtacctccgcttacctttaacgcgctgcgttctttaatagccgcagcggcgctctatatattttacaagggtacttcctttaaaaaagaaaagcacttttttccgcaggataaagcgcttaagaagcagtacataacagccggagcggtttgcggcgcaatgcttgcaatatcggtcaattttcagcagttcggaataagcgcataccccgcaggcgctgcggcagaggcgcgcagcgggtttataaccgcgctttatgttgtgtttgtgccgctgctttccttcttcttcggcaaaaaggtaagcccggttatttgggcgagcgttgccgttgcggtggtagggttttatatgctctgcttatcgggcggaataagcggaatttacactgccgatatattggtatttatctgcgcgttttgctttgcggggcagataatatcggttgataaatttgttgggcttacgggcggcgtaaagctttccgtaatgcagtttaccgttgcgggagctttatcggctgtgttcgcggtaatttttgagcgcccgatagtggaaaatattattgccgccgccccgcagatactctatctcggcatagtttcaagcggcgttggctataccctgcaaatcgttggacagaagtgcgccgagccttcggtcgcatcactttccatgagccttgaaagcgtgtttgcggcacttggcggttggctgatttcgggtaatacgctctccgtcagggaatttatcggctgtgcgcttgtatttgcggcaatagtcgtggcgcaaattcccgaaatgacgggaaagacaaggaagcagagcgcttcgcaacagtgagcaggcattaaattacagaagcctttttaaactccgcagaaaagcccgaggagggatcctcggcggaaataggcagcccggtagcgccgagatacaggcgatatctgcggctgccgcttttgctttcggtaaagtatttgtcgttttcaaggctcacttcgcctcccttagtatcacggagaatctcgtaaagacaggtgaaagccatgccctcgggtatttcggaaagcgatgcattgtaattaagtcctgaatattcggctgttacggcatctcctttaaaatgcagcttaagtcccgcaagaccttcgggtgaggttatttcaatatcggtgtcgccgttttttgcgaccgataccgctccctcataaagctcgttgtaatattgcacggtgcaggtaaaagaaattccccgcaccaaaggggtgacggcacatttttgccgacaccccgaaaggaacagggaaataataagaataaactgaataggaaataattttttcaagacgagcttcctctctttaaagctcctcgatcagatccgtaggcagcattgcgcgttcgccgcgcttttctgccgctttatcgcccgcctcaccgtgaagataaaccgccgcctttgcggcgttcggcggctcaagcccctgcgccagcagggagacgatgattccggcaagcacatctccgctgccgccggtcgacattccggggttgcccgtagtattaaaggttatattgccgtttttatcggcgattattgtatttgcgccctttaaaaccaaaatacaaccgtatttcattgcgaaatcgcgggcgtattttacacggtcattttcaatttcccgtgcggtcacgccgcacagccttgccatttcaccggggtgcggggtcagaataaccggagctttgcatttcttaataatatctatgcagcaggctatcgtatttattccgtctgcgtcaacaactatcggtacggctgtgttgagaataagctcacacacaagcttttttgtatcatcatcattgccgagtccgcagcccgcaagcacggcagcagcgccgcgcagaagagagggaatatcaatattatcgggacagagcctacccgatgcattaggcattacaggcacgcacaccgcctcgggaacggaaactgtgaagggaagatagatactgtcacataaaactgcctttaaaatgccgaccccgcttctcagcgcccctcttgccgcaagcacggcagcgcctgctaagccgtagctgccgcaaaaggtaagagccgtgccgaaggtacccttgtgggaattatgccgccgtttttcaaggctcggtttttctgttgtttcgtattcgtatccgctcggcgtaacgcctatatccgccactgttacctcaccgcagtaatcggagccgggcgggagcaggaagcagggctttagtgctataaaggttacggtaagatcggcaagtattgctttaccgggcaccctgccgctgtcggttatgaccccgctcggaatatccaccgatatgcgcgggcagggcgcggtatttgaggcatttatgattttttcaaccgtctcggtcggcgcgcggttaagtccgatgccgaaaagcgcgtctattataaggtcggattttccgatatcggtctcattaccgaaatcaaccgaatcgaggcggttgtaataatattccgcgttttcggtcgaaggagcgcccatcggcattatgacggtgacagccgctccgtttttacttaatatatcggctatcacaaagccgtcgccgccgttgttgccttttccgcaaagaacggtgatttttttgccgctgacgggaaaacggctcatgataatatccgccgccgattttcccgcacggtacataagctcgcgaaaagagaaagcgccgctgtttacggcattttcctccgagcttcttatcaaagcttcagttaatacacgcatagcggcgcaccccgtttatttaaaagcactgttggaaatgaatttcggcacaaatttaactattgcggagcgaactcgctcatcgggtgcaaagaccagatagcttgtacccttgccctcggttgccgataccataaggtacgccccggggtcatcctgattgcaggttatgaaaagctccttggcatttacgccggaaagctgtgcgggattgaacttttcgattctcgaaacggtggcaagctcaaaggaaagaattctttttcttgagcttttgtttatgattttatcaatatccatcgttccgttggttacaatatactcatactccaaattgaaacgggtgcagagcttgtacgccccgaaaagcgcgcctgcggcgagcagcagcgagaatgtactcaaaaagggcatgaacataataagcaaaaagcaaactatgaatgcggcaagccaaattccgattattgcggcaacagcctttccgttttttttgaccgcaattatctgttcaaagaaagtatccattgttatatctccccatattatttaatataatacattatacaccaaatcgtattgtacttgcaatattttttgttttgttatataataaatttaccttttattaacaagtgaggtatttgtatgcgaattaaagacggctacaaggtagtaaatattcacggacagaacaccgtggtttacgaaaaggacggctccgacgctcttgaaaacacaattgttttatccgaaacggcaatgtttttatggcatatgcttgaaaatgggaaccccacaaaaaaggacatgctgaatgcgcttctcgataattttgaaatatcgaccgtgttggcgctcggagatattgatgtattcttaagaactatgaaggaaaacggaataattgaagaataaaatgagaaataaagaaaacaacggcagagccttaaaatggatatactgccgcataaggcgctacattccgctgacagccgccgtgtcggttatttcggcgctgtcggcgctcagctttgtcgcgcttgcgcttataaccaaaagggttatggacatcgcaacgggggatacaacgggcagtcttttgaaaagcggaattctgctttttacggtgattgcaattcagatcttgctgagcgcggcacagtcgattttgaacgcctactcaaacggaaagcagacgattgctttcagaaactaccttttcggcgtgctttgccgcaaaaaatacgcggatataagtgcatatcattcgggggatattctcaaccgcttcacctcggatattgatacggtggtaacaagctcggttaacataataccaaatattgtctctattgcgaccaagatagtcgcaggaataggtacaatgctttttatgaatccgtatattgcggcggcggtgcttttgtgcggagttacctttcccgcaatcggcagagcaataaataaaaggtataaatatatgcacaaggaatgccaaaggacagagggcagaacgcgcgcatttttacaggaatgctttgaaaatatcgtggttataaagacctttataagcgaagcaccgtttataaaaaagcttgacagctatatggacgataatttccgccttaagattaagcggacaagcatatcggtaatagcaaatatcagcctttatgcgctttttaccgccggctattacgccgtgcttttatggggtgcgggcggactgtcgggcggcacgcttacatacggcacgcttatggcgtttttacagctgatttcccagcttcgcgcgccgctgcagaacgtgtcgggaatcctaccgcagtattattcggctttagcatcggctgaacgccttatggagcttgagggagctgcggacgagcctttccccgcagctgcggaacgccttgaaaaaatcaaggaggattttcgcacgctggaaataaaaaatcttttcttcggctatgcgggcgagtctgttttaagggacttcagcttttgtgcaaagcgcgggaatataaccgcgataacgggagaatccgggagtggaaaaagtacacttttcaagcttatattggggctttacgaaccgcagtccggcagcattacgataaacggcgaaataccgctcgatgcgtccctgcgcggactttttgcctatgttccgcaagggaatatggtgctttcgggtacggttagggaaaacataacgatgaacaatcgcgcggtgaccgatgagcaaattgagagggctgcgcgcgctgccgaaatctatgactatattacatccctgcccgacggctttgaaacgcatcttgcggaaaggggcgcagggctgtctgaagggcagattcagcgaatatccattgcccgagcactgctgacaaacgctcctatcctgctgcttgatgaagcgacgagcgcgctcgatgaggagaccgaaacgagggtgctggcgaatataaagagcatgacggataaaaccgttcttttcataacccaccgaaatacaagcctcaaggtctgcgacagaatagttcatgtggaaggcgtgcattaagcgtaaaaatcgctttccccgtgtaaggggtgcgggtgtccggtgtacacctctgcaaagcagaagcaccgacagaggcgccgccgctgacagtgccgcccccctttgtcgtttcacgacattttccccaaacaccggggagacagaggtctgtacaaactataatctatcgtctgatatctaaattctaaaatcagtaaaccccgcggtagtaaagaccgcgggtatatttttcgggcgcgtttcctccgcaggtatatgcgttaattatcttttccgcctgtgcggcggtttcatcggtgaaataaagcgttaaaaagtcgagcgctttaagctcactcagcctgtctgcaagccaaacgggcacggaattcaacagctccgaatgattttttctgcattgaacgggaaataccgttcctttgcggtcggttatcgtgctttttccgccgcattcgctgcagcctttgccgttccttaccgggcagcacctgtaaagcataagcggcagcttcccgtaagcggcgattcctatcggaacaggggataaaagccgtgaaatatcgctcaaaagcatttcatcggagagggttatctcggcggctcccatgttttccgcttccgctgcgctcgccgaattgtatatattaagccctgtgtcggcaataaccgcaagaccgcagtcttttgcaatcttgaccgctgcgatatttccgcaaagcgcttctgtaaagccctgatttttaaataaatcaaggcggtttttaatatattcctcgtttatgattattcgcggaagctctgcgaccgcaatgattccttcgggaatttccggcgggtcttcctctatcgggaaaattattttgctgatattgttgagcctatccggcagctgatatcgggaggaaaatctggcgtacagcctttgcggctttacggctgaatgggacttttgcgcggtaaagccgtgaatcggagggcagtccctgtcggttttgctgcgagctgaatccaatttttcggcggcagctctgcggagagaattaatttctgcggcaggtatgaacagcccgtcctcgcaaatgacatcgatcttttcgggcaaatacggcgttgagccgaatttgtcaaccgcggctttaattctttcggcggtaataggtttattctgcgccgcttgcggtatttcaccctcggctgttacggtatgctcgccgtcgcttaaggtgaggcgcagcggggtatcggttttcgcggtcaaagcaaccgaaattttaacgctttgccgttctccgcggtaaagcgagtgcagcgccgaaaaagcggtgtcggcggcggtgacatcctcctttgtgcggatgccgaacatatcgcggcctaaattttcggtataatagccatcggtaaagcccgagcgtgaaaaaacattttttaaaagatcttcaatatccttcggaacacagcccttttctcgtgcggcatatgcggcggcagtggcggcggcaacatattcggggcgcttcatccgcccttctgttttgaaggatgtaacacctatatcgcataattccgacaggtgattcagcagtgacagatccttaaggcttaaatcgtgcccggtgccgccttcaacggaaaaggggagtctgcacggtcctgcgcaaagcccgcggttgccgctgcgcgagcctaaatacgccgaaagcttgcattgtcccgagacggacatgcataaagcaccgtgtacaaacacctcggtctcgagctctgccttttccgcctcgcggcaaaaaattttaagctgcggtaatgacatttcgcgtgctgcgaccacccgcttaaagcctgcttttttaagatacggcaaagccttgggggacatgaccgacatctgcgtggaggcatgaagcgcaagccccggcacggctttgcggaggatagaggcaagccctatatcctgaattataacgccgtcaataccggcaagatatgcaccgcgcgcaagctcgcacgccgcgccgagctcggaatcctttatcaaaatatttaaagtgagatatgctttaactccgcggatatggcagtattcgactacggtcttcagctcctccgcagtgaaattttccgcgtttctgcgggcggaaaaatcttttgcgccgaggtataccgcgtccgctccgcagcgcaccgctgcctcaagcatttgaaaatttcccgcaggtgatagaatctcgcccttttttttgttcattttatcgatcacactcccgcgctccgattttgcgggagcgccattacactctataatataacaaaaccgcgcatttttaaagcttttttttaaataatgcctgctgaacaattcaaaagtaccttaacccgagcatgttggtgt

SEQ ID NO: 363 - DNA, 3449 bp, Unknown
  16S sequences of unknown bacteria
gggttaatctggtatgggtcaaagtttggagctgcatttgcgatatgggctcttgaaagatttctttgatacttttgattggaaacgagatttttgatggggatcttttcaaaatgtacatctggtacaaataagctatggtcttccatgtcattcttcctctagtatccgcaacatttcgcccgtcttatcaatcagaatatgcagttcccgtacaagcgctgaacgcgcagtagacgaaataagggacaaatctgtttttgtctggattcgttgaatggaacccgtccatgacggaatggtcaaggtaagtcctgtaatgtccgcatctggatcaaacattggcatatcctttatcgattgaccaacaccgcctagcggctgttctaaggtacggttgattgcagttcgtgttttcttgaattgtacaaagggttgctgctgcatcctttgaatttttcgatctattttccgcatttcagctggatccagttttgaaagcgccacaatacttttgtgcgacaccttatactgcccagaaaggatctttgatccaagggaaggctccgtgtctacaattacatcaacagccctcgagtaaattgcatacttttctaccgttccagccgaaatgcaattatcatctgcaattctatccgcagttcgatgacgcgaattgtccgtacaggttttcttgaaggcggttgtagactctggcgatgaatactgattgaagccacttggatttttaatctttgacacaaacttttccgaatcgtactgctttccaatcagatactttctggtttcctctgaaagatttcgtcgaccaagctgattggcacaaatccatgcgatggcctcctctcgacagtaaaagttcatttctttcactgaaaacggaatgctgtgacgtgtacagatctcataacggttgtgtccatcgataagtgtcccacgccagacaacgagtgggtcgcggcaaccatcggcaagaagattttcctcaagctgcagatattctgttctttgcagcggtggaattagattcttaaattgtggatcaatagtaagtaattccttcattttcataatgatataagctcctgcttatctacccgttgcaatgtttccaacggaaatactgctacccgcatggatgaaacaacatgtccgtgcaagcggtaagcgcgcccatcctcaagctctggcaccaaggtgcgaagtcgttgtacaaacagtcggctatacagctcatatgatttttcagactgcatccgagacacgacaatgcgatggctctgttttccaggtgttccgctttcaacagattgtattgcaaccagctttgcttccggatttacaagcagttggatttggctcggtgaaccgagctgccgaaagagtgctttatgaatccgaattccatacttctttgtatcgaccgctaatgtaacctcgctgcaaacattttggttcactcgtatacctcctccattgatagctgttgagacagttcctgagatttatccggcaatgcaacttgggcttttttagaagcttctttgatagagtaaactgcatacccatcaaaaatattaacctgcatagcatgttgatgttccttgtacggcagtccaaactgattttgccatccggacggaaaaaccggtgtccgtgaagtccgcggcttttctccttctggaatacttctctgataaacctccgttgcagtcaggtcaaacgcaatcatatattcgccatttgcgtgaatcagacgaccgagcaatttatatctataatccggattccaagccatcatagaaaacatttttgcaaaaaataatttacaggttatttgccgcggagaacgcttccctttcgacattccgcaccacgcgaagctgtctcttgtgttttctgcacaggggcgtaatgccatgattttggtttcctgatttactagaacctgaacataaaaggcatccggaaatttgttcagacatgcgcaattcacataaaatttgtaattgttaaaagttacagctggctcgcgaagatgcgcaaagaattccctgcgcacaacctgaaatccctcaaaatcaaaatctgcacccatgtcaacaacttcatcattcgtattcaaagacggtacatcagaagaattgttcatatttgccgatacaggatcttcatttagagtaaaaacatctgtacgctgagaatcattccatgtctccattgtggtcctcctgtggcattgtaccacccaattctttcataatgtattgtctcaattcatcaaaatccgtaacgtgaagtttttttcctgtttcaaagagctgcccttgaagattgagcgcccactttgatctggtcatatgctctaaagccgatagagaacactcatgcagatagaactcttttccgaatgtaccgacccactgctcagggattgcccggacacgttttccaagtgtagaaagaggccggattgtttcttcgcttgcacttgctgtccgcgcagaaagctcctgtgatcggataaaagtttcggaatcagcaacatcgaaaatataaacaagctgcccggcatcttcacagagaattccgtttatacgatatttgcacgctgtattccagccaaacaggtgaaaaattgtgtcactgaatgcagcagctgatatttcgcgtggctgtggcttgccgttatagttcgacgaaatagccactccgcttcgatttgtcgaatctgtaggccgaacagcaaatttcatttcaagaggattaattagcaactccacacatcgctttgcaccgaaatgcttgacgcatgcagcactaaatttaacctttttatctgcaaacgtcacaaaagactgactatgcgcgcccaaaaattcggttctggttatttcaaaaccgcgtaaatcaaaatcacccgcattgaccgcaaaagttgcgttctcctgtacctgtgaggtcgtactggctgtggaaacatcagtgtatgcgcttctggcagcattcagatagtcttcttccttgaaaccggaccaccttgggttgatggaaacaaagcctttcagcaagccgtcatgaataacccggagctccggcaaaatggacttgttcccgtattttgcattgtccagcattcgctgaactgcgttgaaatcatcacggcgtataatggcgtcatgatggttatagtagcggctttgtggtttctcaccgcgatttttcagcgaccggtgtgttcggtagttttctgtgatggtttttcttgtaaggacatcgccacagtgccgctcgttgcgaaggatcgaaacgattccgctggataaccaacatgattttccaaaatatgtgcttcgttcctgtttggtcagtgcatcagcaatctgtttggtagagtatccataaagatacatataaaaaattagctt

SEQ ID NO: 364 - DNA, 2696 bp, Unknown
  16S sequences of unknown bacteria
agtatagcatattttccgcccggattcaagtgggttttgtaaatatccgggagaaagagttctgacaaccacaggttgctttttttgtttatcagaatatcttgattttccgcacggatgctgttataatatattcaaccaaaaaaaattggaggtataaaatggaactttcaaaaatgataggcaaaatgcgcaccgattccgggatatcgcaggagaagctcggcgagatcctcggcgtctcgcgtcaggcggtgcagaaatgggagtccggcacggcgctcccggacatcgacaatatcatcagaatatcgcgctacttcgggttgtcggtcgacgcgatgatcttcggcggagacaagcgcgcgaccgaggagctgacctttgagcgcacgctgaacccgcagtactcgacccttcacagctgggaaaactacgcgtccgagcttcagaccgagtacacacagtcgatcgaagagggcaaggacatcgagaaatactccgcgctcttcaaggcggcggcggctctcgaggacggcgagataaagcagaagctcgccgaaattctcttcgacatagtcctcaacgcccctacccgcgccgattacagatatcacgagccgtccgaccttgaaacgataaggctcgtcagatccgaaaaccgtccgaccctcgcgaaacccgacgaagcggcgctgaaggacaaaatcctcggcgcgtggacaggaagaatctgcggctgtctgctcggaaagccggtcgagggtatgcgcaccgagaatctgatcccgctcctgaaaatgaccggcaactacccgatgacccgctatatccatgacgccgatctgaccgacaaaatccgcgaggacacgtccttcaggtgctcaaagggtaatctcatcgacaccctgacgtacgccccgtccgacgacgacacgaactacacggttctcgccggagtgcttatcgataagtacgggcgtgatttcactccttgggacgtctcccgcgtctggctcgattatcagccgaagaacgcgtactgcaccgcggagcgcgtcgcgttctgcaacttcgtgaagggctacaaccctccggagtcggcgatctacaagaacccgtaccgcgagtggattggcgcgcagatccgcgccgactatttcggctacataaatccgggcgaccctgagaccgcggcggacatggcatggcgcgacgcgtcgatctcacacataaagaacggtatctacggcgagatgttcgccgccgcgatgatagccgcagccgcgtcgaccgacgatattaagacaataatcgccgccggtctcggtgagatacccgctaactgccgtctcgcggaagatgtgaagctcgtggtaaaaatgtttgacgacggcaaaacaagcgaggaagtcttcgcgaaaatccacgagaagtgggacgagcactccggtcacggctggtgccatacgatctcgaacgcgatgattgtcgcggcgtcgctcctgtacggcggcggcgactacggaaagtcgatatgcctcgcggttcagaccggcttcgacaccgactgcaacggcgcgacggtcggctcaatcatcggcatgagaaacggcgtcagcggaatacccgaagaatggtacagaccgctgaacgacaagctgagcacatcgatcttcggtgtgggaatagtgaaaatctcggaaatgggagaaaagaccctgaaggtagcgcttgacagataaaaacacggggaaccgccgcgaaaacggcagttccccgctttttttcattcagccgcttttgccgcgaatatcacggcgctctcgcggttgacgtcgatgttcatcccgtcgatttccgtgccgagctccgcgtctgagtacagagtgtacccgccgcctacaaacgtcacgttcacgtcgcgcgcgatgttgaagttctgcacctccggcgtcccgctctccgggtcgatcgtcagggtcagcgcgcagtcgtttccggttccgagcatctgtgccgagatgtcctcgccgatcacgttcgctgtgtcgtagttcacggtcgtcttagacgtcgacgtgagagtcccgtccggcgcgtaggtctcgatcgccatcgcgaagataagccctgttttcggcgcgacatagtaatacgactcaaggtgcggctctccttcgttctccgggacagacctcacgtggacgacctcaagaccgtcctgcgccgccatgtccgcggtcgtctcggtgtacccggacggctcacggaaccagtaggacgcgacccgcgcgtcatacgccgccgccgggagcacgaccatgtacttcttcccgcccgagatcgcgtagatcgcgcccggctgatcgtcggtccgcgttccctcggtgtattccacctgcccgtccgcgtaggtgttcactatgttcagggtgatcttcccgtcgatatttatatacttgccgtcggaggtcattatgagctcgcccgacccgtcggtcagctctgtgtgataatcgaacgacgtgtgctcggagagtattttcagcgcggagttattcgcgcggatgtcctccggcgtgaaatcgacaagctcgatctcgaccggcggaacagtctccgcgggttcggtgtccgggtctacctcagtcgccggaagcgtctgttcggtcgtgtcctcataaaccgtctgc

SEQ ID NO: 365 - DNA, 3299 bp, Unknown
  16S sequences of unknown bacteria
agcgtcttccatatcgaggactatgagaagatcgccctgccggcaatcgccacctcgctgtcgtgcatcctcgtcgccggcgcgctcgtgctcgtcgacctgggcggcatcgtccgtatctggcgcatgatcgtcgggccgaacttcatgagcccgctcgtgtgggatatgtgcgtcatcacgctctacatcatcatgaacatcgtggagctggtgtttctcgtctccaagaaggaaggcgccgcccacaagcagtgggtcgcgagctgcatcgcgctgcccgtcgccatcctcgtccactccgtgaccgcatggatcctcggcttgcagatcggccgcgactggtacagctccatcatggcgccgctgttcgtcgtgtccgccatggactccggcctcggcctgctcatcctcgcgctgttcggcctgcgcaagggcggctggttccaggtccccgaccgcctgttctccaagctggcgatcctgctcgccacggtggtcgcactcgacttctacttcgtgttctgcgaggttctcgcgagcgcgtatccgcaggaagagcatgtgctgcagactctcggcgagatgttcgccggcgcgactgcaccgttcttctggctcgagatcgtcctgctcgtcgtgagcttcgtgatgctcgcctccaagaagcgccgccagaacatgaagctcgtgggctgggcatccgcgctcgtcgtggtgagcgtcttctgcaagcgcgtgtggctgctgttctcgagcttcatccaccccaacatcgcctacggccccggcatctccagcggctcgctttctgcgcgcctggcgtcgggtgatcagatttgggcggttaccagcaactacgcgccgacggtgcccgagatcatgatcgccctcgcggtcatctccttcggagtcgcggtcttcattgtgctcatccacaagctgctgcccaagtacaaagaggcgcacgcggctcaggtggccgagctcgagcaggaaaccgctgccgagcgcgctgcgcagtagttggaggccctccccgagagggagcggttcccttgtgatgccggcggggccccgattgtcccgccggcttgtggcatggaaaggcgatgtgcatgtctgtcgaagtgaacgacctgttggatgccgagcagtggcgcgcgtatggcgtcgtgtacggctttgtgggaaacgagctactcacccccatgaaccgctcgggcaattacgaggggctcgacccgtcgttctgggcggccatgcccgtccccgataacgacaagggggcacatgggttgcagcgcctcgaggcatacgcgcgggctgctgcagaaaacgccgaggctgacgcgacgggtgcgctcgtctacagcgacgaccccgcggttgcgggcatgatcgcgacgtctgtcgagttcacgcgcctgttcataggcccgccgcgtccggcagccgacccttgggagacggtcaacgacccctacaacgacaagaaggtcggctatgggcgtgcgactgtggcgatgcagcagctgctcgctgccgagggactcgagctgggtggcgagaacaaccagttcgaggaccatatgggcatcgagctgctgtacctttcggcgctgtgcgagaaggcggcggcagcgtttgccgaaggcgacgaggccgtgcgaccggtcgcgaacaaggctgcgtggttcatcaaagcgcatccgctgttctggatgcagcgcttccgcgccaacgtcgacgccgagcggcccgaaggctactactccgcgcttctcgagtatgtcgacggagtgctggaagaccactacgacacgctggtgtagcgccctctccgcgccctccccgcgcgggatgcgtggcagtgccacccttttcgcgcggggggatgaaacgttgcagaacgtgcaacgccaattgcatggagtgcaacgattcgcccgcttgcagcgcagtatagtaaacgcgctcgaaggagtgagttttcggcatcagccaaaacgaactcaggttttcgaagggcactccccactgtcagccataggcagtacgcccgagaagactttagcgttatccctccttgtctgacatttgtcagctgcaagagacccagagaactccggttcctgggtctcttgctttttgcggaaacatcgcggcaactccgaggtaacggagtgtcatccagagcctctggcagactgcgcagcgggtatcctcgtcataagaatctcctcgaggttaggagccgtcatgtcacttacgaaacagcagctcgatgggtggaccgtcggggcggcacttgcatgtattccgcgaatcggcggtctggagcacgtgctcctcacgcacgacggccgtctggacggcgatatctttctggcgtcgcgcgacgaacatggcaccatgaacgttatcgcctacatcgatggcgccacctgcaatgcgtacgcctgcgacacgctccccaaggccgacgcggtggtgccgcacgatacgggaaaggtaccgctcgtgaggatcgtcgggtcgctcgatgatgccacgggccagctcaccatccgccaggaaagcggggcgtaccgccgttacagcaggtgggaccgtctcgataagggcacgccccagcaccccgctgcggtcgtgcgcacgttgccgcaatgtggctgcggaggctatctgggcgctccgatgctcttcgattcgatgccggaaatgaccgcgtacttcttcgtcgtcttcttggatgcggcggcgcagggcagctcacaagacgagtcggtcacgccggggcttaccgcatgctcgatcgcggcatcgcgctagatacctgcccgcccttcgtggcccacgcacccctcgcagcgggcgcttacagcgcgcgctcgcggtagaacagcatgagcacgaacgagattgcgttgaacacggccacgcagacgagcatctgctggtagcccagcatgccggagccctgcgagatgaagccgacgagcacggccggcgccagagaggtgccgatctgcctcacgagcgcgatcgtggcgatggccgagttgctgtccttgggatctgtgttctccagaatcatgtagttggtcggggcgcccatcgcaaagcccatgcccaggccgacgatggcgagtcccaggacgagcagcgggacgctcgggcttttcgccgccacgaacgcgagaaagagaaagcccgcgatcatgacgaccaggccgctcatcagtacgggcttggcgccaaagcggtcgatgaacttgcccgcgagcggcggcccc

SEQ ID NO: 366 - DNA, 20640 bp, Unknown
  16S sequences of unknown bacteria
gcgacgagctgctcgtcgagcgcgtcgattgcccgccggtgctcggcgatctgcagctgtgcctgtgatgaacttgtcatatgcgctccttggtctagagtctcgagtgcttgccaatgttgacggacttgcgcttgcccgtcttcttgatgccgatcttgcccatgaggaagtccccgaagtactggttgtagaaatacgacaccagcaccccgatcaccaggccgagcacgatgccggcgaggacatcggtcgggtacgccacgcccaggtacatctgcgcaaacgccatgagcgccgcgagcacgaacgccgcaacgcccgagcgtctgcccgagagcaggaaaaagacgatggcggcggcaaacgaggtcgccgcgtgcaggtcgggaaacgaggcgcccgcttgggagacgccgacgaccgacgtgatggcagcaagctcgatgcaggggcgcgtccgcccgatgacgctgcacaggatgttgccgaggatcaaggtgatgacgagcgcgatgatcgtgaccatgccggcacgcctgcgctcgggcagaaagaccatgatgagcgccaggacgaaccagatgaacgcggcgttgccgaatgccgagacgagcgcgaacagctggacgagcagcggcacgcgtgccgactgcagcagggccagtagtgcttcttccatctgatgctcctcatgctcttgttgtgcggtcaaaggccagtagattctagtacatccgtgcgacatggtatcgcgcgggctgctgcggggctctagattctaccctccgcgccgcgtctcgagtaccccatggggcaattgtgacggtaccgtgtcgatatggggacattttgcatgtgcagcgctgtccacccgtcagaagaatcgtatagttgtcctcccacatacgaaggctcggaaaggcggcgcacgcgttatggcattactcgaactcgcgatattcctcttggctgcagtactcgtctccgcagttctcgagcctttcttgccgcgagtctcgctgccgctcgtccagatgcttttgggcgttgtcatctacttcttcgtggacctgccgcattcgctttccatcgactcggggctgttcctggtcctgttcatcgcaccgctcctgttcgacgagtcgaaaagcgccaacaacaagctgctgtggacgaaccgcaacaccatcttgggccttgctatcgggttggtgatcgtgctcgtcttgtgcatcggcttcacgctgaacctgctcgtgccctccgtcccgctcgccgccgccttcgcgctcggggccgcgctcggcccgaccgactcggttgcagtggcctcgctgagcaaggacatcaagctcaactcgcgccagaaggccctgctttccggcgaggcgctcctcaacgacgcgtcgggcgtcgtgtcgtttcagttcgccatcgccgcggcggtgacgggcgccttcagtctcgcagacgccggcaagaccttcctcgtcgacttcctcgggggcatcgggctcgggcttctcatcggctacatcgcgtttctcgtcatgcgccaggtacgtcgcatcggcgtcgagagcgccacgttccacgtctgcttcgagctgttcctgccgtttttcgtctacctcgtcgccgagcacatacacgtgagcggcatcctcgccgtggtcgccgcagggcttctgttctcgtacctgcaccgccgcgaggcgcgcaagggcaggaacgcgcagatgttctcgacgcgcctcagcatcgcctccgagaacgtgtggagcctcatctcgttcgtgttgaacggcatcatcttcatcacgctcggggcactgctcccctccaccgccgcccccgccatcgaggaatctgcaaacggggtcttctccctcgtcctcatcgtcatcgcggtcaccttcgtggcagaggcggtgcgcttcgtgtggctgctcgcctccgactggctctcggcgaacaaaacgacgggcaagcgcttcgacaccggcaagaacacgcttcgaaacacgctcgtcaccacgctgtcggggccgaagggcgccgtgtcgctttccatcgctatgacgataccgaccacgctctcctcgggtgcggcgtttccccagcgcgacctgctgctgttcgtgacctgcggcgtcatcgtcctcacgctcgcgcttgcgaacttcgtcgtgcccgccatcgcgcccgattccgacgaggaggccaagcgcatcgaaagcgaaatcgagatcgagatctaccaaaacgtcatccgcaacctgaagcgcgtgcgcacccccgaaaaccgcaaggcatacctggcagtgacgcaggcctaccacaagcgcatcgcgcgcatcaagaaaagcgacgcgtcctcacgccagctcaggttcttgcagcaagaggtgctcgtgcagcaagagcagtacatcgagcactgcatacgcgcggaaaacgtcgaccgcaggctcggcgagacctacctgcgccgcatcgccaagctgaagaagaacctctaccgcaagcagcgcatcggcggcaggtcggtggaaagcgcgccctcgctcaactcgacgacgacggtcatgcacaagatcgagtacaagatccgcgacgatgcgaacgtgcgccgcaaccgctgcaacttcaagatcgggctcgagcgcgtcgccatcgcctatctcgagcaggcgctcgactcccccgaccgggacagggccgatgccgccgaggcgctgctcagcgagcacgagcccattctaaccatgctcgaggcgcgtctgcgcaccctcaaccgcgagcagggcatcgtcgagagcgcggagcatctgccggaccagacggtcatcgtgcgttccgacaccgggtctttgcgcgtgagctcgagcaagaagaccgaagaggagaaagacgacgatttcgacatcaggtacgcgcaggtgcaggccgaggcgctgcggctcgagctcgacgagatccaggcacagcacgaggctggcaacctgacggcagaagacgcccattcgctgcgcgaggaagtctacctgctgcagatgggcctgagcgactaagcgagcgcctctcaccaagaaaagagaagccgcggcgcgttatcgcgtcgcggcttggtgtcgaaacgttcttcttgcgaggtgcgcctcctagcgctccttctcggcggcctctttctgggtgcgaagctcctcgacgcgctcctcgaggagcgcgatgtccgactcgctcttcttgaagccgcgtatcacgatggcgacgaagacgaacagcgcgatccagatgagcgcgtatgcggcgatgacgtagggcgcggacgggagcaccgctccatagacagaattcagaatctcgttcatttttcggtactcctattccagttcgtcgagttcttctttgaggcgctcgatgcgcagcgagagcagtgactggcgcagccgcacgcggtagagcgcaaaggcgatcaggacaatgccgagcatgcagatgagaaacggcacgagcatgtcaggcggcaggcccgaatccgtgcggaacacgacggggtgcgtgctcgacggaatgaggcgcgtgatcatgaagcagatcggggcgtcgatgaacatgatgatgccgaacacgctcgcgtacgagcagcgcttctcgctgtcggagaaggccgtgcgcaagatgaagtacgcgatggccatcaggatgagaatcaggtacgtggtcagacgcggctcccagctccaccacacgccccactcgaacctcgtccacggcacgcccgtcaccatcgtcgcgatcatgaacacgacggcgacctcagtcgcggtcttggcgcggacatcgtagccctcgtctcgcgtcatgagatagcgcacgccgtagaaggccgtgaagatgagcgcgatgaacgagctcatggcaaccgggacgtggaagtagaagatcttctgcgagaagagaagctgattcgcgacgagctgccccgcgacgagctctggggtcacggcagcaccgtgcaccagcggagcgacggtaaacgccagcacgaacccgagcgcagagatcagggcacccgcaacgagaagtgcgggaacataccggtcgaacttcgaagcctcaagcagctttttgttcacagtgtcaatccaatctacgcgctaatgacgaaatcatacaagacccacgacgcgagcgtcatgacaatatcgtaggccccggcaagcagcacgccggtccgaaacgtctccatccaggcatcggcgccgaccagcgccgcggtcgtcgcggccacgcaagcgtagagcagcggaaacacgacgggaatgaacagcacggcgagcagcacgtctttggagcgcgcgttgaccgtgatgctcgagagcaacgtgcccactgccgagatgccgatggaccccaagacgacggaggcgatggaatacggaaacgaaggtgccggcgctaccgaggtcatgaagaagaagtagaacagcggcagcgcgatgacctcgacggctgacaggaagatcaggttcgacacgagcttggacaggtagatgaccgagcggtccatcggaacgagcaggatgccctcgatgcacgaggcctccttctcgtaggagaacgacctgccgaggccgagcagcgaggtgaacacgatgagtacccacgcgaggcctcccgaaaggtgcgccacgtcgactgccttgccgagctgcgcgaacgcgacgccgaagatgatgagcacgagcacggcgtacaggcccatggaggtgagcatctcgtgcgtgcgcatctcgtggcgcaggtccttgcccaggagaatcttgaattgagtgaaagcggataccttaccggtcatgggacgttacgcacctactcccacttgctcgtagtacacgttcttgaactcgtcgtactctagctgggactgctcggagaacatgacctgcctcccctttgcgagcagcagcacgtggcttgcctgcgcaaacccgctctcgagcgaatggctgacggtcacgagcgtgcggcgctgcctggattcggcgagcatcctgtcgacgatgcccgcagcgtgcgggtcgagccccgagtacggctcgtccaaaaagacgattcgcgggtcgttgatgaacgcgcgcgcgatggcgatgcgctgcgtcatcccgcgcgagaatccgcgcaccttgtcgttggcacggtgcttgagctcgacgagcgagagcatctcgtctgcagccttgtcagggtcgtccacgccgtacaggcgcgcgaacagcacgaggttctcacgtgccgtgaggtccaggtagagcatcgggttatgcgtgatgaacccgatgcagccgcgcacctcgtcgacctgctccttgtacgagagcccgagcgcttcgcacgtgcccttcgacgggcggtcgagcgtcgagaggatgcgcagcagcgtcgtcttcccagcgccgttcgggccgaagatgacaagcgaggcgccttggggcaactcgaaatcgacggatttcagcacgcgtcgggcgccgaagcgcttctcgatgcccgtgacgcgcaacgcgagagcatcgggcgagatatccaggcggctgtccttgccgttagtcatcggcgtctttcctcgagggacggatggcaagcgtgcttgctgccgtgccgatgacgaacaggatgaagccagtccacacaaacgagatgagcgggttcacgcgcacgtcgaccgagtagtcgtcgttctcgttgacgccacggtagacgatgaacagatcctcgagcggcgtcgactgcactgccgcctcgtacttggtctgctgcgtcatcgcattgacctggatcccgggcttcatcaccccgaggtccttgccgtctttcttggcgttaagctcgagtgtatagtacaggttcgtcttgtcgatctgctttccgtaggcgtcttgcgcggagacctcgtagtctttgagctggatggtctgcgcggcctcggagtcggaactcgaggcgaggtagcccgcatgctcgctgacgtacatggacgagccgatgaggccgatgaggataatgccgagcgccgcatgcgagaacatgccgccgattgccgacgcatggcgcctgaagcgcgtgaacccaccggccgagtctttgtcctgcgtgagtgccgcctgcttggcaggggcatcctgcgcgagcttgcccaggtcggcaagcgtggccgtgccctcggaatgcttggcggccgccttctcgagctgctgcgccttcgcgccatcagcagacgcggcaggcttgccgttggcaaacgtggcgcgaacggagcggatcaagaggtagaggctgttgaagatgagcaggctcgccacggcaaagcccacgatcgccagcccgttgtaataccacgcgggaccagaggcgagcaggtcgtcggcggccgtgccgccctgtgcgatcgtcgtttcgtaggcaggcaacaggttggtgaagaagtagaccatgagcagcacgaacacgacggcggcgcaaatgccgggcaccttggcgcgtttccagaactgcgctcccccgctgtgcttccaacccaagagcgggcccactgcgacgatcaggagcacgacgatgccaagcgggcgcgcgatggcgttgtaggttccggaagtcaacgactgtccgccgagaggcatccacgagggaagcgccgaggcgatggtcatgtaagcgagcacgaacgcgcccaccatcatgatgaggttgttgaggaagtagcccatctccttgctgaagaagctgctgtcctcgtcgtgacgcgtcttcacgccaaacgacttgcggcggccgaacatgccgaacacggccgcgaccagcgcgacgacgatgagcgcaacgaacagcacgagcgagacgttgtcgccggcaaacgcatgcacgctctgcacgatgcccgaacgggagatgaaggtgccgacgatcacgaacatgaacgcgaagcaggcgcacacgacactccagcgtttgaacgtgccgtgcgtgcggtacaaggtgaagctgtgcataagcgcgacgcatgcgagccacgagagcaggctttttttttgcgttctcgaccgggtcccagccccagtagccgccccagccgagcacgacgtaggcccatacggagccaagcccgatgccgatgccgaggaacagccaggaaaacgacgcgacgccgttcacgcggttaacccacttgacggagtcgtcgcccaagatcatcgccgcgagcgcataggcgaacggcaacgtcaggccggcatagccgatgaacagcgtcggcgggtgcaccgccatcgcccagtgctcgagcagcgggttcatgccgagcatcgtgccggtgatcagctcgccgttcgcgtcgaagaagctcgcgtcgagcggcgtgaacggcatgttggattcggagaagaacagcacgcccaaaaaggccacgagcacgagctgggagatgcacagcgccaagtcgtcgagggcttccttcttctcgtcgtagcgcagcacgaagtacaggttgaacgcagagatgagccacgcccagaacagcagcgagccctgacgcccagcccacagcccggacagcttgtacagccacgccaaatcggaggtggaattgctgcgctcctcgaccacgtacttgatcgagttgtcgccgcccatgaaacagatgacgagatcgaggcagcacaccgtcaacgcgacgaacgtgacgatggcgcccgcgcggccgatgaagctcacgagctctgcggattcgtggcccttgttgtgcagaatcgtcgagacgagcaggaggagcgctcctgccgccgtcatgtcgaaggcgatgaggagcccaatgtgtccgatcattaccatagcgatgtttctactttccctttgcttcggccaggtcggttgcggcgaacacgccgctgttctggagcgatccggtcaagaccagctcggaggaatccttgacagtcgtcgggatggcgctcgcgtacgagacgggcatctccgtgccgtcatcggtgtcgacgaggacaaaccggacgtctgcagagacatcggcgagcgactgcggcttgaggatgccctgcaccttgaccggcttgtcgtagatctgcgccccatagccgaggagcttcgagacgctgagcgcgtccgttgccgtctcgtatttggaggggcacttcgtcacgaggtcgttgcactgcagggtgccgtcgcttccgatggtgcccttgcagatggcggtaacgccgttgccgaacgtggccgcgacgcccttgtcgtagaccaccttgagcgttgcctcggggtcgttcgtgtcgtagatgctgaacgtgagtgtgtcgcccttgatggaataggaatcgtcgacgacgtttccagtgacttccaccttttgcccggctgccccaggctgcgaagcctcagccacgctcatgaccttgttcgtggtgccggcgctcacgaaggcgatggccaagatgacgacgatgacgatgatgcccgccacgacgatgtagcggcttttcttgctcttactcacggtgttccccttttgatgaagcagcggcgagaattgtaccttatacagcaaaatggccccgcaggctaatccctgcgagaccattctacttgaagctgcaacgcgcgcttcgagccaatccccatcaaattcggaaaaagcgcgaattacaaggtgacaatcggcctattcgttgccgaaggacttggccatcaagtcctggctctgctgataggtaagccaaccgtcgggcacttccacgttctcatgctcatggcagccggtgcaggcgaccacggaggcgcgatggcccttgtggcacgtcgtgcactgcatctccaggttggcatgatgcgtgtcgtgcgggttgaactccatgtcggcagtcgtcttctcgagcttcttgcggtcgaccttgccatcggcaccaagcaggtagctgtggcagttctcgttcgcgcaaagctgagaggactccttgccgtcccacttcatgagcgctgcgccatcgcgctcggtacgcgggaggtaatagttgccggagacgaaattcacgccgtcgtgcgcaagctcctccatattgggaacatggcagtcgacgcatttgatctccgacttggcagtcgtgtcgttgctgcgatgtagcacggacatcatggcgttggtgttggatacgggattatcgtacttgtcggtgccctgcacaccctgctcttgcgagtagttggcgacatagtcggcctcgatgtggcagaacgtcgagcagaagctcggctcctcgtgccatttccacatgcctgcgcccgcgatgaccagaacgacgacgacaatgccaatgatggaccagaacttcttccggctcatcttcttgcgcttcttcttgcccttcgcggtgggagttgccgcttcggcagaatcgggcgcactgttcatggcctcgactttctgttcttctttcatcttcgtcgctcctttctgctatctaaagaagctactaggagattaccgaagacgtaccgaggattccgtcgccctcattgagaaggttctcggcgttatccagaatgtgagtgtacagcgtcgggttatgagcgccttcgctgttctcggcagctgcgaggttccagtagtagcacgcatcgcgctggatcttctggagctgtgccttctggctgtcgttgatggagttggcctggatagcagcctcgaagttcttgatgaactgctcggcacgcaggccaatctggtgcgtacggccatcgatgtcgtcttgccaagccttgacctcggccttgatgtccttatggcacttgctgcaatcgcggtcgatcagatcctggttgtcgagcgggctgatccaatggtggtcggtgtacgccgtaccgtcggaggcgtacttggcggccatatggcagtcgttgcagtcgtaaccgaggttggtcatgtgattgccctcgccaccgtagttgaactcgtactcggcatggcggacggcgagcatcttcgcgccggtggactcgtaggtccagtcggcgtagttgtggtcgtcgtaccactgcagagccttttcgggaaccatggaggcacggccgttgtcatacgggctcgtcggaacgccggtaaccgggtccatcgagtagtcgcaatggcattggccacacacctggccttccatcgaggcggtggtgtcgttggccatgacgcggcgccattccttacggtcgacggcgagcgtcgtcgggtcgttttcgtggcacgaagcacacgagatgttctcggtgaactgcgaaaccgtctgcttgaagttctcctggaagatcccgtcgccctgctcgtctaccatattcgagaactgcggggtcttgcaggcaatgcagccggccttggtcttgtcgttgacacggccgttgtgcgtcacagtccacagggagtacacgtggcctgcgggctcggtgtagtacttggcgtacccatagcccttgccgagagtcttgatctcagggtagagctcgaggtagttggccttgtgcgaatccgttggctggtagccttcgggcagtttagaagtggtgtcctccgaatctttgtactcatcccagggcggagtgttgtccgcgttttccagataggaagcatactgatgggggtagatatccttccattggtcggcttcgacgacaccgaacttatcgggctcgggtgtcacctcggcctttgtagcttgcggcgtagggttgcctgggtttgccttggggcgcatcccacaatcccgacgacgaacgccgcaaccgccacagcgcaaatcacgagaagtagtcttttactgttcaatttacgttgcatgacggcctccttcctgcatacttctcccaaatcgcattttaatttggaagtttccgcaggtaaagcgtgaatcccgtcagttttgtcgggtgccagtcaggttcccaacagatactcactatccccactacaaaagagcaggtcagcttgacgttggggatgccttgccaaccacatggggacgaaaagaatttagacaacgagcagcgcgatgaggggaatcgtcagaagcgagagcacggtcgtgagaaacgtgccgcgcatcatggtgtcgacgtctcccccgtgcaccaggcacatcatggtgccgacggaggcgaccggcatggccgagctcacggtaagcacgcccagaaccagggggtcgtcaatgaacagcctgaacagcgcgaaaacgaccaccggcacaacgagcagcctgaacagcgccgagatatacggcgtgagatggctcaccatcgatttcagcgacatcttggcaagcgacgagccaatgatgagcatcgaggcgggaacggtcagctgccccagatagctgcatgaggtgccgataatgcccccaacgtctgtgaccttcgcaagggcaagcacgatggacagcacgcaagcagccatgcaggggtttgcgagggtgcgagcaatcgccttcgcgcgtttgcaaatgccgacgtggggcctatcggcgctgtcccgccgtttgatcatcgcctcgcctatcgagaacagggcgatgttgtagggaatgttgtagacggcgccgtagaacaccgcagaggggccgaaaatcgcgctcagcacgggaaagccgatgaaaccgacattgccgaaggcgatgatgaaggagtgggtacccttgctggcaggcgatttgccgcggtagagacgcggcacgagctcggcgatgaggatgatgatcgtgtaggcgacgaccgagcaccctatgagcagccatatcgtctgcgcgtcgggcaggttctcgttcgtgagcacagaactcaagatcatcgcaggaagggcgaccttcatgacgagctgagagagcatggtgtcgaaccggtcgttcatgaggcggagccggcgggccaccatgcccacgatcagcaggatgaacagtatcgccatctgcgaggcagcatgaagaaagacgtccatctagacggtcttcctagtcttaaaggcggacactgtgtcttattcgccgtctttctggtcggcgtaggtgatcttcgcatgctcgacgacgtacttcgaagcggcatagcgacgagcgacatccctgagcgcaaatccgcggccggactgctccatgttctggcggaccgcccacgggttttgcgggttgagctccgcgcaggcgttctggatgtcgtcgtcggtcagcgcgaggcccatgtggttgaacacggcatcgagcgcatagtcgcagcgcagcgtctgacgcgcctgcatcatcaggccgatgttgaatgcctgctcgccgccctgctgcttgacgaactcatcgtagtcctgcccctgctgggccagctgcgcgcgcagcgtctggtcgatggagcgggcggtctcctcataggcctcgtcgggaatcttgccgacaacgcgctctgccagcgccgtctgcgcgacgcccatgacctgcatgtcgtactcgtggcgcgccgtgccctctaccgaggccctgacctccttcttgagagcgtcaacggaatcgtacatgggcatgtgcgtcgaaatccactcgtcggtgagctcggggtagacaaccttcttgatttccttgatggtgaccgtgcactcgtaggtctcggtgatggtgttaccctcatcgtcccacgagggagcctcgaagctgaagctcttcgtgtcgccgacgttcatcccgtagatgttgcgctcgaagtcttcgggcatgtagccttcgcctgtcgtcagcacgcgcgcatccgtcgtgaggttcttgacctccttgccgttgtgagtggccttgagcgcgataaggcagctgtcgcccttggcgacgggacgcgggtcgtcggtgacgaagtcgggatacgtgtgcgtaatctgggtgaggcgcctgccgatttccgactggtcgtactcgaacttggggaccgtgatctccaccggctcgtacgagctcagctcgacgtcgggcttgggggtgaagctcaccttgaagctgtagggcttgccgcgcttgagggtgtctgcggaggtcggtgtcgggacgctgatggggacgatatccttggcgtcgagtgcgaagggcaccagtgcctccatgacctggggctgcatgaccgaggcgacgtctttcagcttcaaatgctccttgatggcctgttctgccgacttctcgccgtcgggacgaagaccgagtttggcggcaaagctcgactcgacgtaatcgtaggccttgttgacctcttctgccgttgccgttgcgctaagttcgatcttgccgtcggcaagcttcttctgcttgactttcatgcgctccctctctcgagctgatgtctacgtgaaaatggtatcaaaagagcggggacgttatgctcgttttgagataattcaacctatctgtaaaccagcctgcagacgcgtcacagtctgtcggtatcgagccaaatcgtgaacggcccatggttcgtcaggctgacatccatgagcgccccgaactcgccgtgcgcaacgcggaaatcgtccgcagaggcgcgcctgatgaagagctcgtagagacggcgcgcttcgccgggctccatcgcgtccgtgaacgacgggcggtttcccttcttgcagttcgcgtagagcgtaaattgggagacgacgaggacctctccgccgatatcggacagcgacctgttcgtcttgccctgctcgtcttcgaagaccctcagcttggcgattttcgtccacaggtgctcgacctcggattccgtgtcgtcagctcccacgccgagcagtacgacgaatcccctgccgatctgcgccgtaaccgcatcgtcgatgctcacttcggcatgtgacacgcactggacaagcgccctcatgaaaactcccctctcagagtgccggtcgttatcagctcttgctcctgcgccggcgtcagcacatcgacgctcaagacgacgaccgtcccctctacgaccctaaacgtgcagagatactccccgtattgaagccagaacacacgctcgtccgatgtggcgcgcgtatatgcggggcgcggatcctggagcagcacctgctcaaggccgctgcccgcccgcgaacagcgctcgctatcgtcttcgcgcacgaacacgacgcgttcgagcgtaggccatgtgacgtggtcgttccacgatccatgtgcgaacttgatactgtctgtcgcggggtcgtatgggtatacctcgtagatcggcgtgcccgataccatgtccgcgtccgtgacgagcacgcaagcccgccccgcctcatcgcgatacaccgcttcgacgcgcacggaggagatggcgaggttgttggggcgaaagctcgagcgcgtcgcgaacacgccgacgcgcctggtcccgccgagaagcggaggacgcacggtctttgaccactttgcgcttgcgcgatggttgagcgagaaatcccagatgagccacaggtacgaaccagcgcgaagctcaaagaccaactcgaacttcgggccgaggatgagcctcgattgtgcacccgtgacgaggccgggctggcgagggacgccgaacttcgtgagatacggtgtctcgatatgtcctacaggctggatgtccatgggaagcatgatagcgcgggaatctacgcaggtgaaaaaagaatcaatccccctcccctgcaggcacgcacggcaagcatgcgcgggaagagtggcactgccacgcatccgccgtctggtgcgcgagaatcgtggcactgccactcttctcgcgcagggcacgtggcaagcgggaaaactacgggggtctgcgggttttcaccgcaggcccccgatgtgcgaacggtgctccgtcaacacttaccgttacctaccggcagcacgcgcctgctggtattcctccacaagctgctgcgtgacatcgtagggagcctgctggtagccgttgagcgcaagcgtgaacgaaccggtgccactcgtgagcgagcggagatccttgctgtacgtcacgacctcggcgtagggcacgcgcaccatgatgatcgtgttgccgatgtcgtcggaatccgtgccaataatgcggccgcgtcgctgtgcgacatcgcccatgacggcgcccgcgtactcctcccccacggttatctccatatcggccatcggctcgaggagtacggcacctgcccgctcgcaggccgccctgaagccgatacgcgccgcggtcttgaacgccatctcgttcgagtcgaccgagtggtagctgccatcgtagaccgcgcacttgatgtcgaccatcggatagcccgcgaggaagccttctgccatggcctcctggacgcccttgtcgaccgccgggatgaacccgcgcgggattctgccgcccgtgacctcgtcgacgaactcgtagccggcctcgggattgggctcgatcctgagccagcagtcgccgaactgtcccgcgccgccggtctgcttcttgtagcgaccttgcgcctcggcggtcttcgtgatggtctcgcggtacgggatgcgcacgtcggacagcttgggctcgatgccggtctggtccttcaggcggtcgagcagcgtgcgaagcgccgtctcgccgcgcgtgtacagcagcgtctgatgcgtctcctcgttgcgcgtgtagatgatggtcgggtcggtctcggcggccttggacaggaaggtcccgagcttgtcttcctgcttcttgtccgttgcctcgatggcaaccggatactgcggagccggcagcgggaactgctcgaccgcgatctcgccggtctcggagatggtgtcgcccgtgcgggtctcggaaagcttgggaacgacgatgatgtcgccggccttcgcgctgttcacgtcggtggactccttgcccatcatgacgtagaggtggccaaggcgctccttcttgcccgtacgagcgttgacgagctccatgcccggggtgagcgtgccagagagcaccttcaaaaagctcaggcgcccgacgaacgggtcggcgatcgtcttgaagacgtaggcagcggggcgcttggtctcgtcgatggtgatttcctcgccatcggccatctggtaggcgccgtggctgcgcggatgcgggaagtacgtgcagatgtcttccatgacgccggagacgccttgcatgatgatcgtggagccgacgaatacggggatgatgagctcctgtgcgatggccttgtcgagcaggctctcgagttcctcttgggtcagctgctcctccccgtcgaggtacttcatcatgagctcgtcgtcggcctctgccacgaggtcgcacagcttctcgcgcgcgagctcggcagcctgctcgtactcggcgggaatctcctcgacgcgctccttgcccgactcgtcgttgtatcgggccttcatgcggatgatgtcgacgacgcccttgaaatccggcccggtgccgatggggatgttgacggcccccaggcgcgagccaaagcgcgcgtgcaacgttgccatggccgtgtcgaagttggcaccctcgcggtcgatgtggttgatgaacaccgcacgcgaaaggcgcatggtctcggcctcgtgccacaggcgcgtcgtcatgacctgcggcccatcgacggcgtcgatgacgaacagcgccatctccgcggcggtcatggacaaaagcgtgtcgccgatgaaatccggatgacctgccgtgtcgagaaggttgatcttgtagtctttgaaggggatcggtgcgagagaggttccaagggtgaacttgcgcttgatttcctcgggatcgtagtcgaggtacgacttcccgtcgtgagtcgtgcccatcttgggagttttgccggaaacgaagagcatggcctcggcaagtgaagttttgccggagccgtcttgtcccacaaggaccacgttcctcacatgctcagtagcaggtgctgccattgaaaccaccaacccctcaggttatcgatcggatcgttatgacatgcaaaaacttgcaacctacaatttagcgtacttcagctgcctgaatgccgagattggcccaagtcggggcgcgaatactgtttctttcgaagaatcggtggcataatgctggtttcgtttttcgatagcctcaaaacgacgggatgaccacacatgcgcactgccacgtctatggaactgctcgcgccggcaggcggctgggagcagctcaaatacgccatccactttggtgcagatgcggtctatctcgcatcagaccgcttcggcatgcgccagcgcgcgtccaacttcgcgctcgacgagctcgcacgcgccgtcgcatatgcccatgcccacggcgttaccgtgcacgtgacctgcaacatcgtcatgcacgacgccgatctcgacgagcttgcacgctatctctttgccatgcgcgacgccggcgtggacgcgctgatcgtgggcgatctgggggcgtttgccctggcacgacggctcgtgcccgagctcgagctgcacgtgagcacgcaggcgagcgtctccaactcggaggcggccaaggtctggcacagcctgggcgcgaagcgcatcgtgtgcgcgcgcgagctctccgtcgccgatatctcgcggatgcgcgccgagctgcccgaagacctcgaactcgaggccttcgtgcacggctcaatgtgcatggcgtattcggggcgttgcctgatcagcgactacctgacgggccgaagcgcgctcacggggaactgcacgcagtcgtgccgttggaactacacgctcgaggaggagaagcgccccggagagcactaccccatcgaggaagatgcgcacggcacctacctcatgaacgcgcaggacctgaacatgctctcgcatctggacgagctcaaggaggccggcgtcgactccgtgaagatcgaggggcgcaacaagaaggcgttctacgtcgccaccgtggtgaacgcctaccgccaggtactcgacggggcagatccgaaccttttccaggcagagctcgagacggtgtcgcatcgcccctattcgacagggttctactttgggcctgcgcatcaggcctaccagaccgacgcgcgcgagcagagccgcgaatgggcagcagaggtgctcgacgtcgagaaatgcgcaggcgggtaccgagcagaggtgctgtgccgaaacgccttcacgagagattccgaactcgaggtgctgtccccacgccgagatgtgcgcgccgtcgagctcaccgcaatcgagcacttgcccttcgcgaaggacggggcagtgctcgaaggctacgaggtcgagcgcgcgaaccgcgccatggagcactacgcgctcaccacgcccgtcgagctggcgccccacgatatcctgaggatgcgcaagctgccggcagcccgcgcctagcggcgacgcagctcccagaacgccacggcgctcgcggcggcaacgttgagcgagtcgacgccgtgctccatgggaatcttcaccgtgacatcgctcgcgccgatcgtcgaggacgcgaggccgtcgccttcggtcccgagcacgatggcgagacgctcgcacgcggcgagttttccctcgcccagcgcgacggaatcgtccgagagcgcgaaggcggcaatcgtgaaaccgtagcggtgcagcagcgccgcgccttcttctgcccagtcccggctcgtaccgatgcgcgtccagggcacctggaagactgttcccatcgacacgcgcgccgccctccggtagaacgggtcgtggcagctgggcgtcacgagcaccgcatcgacaccgagcgctgccgccgaacgaaagatcgccccgatgttggtgtagttggtgatgtcctcgaggacggcgaccctgttcgagcgcgcgaggaggctctcgacgctcggcatctcggggcgcgcaaacgcggcgagggggccgcgcgtcacctcatagcccgtcagctcgtgcatctgcgcgtgcgttacccgaaacaccggcatctcggggtttgcctgttcgagccgggcgatgagctcgtgcgactgcgcgaaccagcgatcctcgacgaacagcgaatgggcggccacgcccgcatctaacgcccgctcgatgaccttgacggactcggcaatcagaaggccatgcggagcaagagacgagtctctgagctccttgtccgtcatccccgagtagacctcgagtccggattcttgcaaggtcttgacttcgacaagcggcatattcgcaccccatgcaaacgaaaaagggcgcgacatgcacgccctcccacgagagaaatacagtatgtacaagcttagctcatcgagccgcctcgtcctgcgcggattcccgcagggctgccagttcggcgagctttcccataaagtctgcaagctcgcgcgcatgctcgccatcgatcgagtaatagcaccagcgcccctttttcgtgctcgtgaccaggccgcagccgacgagcgccttcatgtggtgcgacagcgtcggctgggtgatatccagctctttcagaaggtcacgtgcgcagatcgcgttctccctcgcgatcatctgaacgatgcgcagcctgttgccgtcggcaagcgccttgagggactgctcgatgtccaaaccccaactcctcttgtagaggcccaagcccaatcagcttacgaccagtattgattcaaaacgttatactttttagacgcattcatttgaaaaatcaatagaggaattccctattcttcgggcagcgtgcagccacggggctgtaaaggccatcatcaggagagcaagctcaccagctcgtctctggtaagcgaggacagactcagcccctcggagttgatgagcttgtcggccaggtcgcttttcgtctcctgaagtgcgaggatgcgctcctcgatgctgtctttcgcaatcaccttgtacaccatgacgtctttggtctgcccgatgcggtgcgcacggtcggtcgcctggtcttcggcagcggaattccaccaggggtcggcgtggatgaccaccgaggcacccgtcaggttcaggcccgtacctcctgccttgagcgagacgaggaacaccggcgtgtcgtcctcgttgaactcgttgacgagctcgaggcgctggcgcttgggcgtggcgccggtgatggtgtaatgggcgacgccctgctcggacaggtgcgtggatatgatgtccagatacgacgtgaactgcgagaagagcaggagcttcttgccggagtcgatggccgtctcgacgaggtcgaggatcgtggagagctttgccgaggagtcgtcgtagtcgtcgaacacgaggtgcgggtcgcagcagatctcgcgcagacgcgtgagctctgccaggacggcaatgcgctcgcgcgcgaactcggccgtgctctttccgacgatggactcgcgcaggcgctgctcgtgcgcccggtagagcttgagctgctcgccttccatgtgcgcgtagacgacgttctcgcttttctcgggcaggtcaacgagcacgtcgcttttcagacgcctcatgacgaagtgcccgacgagctcctgcaggcggcgcatcgcctcttcctgcccgtcgacgatcggct

SEQ ID NO: 367 - DNA, 30045 bp, Unknown
  16S sequences of unknown bacteria
agagaaggcggaagaacagtaggttcaggcgttgtaactgagattatcgaataatatcatatctatatatcaaaaagaccctttggggtctttttgtgttataatgtagaaaatgctgattaggagattaatcatagggaggaaaaactatgtacatataccttataaacacacacggcaaagaatacgaaatatataaccagaaaaaagacagaattaattatgtcagatcgggagttctcaaaaagactttgtacaatgacaaaaaagagaaggttgccgagattaaaacgcctgtttttgaaaagctgagccctgtatataagattaaaacagatacaggtgtctgcaaggtcaggagaacacgcagaaacagatataaaatatcaccgtacaactggaagctcagaattaaaaaaggcaaggggataatacacagcgggcgcagcgtgcttgccgaaatatataaagagcagaatgatgagtatgatgtatatataatggatatcaaaaaaggcgcagatactgtgcttatggcagggatactgactgtcattgcggaggatgaaataaataatgatttagtgagcaatatattagatggcacaggtaatgttttagattttctggatatatttatataagcagctcgagtgaaacgtaaattttaaaatgaaacgaaaaatgagacgcaaatgagacgtaaaaaaatacgttgcatttgcgtctcgcttatgatacgattatttaaaatatgttgtataagaggtgttgtgatgaaagagaacagatatttagagttcaaatccgaaataacaaatacatttttaaaaactgtaagcgcctttgcaaactttggggatggcaggatattgtttggtgtaggagataatggcgacagtatagggtttgcagatcctcaaaaggtgtgtcttgatatagagaacaagattaatgacagtatatcacccaaaccggattttaacttgagtgtaaatgatgataataccgtatgtcttgaggtaagcaagggcagatacactccatatttatataaagggaaagcctataggagaagcgacacggctactatagaaaccgatcagggagaactcagaaagcttgcgattgaaggcgccaatctttcttttgaagaattatcatatggaaacaatcttcttacatttgaagcgctggaaacaaaaatgaagaaaactatgggaattaaagcgctgtccgaagatgttttgcgtacattaggcttttttacagaagacggggaatacaataatgctgctgccatattttctgatgtaaataatttttacggtacagacattgcccgtttcggtaattcaatcagtgagataatggagagagaaacagtcagcagagtttctgtattggagcagtatgataaggctgtctcatactttaagagatattatcagtatgaagaaatatcaggaatagaaagaaaaactgtagaacttattccggaagctgcttatcgtgaagccgttgccaatgcattaatacatcgtgaatgggacattaattcgcatatacgaattgctatgtttaaggatagaattgaaataaattcgccgggaggacttcccaagggaattaccagaggagaatacctgagcggcggtatatcatatcttagaaaccccatactgggaaatgtgttttttagaatgcactatatagaaatgtttggaacaggaataagccgtattctggaactgtatcgggatgccgctgttaagccgcagtttaatattacagagaatgttataagtgtaattctgcctgtattaaaaaccacctatgatgttacagaagatgaagcaaaaattatcagtgtgcttaaaggagcttatcagctgtcaagcagtgaaatttccaaatcctcaggcttcagcagagctaaaaccatcagacttctgaatatgctgacggaaaagaattttgtaaaatgcacaggcaaaggaagaggtactaagtatcagttgtagactataaggtatgaagtggccgattgaaagagagatattgctatgattgagaatatgataaatgtatcaatatgcggcagggacaagccgatacactggcacaacgacaatatgaacctttattttgttcttcggggaacaatgacgggcattgttaacaacagccccgcaaaccttgaatccggcgacttgtgggtaataaacagagaagtgccgttttatatagaaaactgttcggatgattgcatctatgtacagctgggaatgaatatgcaggcctttaataaatatataccgaatatatggactgtttactttaaatgcggatccgaagaaaatgatttaagcgaagaaaagcttaaagacgagatacgcgcccagatatataagatagtcactcttatggacaaaagcaggtggtcaattcagaacgaaaatgaaattctgtatgcctgcatagacatactcaatagtctaaaatttgggtttgccatgatatcaaacaagactgcaaatgaacagtggcaggtatagggataatagataagacagtgacagagaaggtaagcggaaaagcagagataaagaacagcaggacatatgtgataaccaatctggagggtatagatgcggaaacgctgctgaagataaaaagaagtcactggaatatagaggcgcagcactgggtactggatgtgcaacttaaagaggacggaaaaacagcaaggaaagggaatgcggtgccgactgcagcaacccttagaagattctgtcttgcagtaagaaaacatgacagtgaatatgcagagaagcctgtcaagagattttttatggcaaacaatcatgacattgcaagaatcggaaaattactgtttgagaaagaatactgtgatatgtaagaatgatgtatatcataggggaaacaggtacagttatatggcgtgactttgcgattgccgtagtactaacgacggaagacggggtttatgttgtgtttgaattttaagtatgatacaataactgtactacagaatatgaaatgtctcgaagcagtaaatgacagagcatcgttttttgaaataattgcaggttaggagggtattcgatggactattattttctgattattacaattatagatatttttgttctgggaataatgtgcgtcttcgtaagacacaacgaagcactcatgctgcggcaaagacgctgtttcatcggttcatttatactgattatagctatttcggttctggaactgatatctgatattgtgaataatgctccgatatctttcagatggatcaatattgttacaaactatctaggcttcggattgacaccggcagttccgatatgtctttccttcactctggcaaaaaacaggataaacaaaaacatcattattacacagcttgtatatatgatgcttctgggaatatccgttccgtttgatctggttttttgcgtcagtcaggacaatcagtatatgagaggtgaatatttctggatatatatatccgtttatttcataagtgtaatatacctgctagtcttaactgttaagactgtaagcaaataccagcacaaaagcaaaaacagcatttatctgattgtcgtatttttgctgttctgtacgatgatacaggtgatattccctgcaatacatgtatcatggctttgtgtgacacttttggcaatcctgtatgttgcatactgcaatattatatggcagcagctggatggtcttaccggactgctgaatcaggccagttttctgaacaaaaccaagtcgccggatcacgatatgagtctgattgtatttgatattgatgattttaaacaggtaaatgataattacggtcacttaatgggagatgagtgcctcaaagaaatagccgccggcattaaaaaggcgtattcagatgacggtctttgctacaggtgtggcggagatgaactctgtgtgctgcttaatgcaggcgcagatatagaagcctgtaacaagacctttataaatgaactggaaacccgaagaaaacagcttgacatactgccttatgtttcttttggctctgcggagttcagtgtgggtgatgatatagacaaagttaaagaacttgccgacagaaatatgtatcggatgaaaaaacagcacaaaaatgcgaaagcttaacaaatcggagagggtaaacggttgatgttttccctctccgaaacgtttccgatatattcaggcaagtctgtttgtatccctattctttaaatagctgtcaagatttccggcagcgatatctataactttctgtcttgtttcctttggagtccatgctacatgaggtgttacgaagcatcttgggtggcttatgagcggattgttttcgggcggctctttttcgagaacatcaagccctgcggcatagagtttacccgaatcaagtgcttttagcagcgcagtctcatctatcagagcgcctcttgcagtgttgattatcactgcaccgtctttcatttgcgagataaattcatcattaatcatatggtaattggctgctgttgcagggcagtgcagagaaactatatccgattttacggcagcctttctgtcacggctgtagatattgattttcatacccagagcctccgctattttagcaactcttttacctatgttgccatatcctattattcctaggctcttgccgtcaagcagtgaaacaggagcccattcatagctgaaaccgacctttgaaaaccagtgaccctgctttgaaagctcgctgtttgtcgcaacgtgatttgaaatttcaagtatcagagctattgcgtgctgcgctaccgcttctgtcgaatacgcgggggtgtagtagacgcttaccccaagccttttagccgcttctatatctatattgtcatagcctgtcgcaagctcacctacaaatttaagattagggcaagctttcataacttcttccgttatatgatttttgctgacaaatattccgtctgcatcgcctatggtttctatttctgtgccggctggtgtggtgctgtgaaccgtaaccttgccatactgtttgagtacgtcccacgataaatctccggggtttatgctgtatccgtcaagtattactattttcatattatcctgttggtgtcctttccgtttatatagtctgatatattcttcgccgcaatatctataaccttctgtcttgtttcaggcggtatccacgccgcatgaggcgtgatgcagcagttctcaaggtgcagaagcggattgtctctgacgggtggctcctgctccagcacatcaagtgccgcatatgatattttacctgatttaagtgcattggcaagggcagcttcatctatgagggagcctcttgcggtatttactattactgcgccgtctttcatctgtgagataaactccttattaatcatatggtaattatccgctgtggcaggacagtggagagtgattacatcagatgaaacagcagattctctgtcgcggctgtatatatttattttcattccgagggcagaagctatttcgcccacttttctgcctatattgccgtagcctattattccaaggcttctgcctgcaagaagcatagagggagcgtcatcataggaaaatacaccgtctgcaacccagagtccctgctttgccagcgtgtttttcgctctgatgcggcaggctgcttcaagcagcagcgctatggtgtgctgtgcgactgcttctgtggaatagccgggcgtattgtagactgcaatacccagctgtgaggctgtttcaagatctatattgtcatatcctgttgcaagcttgcctataaatttgagattagggcaggctctcattaaatcgccggaaagcgatgtattatccgtaaatacggcatcggcatttttaatacagccgtatatgttatcaggtgtgtgctcatatattgtaacatctccgtactgcttcataatatcccatgataaatcgccgggatttgcattggaagcgtctaaaataactattttcatatcattctccaaatcagtttatatatacattctaacttatataatttgccaagtccagtccgtttgtggtataattaatgtaccattgacaagatataaattaaacatttaaatacaggaggatgttatgaagtttgcatttattttaaattttgaaggattacaccctgacaagtataatgttttatgcgataaagggaacaactataatatggtttacggtgtaaacgatatggaagagacagaagcgctcgtaaagaagcttgctgctgacggctatgagcttatcaatctttgcagcgcatacgatgccgatatgactgcaaaggttgcagaggcaggtatcagaacatgcgcggcagactatatggagtcagaagctgcaaagcttgacaaggtagaggacttctcggaatacggagttatcatagtagacgcaggtcttgctgaaacagcagcgtatgaacttaaggaccctgcagcaaatactcacatcagatttatcagggacgttgagggtgcatgcgaagcagctaagggtcttgttgcagacggcgttacatttatcgagctgtgcagctggtttgacgcagaaaaaacaaatgcagtaatcaaggcgatagactgtcaggttcctgtaggttcctgcggactgtaatacaaagccaggagcatatgcaggcatagcttatatgcaagctatgcctgtattttgtagtaaggaaataccattgggtaagggtgaattaatatgatgacggtagttgcggcaacgcagaacagacacaaaatagaagagatagaggcaatcacaaaggagtttgacatcaatataatttcgagacaggaagccggtgtgccggatattgagattgtagaggacgggacaacctttgaagaaaactcctacaaaaaggcctttgagataatgaagctgacaggcatgccgtcagttgccgatgattcgggacttgcggttgatgcccttgacggagcgccgggcgtttattctgccagattttccggccttgacggagatgataaggcaaataacaggaaactgctggagcttttaaaggatgtgactatggagaaacgcaccgcaaggtttgtttcggttataacccttattttccctgacggcaaaactatagtgtgcagaggagaatgtgagggccatattatgtttgaggagtcaggcagtaacggctttggctatgacccgcttttcagaccggagggctatgaggtttcattcgggcaacttccggcagaagaaaaaaacagaataagccacagagcaaaggcgcttattctactgagggagaaactaaaggaattaaatggttaagagcagattcggacaaatgatcctgctgggaatacagcgatttcaggatccatattatcagggctttgcagcgcagatggcattcttctatctgctttccatcgtgccgcttatcatagtattttcgcagcttctcgatgtgttttctatctcaacggagctgatagaggagcttttaaagcagtatgcaggcggagttataggcgacagtgtaagcggatggcttgagggctcgggcagtgttacaaccaacatcgtccttatagcgaccgtattgtggtcatcttcaagagcccagtttgcaatgacaagaattacaaactatacgcttactgcgggacgttccacaggcaagggatattttcaggagaggttcagatctatagttactattctgattacaattttttcccttgcatttgcgcttatcgttatagtattcggtgaaaaaatactgtatgtggttctaagcggacttgaggttatgctcaatgtgaagtatgaggttgataatgtgtggatgggactcagatgggtatttgcatttgtactgtacttccttatggttaccctcaactattatataattcctacagagagaggcaggataagagaggtgcttccgggaagcatattcgcctcggcaggcatgctgattgtaacgctgatatattccaaatatactaattacgctttatcggcaggtaactacaatattctttacggctcccttgcatctatcgtggcgctgctgttctggttctatttcatagcttgggtacagtgcctgggagttttgttcaacaaggtctggaaagacactaaacggtaaaaatacagcaaaaattcaattaactattgaaaaaaatttctgtagcggtagaatatatgtaatggacttttaacccgaatttttggaggaagcagcagtgactttagaatctatactaatgatgctcggcggcatcggactattcctttacggaatgaaattaatgggcaattctcttgagagatgtgcaggcgccagaatggagcagatacttgagcgccttacaaacaacaaggcaaagggtgttgctctgggagccggcgttactgctgttattcagagttcatcagctacaattattatggtaataggctttcttaatgcaggcattatgaacctcattcaggcggttcctgtaattatgggagccaatataggtacaacagtgacagcacagatactaagactcggagatataagctcggataatgtattgcttacaatgctcaagccggcttcatttgctccgatatgtatagttatcggtgcttttgtattgcttctggccaaaaaacagaagataaaggatagagcgggcatcgttatagggctgggtattttattctgcggtatgagtatgatggaatcagcctttgcgccacttacagagtcggaggaattcagaaatatattcacagtattcgaaaaccctgtactgggcgtgctgacaggtgctgcggttacaatactgcttcagagctcatcggcatcggtaggcgtgcttcaggctacggcttcaacgggagttatcacctttgcaatggcagcgcctatggtaatcggagcgaatataggcaaatgcgccacagtgcttcttgccagcataggcaccaacaaaaacgccaagagagcagtatgcacggatattacaatgtgctgctgcggagcgatactgttcctcggaggtatatatctttatcagtggattatagggtttgaaatatgggataacactatgagcagaggaaacatagcggacttccatacactgtttaaccttgcgacctgtctggtaatgctgccgctctgcaatgtcctcatagccttttccaaaaaaatcgtcaaggacaagggcagcagcaaaatggacgaggagctggcgcttctcgacgagagatttttaaatacacctaacgttgcgctgcagcagtgcaaaaaagttataacttcaatgggcgaaaccgcaagagaaaatttctcccttgcctatgagcttcttgaaaaatttgacgacaacaagcttgaacagctcaaggagaatgagaaattcctggacaagaccgaaacggtgctgggtgaatatatactcaaaataacggaaaaaagtctttcggaggagagcaacaagcttgcaaatgaaatgatgagaacagtaaccgactgggagagaatcggcgaccactgcgtcaatcttgcggagcttgccgaaatcaaaacagactccaagctcaaattctccattgagggcttcagtgagcttaaacatatcaatgcggcaatagacaatatacttgagctgactattgagtcctacggcagtgatgatgaggatatggcatttaaggttgctccgatggaggatgtcatagacgatctggtggaccttctcaaggacaatcatatcgagagactgagaaagggcgagtgtaccgtggagagaggcgtttcgtttgtcgagatgcttaccaacattgagagaatatcagaccactgtgacaacatatcactgcatatgagacagagaatgtcaggagcggaacttgacacccatgttaaactcaaaaaggaatatgagttcaaaagactttatcaccagtacagtaaactttactatgagccggtgctgaagcataatataaatgagtacaagcataaggaaccgattaatactgagcaaaggaaataaaaatgagcgatcttaccaaaagagccttagccgaagcgctaaaaaacagactgtctaagaccactttaaaaaacataacgattaaagaccttacagatgactgcggtcttaaccgtcagactttctactaccatttcagcgatatatatgagcttatggaatggatatttgtagatgaagccaacagaattttaaatcttgattatatagattatgatatcaagacaatactcgaaaagacatttaattatgttcaggataacgaaaaacttatactgaatgcgtacaaatccacagacaaatcactgctggataatttcctcaagagctggataagacctatcgtgactcagattataaccaggaaggcagagggcaggaacatttcagatgaggacagagactttgttatagacgtatgcgtgacggttgtgcgggggattactttccagtggctcgaaaacggtatggaggataacctgtcgggcaaggctgacaagcttatgacactgcttgacggcaacattgaaatggtgcttgacagatttgcaaaataggctgcaataggacagagctaatcagacgtatagagacagaactctttaggggttctgttttttgtgcgctgttttcaaaaaactgttggcgaaacaaagaatttatgctattatggaagtacactcacagtaaagcggtgcacagcagttccgcttatactccaaaacagcttataaaccatatctcctattggtttaaaagtatatattttctacagattaaggctgatgtcaaaatttatgacatcggtctttttctatatatacactacaagccccgacagaaatataatttagatgttagaggaggcttgaaatggcagatacgacaaagaatgagctgagcagagcgctgaagcaccagctgctgacaaaaacgcttgacaatatcacggtcagagatattacagatgaatgtcatcttaacagacagactttctattatcattttcacgatatatatgagctgctagagtggactatcgaaaaagaggcggcaaggcttgtttcgggcagcagatgcagggatatcagggctgtgctgataagactgtttgattttgccgttacaaatgaaaatttcataatccacgcatataaatcggcggacagatattttgtgaagaagttccttgaggacggactgcgccctgtaattgcggagattgttgacgagaaggcggcaggcagggaaatatcagagagtgacaggaaatttataagcgatgtgtttgtgttcatactgctcagcgttactatggaatggcttgacaacgatatgaacgataaccttgtcagaaaacttgacaagatagttatacttctggacggaaacatagatgaggcaatcgacagattttcgaagaaaaactgaataacagatacagcaaaccggcgctaagattatctgctgccggttttttagcgcgaatgtgtcataaatgataagtctaatcccccagctatgctggggagaatggaataagcaggagcgtgtgggatatcaataaaactcctcctatgctaaaatgagaatggtgtcgcaagccaaactcaaaaataagcataggaggaggtcccaaatggacaataaaagtttatcacatgtaagatggaaatgccaataccatatagttttcattccgaaatatagaaagaaggttttgtacggaaagttaaaagaagatgtacgggatataattgcaacattatgcagatataaatatgaagcaaactaaaagatttttgcagtgacctgaacaagtctgtaaactgttcttttttcgtacaatattataaacagtaaccttgtcagcctgtttgtcacttttaacatgcaaaacataaatattgtatgcgcttagttgttgcgcgtgctggtattgtgtgctacaataatttcatacaatgtttgatttgtgtatgaagaaagttggtgagcatgtggataaaaatgaaattttgcaaataataattgaaaataatggcggtattgcaaaaacttcggattttgctgctaagggaataaacaaatatgaagtggcagctttctgtaaaaaaggagacatcgaaaggatacgcagaggactttatcagttgccgaacagtaatgctttttcggaggagactttgatacgtgagatacttccgcagggaattgtttgtgtggagtctgctttgttttattacggatacagcgattttgcccctcgcaaatggtcgattgcggtgccaaggacagcaggccgcactgtaaataatattgaagagtttccgatgaaagcttactatatccaaagagaattttttgatataggcaaatctgagggcgagtttaacggtgtaacgctgcctgtgtatgatcgtgagagaacaatatgcgattgctttaagtatcgcacaaaacttgacagtgaaatttttaataaggctgtcatggcttatgtctctgatgaaaaaaagaacctggcatgtttagctatgtatgcaaaggaaatgaaactttacaaaaaggttatgaatataatggaggtattgtttaatggctgatatggcagcatctgtacttgcaaggcttagaaataaggcaaaagaaagcggaagaagctatcagctttgcctgcagcttttttgccaggaggagtttttgcgtcgtctggcaaagtctgaatatgctgagaagcttgtactgaaaggcggtttgttcctctattctattactgactttgacagcagagtaaccactgatgtggacttttgcttcggcaggccccgaatacaccggagcaattaaagaatatacttgaagaaatcatatctgtacagccgggtaatgacttcgtgatgttcgaaataagagctgttgcgcctattactgctgcgaagaaatataccggcataagcgcatcaatagttgcccgcattaaaaatacccgtacaccgtttagtattgacttcagtgttggcgatattattgtaccgaagtctgaaaaaagagaaattcccacgcagtttgatgattttgttgcaccgatggttaatacttattctatcgaaacgactgttgctgaaaaaactgatgcaatattgagcctgatggaattctccagccgcatgaaagattattacgatatctattatcttgccaataagtttgattttgaaggtgaagtattggctgaagcactcaaaaaaacttttgctaatcgtgagcgctgtttcacaaacgagcaatttgaaagagttatgggatttgctgatgatatggatatgcaaaagaaatggaaagcttttatacgcaaagctgatgccaaaacagatgattacagtgaagtgcttaaaacgatagaaacttttctgataaaaccgcttaccgcagcgatggaggacaaaagctttaaagcgcaatgggctgcaagtaaaaatcaatggaatgatgaaatgtgaaacagagacccgaacaagtctttaaactgttcttttttcatacaattttcagctaagcttcaaaatagtgcgacactttatacagaataagacgcgtgtcaaaaaatattacacgtatgtttgtttatctattttatctctaatataacaggaatataatttccattgtgaaaaggaggaatggtattatatgaaagtatttgcagagaaagtggtaaaacataaaaaacttatagcaatattaagtttagtgcttcttattccttgtatattcggctatctgaacactcgtataaattacgatatgctcacatacctgcctgatgacatacagacagtacagggacagaaaatacttttagacgactttaacaagggatcatttgctttgctgatattcgaagatatggacgacaaagacgtatcagcggcaagagaaaaaatcgaagatctggaatacgtggactcagcgctgtggtatgacagcattgcagacataacagttccaaaggaaatacttcccgatgatatctacgatgaattcaacaacggtgactgcacactcatggcggtgttcctgagcacaacaatttcatcagacgaagctatggacaccatcaaggatatacgccagatagcaggcaaacagtgttttgtaagcagtatgtcggcatacataacagaccttaaagatctggcagaggcagaagaaccgatatatgtggcgctggcagttctgctggcatgcatagtatttgcggtatttatggattcattcctgctcccggttatattccttgcaagcataggaatagccattgtggtaaacctgggaaccaacatatttatgggtgaaatatcctatgtaaccaaagcaatcagcgcggtactgcagctgggcgttaccatggactactcgatattcctgtggcacagctactgtgagcacaaggataaaaccccggatcacaatgcggcaatggcagaggcaatcagggcaaccatcgcatcggtatcagcaagctcggtaacaactatagcaggcttcatagctctgtgctttatgagcttcacactgggagccgaccttggaatagtaatggcaaagggcgtagtgcttggtgtaatcgcctcggtaacagttcttccgtcattcatactaatatgcgacaaggctatcgacaagacaacccacaagccggttaacctgagaacagacagaatagcaggcttcgtgctcaagcacagaagagccatggctataatgttcataatagttatgatacctgccctttacggatatttaaacacagatcagtattatgacctcgaccagtcaataccgcaggatatggactgcgttgttgcaaacaccaaattaaacgacacattcggcatggactcaactcatatgctgctgtgcgattccgatatggctatcaaagactcaaaggaaatgcttgaccgtatagaagatgtagacggagtcaagctggtacttggcagagatacacttctcggcagactgataccaaaggatataattcctgacgatgtatcatcgctgctttcagagggaggtagacagcttgtaataatcacctctgaatacagagttgcgacagacgaggtaaacgctcagataaacgagataaacaaaatagttgatgattacgacaaggacgcaatgcttataggcgaggcaccttgcaccaaggatatgattaagattacatcgcacgacttcaaggttgtaagcttcatatcaattctggcggtactggttataatcgctattgcgctgggatcggcagtacttccgttcatactggttgcggtaatagaatttgcagtattcatcaatctgggaataccgttttatacaggtaatctgctggcattcatcgcccctatatgcgtaagtacaattcagcttggcgcaacggtagactatgcgatacttatgaccaacagatacaaagtagagagaataggcggctgcggcagagaaagagcagtcgaaatcgcactcaaaacaagtatgccgtcaattatgataagcgccctcggcttctttgcggcaaccataggcgtgggaatttactcggatgttgacatcataggctcaatgtgcggacttatggcaagaggcgcaatcataagtatggcagcagtaatacttatacttccttcattcctgatgatattcgataaggtaatatgcaggaccacaaagggaatgagaggattggttaaaaaaggaggaaatatcaatgcttaaatcaagaggaatgagaattctgtcggcaggagttgcagcagtgctggtaatgggaacagcctgcccggtatttgcggcatcgggaattgaaaaagaagaaaccgtatacgcagttgccgacagtcagcttaacatagatgaagtcatcgtaagcgaatggctcaaaaacaacgatgaacagaaaacaataacagataaatcagaccttacagacatcgaaaacgtcaagggtgatgaaacattcaaacaggacggcagaaccgtcaaatggaatgcagacggaaacgatatatattatcagggcaaatccgacaaggagcttcctgtaaaaatgagcgccagctacatgcttgacggcaaatatgtgacacctgaagaaatcaagggtcagaaaggcagcgttgaaatccatatcacatatcaggcgcagcagagctcaccgtttgcggcagttacaggcatggtgcttgacggcgacaaattcagcaatgttaaaataaacagcggccagattataaacagcggagacgactactacgttgcaggcatagcgcttccgggcatggcggatataacagggagtctcggacttgatatttcagacgaaatcgtaatcaaagcggacaccacagacttcacatacgaaactatggtaaccgtactttcaaacgaaatgctcaaggatcttgacggagatttaggctcactgggtgacctgcaaagctctgttgatgaactggtaagctcctcacagatgcttaccgacggagccaagacactgtcagacggtatcagcacagcagccgaaaaattcgggctggttgacggatatatgacaaagcttcaggatggggtaacagaaatagacaagaatatgaaaacactcaaggcaggacttgccaagctttcaaagggaagtacagacctctatgcgggagtttccgatttacagacaaaccttgaggcaacctacaagggggcaaacgaccttgttgcaggcatgaatatgctttcacctgacgacatcgaaaaagcaaccagcggagtgggacagatttacacaggccttaaaaacgtagacgcaggccttgacaaactctatacgacaatgtcaggaataaactccaaggaaagcgaagtaatcggtcagctcaagcagataagagaagcctacaaagcggcaggcgttgacacagcagcccttgacaaagctatagcaggacttgagcagacaaacgcaggacagggtcaggctatcgaaaacctcagcagcagcggtgaaatcagaacaggcgtagaccagcttgctcagggagccaaaggagcttccggtcagcttgcagagggcgttaagagcctcaaagagggaagcgttaaactccagcaggcacttgaagcagaagcggcaggagccaagacccttgcaggatataccaaggacttaaacgacggtattgcaagcgcgtacaacggggccgacaggcttgcggcaggtacatctactcttaacacaagcacaggcaaaattgcagcaggaactgccaagctgggtgacggagtaactgaactcaaggacggtgcacttgaactttcaacaggtatgaagaaattcaacgatgagggcatcggctcgattgcggctatgtatgacaaaatagcaaacagctctgttgacagcatgaacagcaaaatagatgcggcaaaagcatacagaaactatgcaggcgcagcaaaagatgcggacactactgttaagttcataatcagatcagagggaatagaggaaatagagaagatgtgataaatgacctagttaatcttaaggctaagatgtttgtatatgttggcaagagactctgatagcacagactggattaaaacggtgcagatacggagtcagaagctggagtaaataaatcaaccttaataacgagggcggtcagaaatggccgcctgttataatgtttttttaaggaggcagatatttctaatatgtggttaaaatatacgtttggtttacaaataggctgtaaaacagtacatatatgctgctggatttgcttttgaggctaaattgtggtgtttttttggctgttaaatgaaaaataggcagattcacttgacgactgtggcaaaagtgtggtaaacttagtgcatattaaggcagaagagtgccaaaaggagattaatttatgaaatcaaagttattagcgataactctttcacttgcaataatattcacaatgggaatttacacacctgcattcggtgcagaggatatatcaaacgaagaagcacagactcagatagacgttgacggcgaggttgacacagaccctgccgacgaagatgaaatagacgagggatttgaagacggcgatgaggatgcggacgctcctgtagaggaggaggatgatcctatcgagcttgatgcaccgtcaaaggttaaggcaaaggctcttggcaaaagctcaatcaaaatcacatggtcggctgtagacggagcagagggctacaaggtttactgctacaacaagtcaagccgtacatacaagagaattgcaacagtaaaggatagagattatactcacaagggtcttgctgcagacacaagaaaggtttacaaggtggcagcatacgctcacgatgaaaacggtaaagaagtagtaggtgacagatccaaaaaggcaagcgcaactacagatgataacgatgatgttacaaagcttatgaaaacagcaaagaacaaactgggctgctcatatcgtgcaggagctcagggaccaagcagctttgactgttcaggatttgtatactacactttcaaaaaagcagatgtaggcaaaaagacagttgtaagatcatcagctcagggacagtatgcatcacttaagaaatacagcgttggcaagagtatgtcaaacgctaaggtgggagatatcatattcttctcagcaagcggtacaacatcaggcatcaaccacgttggtatatatgccggcggcggcaaggttgtacacgcaggttcatacagaacaggcgtatgctatggcaaaatcagccagctttcaaattacggacgtaaggtttgcgcaatagtaagaaacgtataaatttaaaatcactagcctgtgtggacttcacgcaggctgtttttaaagtgtgtaggaaatatgcagtacagaaatataacagacggcagaatatcgtcgctgggactcggaggtctcagatttcccgagcaggaggggagaccgggaattatagacagaaaaaaggctcagcctgttgttgatgcggcaatttcctgcggtggtcctgtgtcaagatttagcacaaaataaaatgagaagttctgacaactaagctaccggcagagaacataccctctcatacattttttcaaagtcattaggagacatatagtcgcagtgactgtgaatcctaacggtattataaaaggtttcaatgtactcgaatacaagtctataggcatgtttatagttaatgatattgaatctgttaagccattctcttttgattaaggaatggaaagattcgatgcaggaattatcgtaaggataaccactatgggaatagcttcgctgcgtcctttctgtggcctcacgccacgcatttgaaacatactggctgccacgatctgaatggataataagcggtaaatcagtattacgacaggcttttgccttattgatcgtttcgacaactgtagatacttccatagtgtctgcaagagttcaggcaatgatttttcgggcatataagtccataacgcagtttatgtaagatgatgtatatcatagcgggaaaccagcacagttatatggtgtgactttgcgattgccgtaaagcagggcgatttttagaaaaaagtccttgctttcgatatgcttttgtgataaaatctttttgtttattacgggcggtcctctggtttggatcagattttcaccaagaacgtcttggagggaaggaggaaatatactcatggatgtattacaggcaataactcaggaatacaaaaagaatgatatccctgcatttggtgttggcgacacagttaaagtccacatcaaaatcaaagaaggatcaagagaaagaatccagattttcgaaggttttgttttaaagaaacagaacggcggcattggcgaaacttttacagttagaagaattgcttcaggtgtaggagttgaaaagacattcccgcttcattcaccaaagatcgaaaagatcgaagtagtaagagaaggcgcagtaagaagagctaaacttaactacatgcgtgaaagaacaggtaagtcagctaaaatcaaagctaagaaataattttgaagggaaccttttggttcccttttttacacgaggtaattatgatagaatcaataaactggtatccgggccatatgaaaaaaacccgcgagcttatcagcgaaaacctgaagcttgtggatatggttatagaggttatagatgcgagaatacccgtttcaagccgtaaccctataattgatgagatagtgggcaaaaagccgagaattgtgctgctcaacaaaagtgacctgtcagatgctgcccagaacagagcatggagtgagcattttgaggcgcaggggtattacggtatggcaatgaactgtatgagcggcggcggagtcaaggagcttttcagactgctggagaagctcaaggccgacaaaaacaaggagcaggtcagaaacaagcctttcagacttatgatagtcggagtgcctaatgtgggtaaatcctccctcataaatcgcatgaccggcaaaaaaagcaccaaaaccggcgacagaccgggagttacaaagggcaagcagtggctgaccctttcaaacggcatgcagcttctggatacaccgggaatactgtggcctaaatttgaagaccccaaggcaggacttgaccttgcattctgcggctcaattaaagatgagatactcgataccgcaacgcttgcccttgagcttatcaaggttcttcaggcggaataccccgagcagcttatggcaagatacaagatagacgaaatatgtgaagaggcccttgatactatggaggccatagcggttaaaagaggctggatactgtcaggcaaacgaatagattacgagagatgcggcaggactattttagatgagttcagagcgggccttataggcagaataacattagagaagatttaatatgaaaaaagaagaaagagaaaagcttttaaaacaaaagcttatagatatgtcggtatatgaaaaagagctttacgccaaaggcataagcaccgttgcgggagttgacgaggtcggaagaggaccgcttgcaggtcctgtgcttgcggcatgcgtagtgcttcctgcggactgggatataccggggcttgatgactccaaaaaactgtccgaaaaaaaacgaaacgaaatgtttcagattatttcagacagagcccttgccatcggcacaggtatggcagacaacaatacaatagatgaaatcaatatactgaatgcgaccaaacaggctatgaggcaggctgtagcagaagctgagaagcagctgggagatgctataggtcatgtacttgtcgatgctgtgacaatagagggcataggcaatgagcagacagccattatcaaaggcgatgccaaaagcatatccatagcggcagcttcgataatagccaaggtcacaagagacaatatgatgaaggaatacgccttagagtatccgtattatgcatttgagagcaacaagggatacggcacaaaggcgcattatcagggaattaatgagtacggcatcacgccgatacacagaaagacgtttctcaagggaattttgtaatttctattgaaaaaatataccatagatgataagataaccttgttatatgactgacggaagtggaattaaccacatggaatatgacataagatgagccgaccgtctgggctggagccgggacactttggctcttttttaaagttagtttcgttaaggagaaaaacaatggagataaagactgacattcagatcgcacaggaagcgcagatgacaaatatcagggctatagcggctgctgccggaattgatgagagataccttgaaatgtacggcaactacaaggcgaaggttgattacaatatgctttcagagtatgcagacacacctgacggcaagctggtactggttacagccatatcaccgacacctgcgggcgagggcaagaccactactacagtaggccttacagacgcgcttaaggcaaaggatataaatgtaatggctgcgctgagagagccttcacttggacctgttttcggagttaaaggcggagcggcaggcggcggatacgcgcaggttgttcccatggaggacataaacctccactttacgggagatatgcacgctataggtattgcaaacaacctcatagcagcatgccttgacaatcatattcagcagggtaacgctcttggcatagatgttaagaaaattacatggaaaagagttgttgacatgaacgacagacagctgagaaacgttatcgacggcataggcggcagaatgcagggcgtaccgagagaggacggctttgagataactgttgcatctgaaataatggcgatactctgcctttcaaagaatatagacgaccttaaagagagagttgcaagggttacagtgggctatacatatgatgacagacctgtaactgtaagagatcttaaaatacagggagctgttgcggctgtacttaaggacgccctcaagcctaatctggtgcagactcttgaacatacgcctgtatttattcacggcggaccttttgcaaatatcgctcacggctgcaattcgataatggcgacaaaaatggccctcaagctggcagacgtagtagttacagaagcgggatttgccgctgaccttggagcagagaaattccttgatatcaagtgccgcaaagcaggacttacacctgcggcggtagttattgtcgcaacagtaagagccctcaaataccacggcggagttgcaaagaacgaccttggagcagaaaaccttgaagccctcgaaaagggacttcctaacctgcttcagcacgtggagaatataactaaacagttcggacttcctgcggttgtcgcaatcaacagatttcctacagacacagaggcagagcttgcgctggttgaggaaaaatgcagagagcttggcgttaatgttgcgctgtcagaggtatggggcaagggcagcgagggcggcgaggcgcttgcagaagaggttttaagacttatagagcagcctaatgattttgcatatatatatgaagatgatatgtcaatcgaagaaaaaatatcagcaatagctactaagatatacagagcggacagagttatatatactcctgccgcaaagaagcagcttgcaactattaagggactcggagttgaaaacctgcctgtatgtatggcaaagacccagttcagcttttcggacgacccgtcaaagctgggagcgccgagaggctttgacattacaatcaaggatatcaaggcgtgcacaggcgcaggctttatagttgccaagacaggcgatattatgactatgccaggacttcctaaggtgcctgcggcagaaaaaatagacgtggacagcacaggtaaaatatcaggactgttctagaatatataatatagggatattactcgttaagcataaactcctctgcacttaaatatattagtgccggggagttttattatgcatggaaaaaatgacagaaaactgggctttgcagggcttgtgggagtatctgcgggcagtgcggttgcaagcggcatatttgcatttccgggagattttgcggcggcaggagcaggaaccgcagcggtacttacgggctggcttacagcgggcgcgggaatgctggcggtggttatgtgcttctttggacttggagaaacagctccaaagcttaatggcggtatatatttctatgcaaaagagggatttggtaaatgcgcaggcttttatacagtctggagctactggctttcggctctctttggcaatctttcatttctcagcctgcttgctgtttcagttttatattttctgccgcagggaagcaaggctgccgtccttataggacagagcctgttcatatggtgcgtggcggctgttttacttaaagggacagaatacgccgcaaaggtaaaccttatggttgcagcagcaaagcttattccaatcgcagcctttgcagcagccgttgtatttttcagagcctttgatctcaatatatttatggataatttcttcggacaggatacaggctacagcatgctgcaccagataaaagcaaccacaggcatatccctctgggcgtttgtggggatagagggcgcggcagctgtatcggcaagagccagataccccaaagatgtgggcagagccatagccgtatcctttgtgtgtgtcctccttatataccttttggtttcggtactttccatgggcgttatgacaaggcaggagcttgcatctctcggcaatccacccctcgcatatgtatttgaaaaggcggcgggcaaagcaggagctgtaatcatcaacgccggagtcatactggcgctgggcggagcctatctgggatacaacctgctggcatctgaatgtatggcggcatcagcccggcagggagccttttcgttttttttcgcgagagccagcagaaacggcagtcctgcagccgcagtgcttgtcacctgcggcgcaattcagcttcttacgattgcttttacaatgactggcgcatcataccagaatatatatgagatggcggcaaggctgtgcgcgcctgtataccttatgtctgctgcatactatctgaaactgtgtgttatgagggaaaaacgaagcgcaatgcagtgtataattgcggcggcgggaaccctttacggcctgtatatgatgtacgctctgggctttggggaagtgttcacgctgggaatatttcttgctccaggaaccgttctgcacatatctgcgcaaaaagaaaaaaatcagcgtatactcgaaagtaccgctgataaactgctgattggagcagttatattaatctttgccgtttcggtgtgtcttactgcggcaggtgttactgcgccgctttttcgatggcctctttgagtcctgccacaagctgatccgcacatgaggtctttttcataccgcagtgaataccctcaagtttgcttacaacatcttcaactttcataccctcaaccagtctgcctaaagcctggaggttgccgttgcagccgcctgtgtatctgacattgcgaacagtgttatcctctatttcaaattcaatggctctgggacatacgccctttggaatatatgtgtatttcattaatttctcctttcgcaaaatgtgtatttgtcgtataattagtatacaacagaagcaaggaagattaaacagcaatgtacgaaaatgttaaagaagataaaatactttttgcacatatagaagatttatatgacaaatgcatcaacggatatactatgggaaacagcggatttcttgacttaaggcagcagtcccttgtaaaggagcgatacagatacgacagcgccgttgagttttacggaggatacgaggatgccgagaggagaatatgcgtatttaaaccagaatggatttcgcagagcgcggcggagtattttgcagacaatgaagaggacaaccctattgtgtggataagagcctacagacaggcaggctcaagagcgctcagccacagggattatctcggctcgctggtgggtatgggtctcaaaagagaaaaaataggggacatactcgtaagagaggacggcgcggatattgcagttcttcgggacatttcggagtttctgctgtataattatgaaaaggcaggcaggacaagtcttaagcttgagatagtaagcagtagcgacatcaagctgccgcccctgagatttaaggaaatatccgatacggtggcatcgcttcggcttgacagcgtgctatcatcggcctttggcatttcgagagcaaaggcggcagaggcggtacgaaagggtattacctttgtaaacagcagccagatagtaaagcccgactttaatgtaaatgagggggacagactggttatccgggggcttggcaaggccagacttgcggagataggcggaaacagcaaaaaaggccggacatatattaaaatagagaaatatctgtaacaggagatatgcttatggcaaggcgaaagaaaaaaggaaaaattgcagtaataattatactttcggtattaatacttgcagcagcgggaatttgtatttttgtatttaacactccggcgtatgtggactctgccaaagaaaaaacaggaattacaaatccgcttacgggagagcaggttgaaacacttcccgcaagaccgctgatagtatcgacggacaatgtgggagaggcaaagccgcagcttggaatatcaaaggcggatatagtctatgaagtgcctgtcgaggggtcgcagtcaaggcttgaggctatatattacagtgaaatacctgaaaccgtagggccctgcagaagcgtcagatcatatatagtagaccttgcaagagaatacaatgcaatacttgtgcataacggttacagtccgcaggcaagagaatatcttgagcagggcagtgtggcatatatacctgcccagaaatacagcttcttttacagaaccgatgcaaagcctgcgccgcacgactgccttgtggacacaaaagacgtgctaaaagcggcagcggataacggctgggatacatcagtagatgtgagggctttcagctttatggacgagcaggaggaggctgtattgacaggcacacaggataaataccttgcaaagtgtgaggaagaaatcaaagaaaacctcaaatggtcatggcagaaatatgagcttcctgatttaagcggtatagaatttgcggcaaatgaagaggtttcggagataaaggttgcctattccggttcagacaatgtatataagtatttgagtgatgagggtgtgtatcagaaatttgtaaacggcggcgaatatgccgattttacagacggagagcttatcaaaacctcaaaccttatagtctacagagtatcaagcagcgtatttgaccacaagggcagattggatatagatatgtgcgcaggcggagaagcttgggtgtttacaaaaggcagaatgtttgaatgtacatggagcaagaaaaatctggatagccctgcagtattcaaggacaaagacggcaatgagataaagcttgctgtcggaaatacgtggataaatataattgacggcaattctaaattcagttacaaataggaggtggatttaatgtttactatttatgttacatacaaaggcagtgacagagctgccgtagagggattttacaaagaaatcaaggaaatcggcatcgatattctttcacgcaaagaggacggcaatgtacgctacgaatattactggcctgcagaacatgaaaaccagctgtttcttctggaaatctgggaaacaaaagaagctcagcagatacattcacagcaggctcactttaaaaagctgggagagctcaaagaaaaatacggcgttgaaaccagcattgaaactgcataaacatttatttaataacgttatcggaaatctgaatgacgtaagcaaaatatgctattgaaaccgcagcggattttgagtaaaatatatatgttgtgaaataaaaatgacagacaggaggcagtagggattatgtactgtgtaagaaaaataacagataagataagctatataggagcaagcgacagaagaattgctcggtttgaaaacgtatatcctgttccggagggaacatcatataactcatactttgtagacgacatcagaacagcggtaattgatactgtagacagagccgtttcaaagcagttctttgaaaacatcagatatatgctggcaggcagaccgcttgactatgtgataataaatcatatggagcctgatcacgcagcgtcactggaagaactggttatgagataccctgaggttacggttgtctgcaatgacaagactaaaaaaatgataaaccagttctttgaatttgatatagatgcgagagttcagattgttgcagagggagacactgtatgcacaggtgctcatacctttaaattctttatggctcctatggtgcactggcctgaggtaatggttacctatgaggagtcacaaaaaattctgttttcggcagatgctttcggcaacttcggcgcattaagcggcggcatatttgacgatgaaacagaggttgattacagcgaagccagaagatactacactaatatagtcggaaaatacggaccgcaggtgcaggctgtcctcaaaaaagctgctgcgcttgacattaagatgctggcgcctctccacggcgttatattcagaaccaatttggcagacattatcggtatgtatgacaaatggagcagatatgagcctgaggaaaaagcagtccttataccgtacgcatcggtttatggcaacaccgaaagtgtggcggcattaattgccgcaaagctggcggacaaaggcatcagaactaaaatgtatgatgtttcagcggttcacgcttcatatatactgtcggaagctttcagatacagccatatcgtattcctttcaacaacctacaatgcaggagtatttgtaaatatggaaaatctgcttcatgatattgcaaaccataatctgcagcacagaactgttgcttttgttgaaaacggctcatggggtcctatggcaacaaagggtatgaaagcaatacttgagccttgcaaaaacataacatatatcgagaagaacgtaactgtcaaatccgccctcaaggaagaacagattgcggatatagatgcgctggttgaagctgttgcggcctcaatggcaggagaagaagcccctgcagaggaagcggcgcctgaaaagacatatgtgtgcaagatatgcggatatgtttataagggtgagatgcctgctgactatgagtgcccgctttgcggagtcggtcctgatatgtttgaagaacagtaataactatagagataaagcccccggcaatgagaaccgggggcttataaagtttttgaggttctgttgtatactcccgagtttgacagctaaaacttaactgatttttgcatatcttttttggcgtcgcttttgcatcattctgtttttttgagataatcctatggcttttttcatattcacctttgtaataatctgataatcagtatattacccctgtttttctttctccgagtttaagtgtgttacggtaaaactctgactgtatatcatcaaagttttcacagagaacatccggagcgcggtacatctgaagaacatcagaatccggctgctgaaggagagttttggaacgtggttcaagaattctgccgtaacagagcttctgaaatatatctgtaaggttaaaggaaaaatctgcattcttctgaattgaggcgcatattttgtccggtccgggatcgtaaaaaatccactggaggaaaaggtatatcggtaattctttgtaataagagaggaaggggagaaatcgatggagatattccgggtttccggtttttcctgctctgtcaggaaagcggcgcgttcttttgcccattccataaagtcacgacctttttttcacgggttttctgttcgctgccaggttttttaacagtaccggtattttcgatacctttggtatcgtagtagattttgatgatgtaaaagcgtgtgccgggttctgatttgtttgttcttactctcataacaggcctccaaagcaaaatcttaaaaatctgacaaaagaattaagcgttttcaacgcttacagctgtttttctgcttctgaggtttcaaatgtaaatgttactatggaaatgcattaaagttccgatatcaaaatgtaggaattt

SEQ ID NO: 368 - DNA, 6157 bp, Unknown
  16S sequences of unknown bacteria
aagtacactttttcaaattctactatttttcatttggtgaacataacgcagtaagaaagggctgaacggacggttttcgtaccagaagccaaaagcgcccccggccgatctgtgatcggccgggggcgctctctatatcaattacttttgcacaatatcctctcaactactgaaagatttaacacgccgcatgccttcgtaagctccttcccagaacggactgacagcacgataacccaactcctcataataggctcccagccgcgcgtcgttcacatcggaatcgcagcggatccccagtttgccgcgccggcggcccagtgcttcggcacagcgaagcatatgcgccccgacgccggggtatcccggaagcgttgccagatgatgagcataaaaataccgtgggtcgtcatcccagcgtccgtcgcgctcaaatagagccagtactgccacgatggcagtgccctctttgagcagataaaaatcgccccgtgccgcgccagcctcaaaataactgcggggataacagtcaaaatacccatcccactgtttcagcccccgctgctccagccacttcatccgtatagccagaatccggagaatatcgtccacatcctccatgcctgccgtacaaaacttcagctcttccacgctcatgctctcatgtccctcattttccgcatttatacagacggcgtgctgtcctcttcaaaaacaaaaccgtatttttcttctccgcgaagcacacgcacaacgtctacgcctgcacgtagtttcatcccgatccacgctgcactctgcagccgcagctgccccacagcccgcacgccattttcaaactccaccagtccaaaatccagatacggccggttgatcccttccggcagacaatgtacccgcgtatgggtcagcagcgtcaccgttccctccaacggttccggttcaaaatcccgtccgccacagcaatcacagatcaaccgggccgggtaagtgcgcctgccgcattgtctgcagcgatatgcatacagtttcatggcttcctccttcaccgatccgtcaaaacagtggcgactacattattgccgaatccgccgaaattcaccgcaagccccacgtgagcttccggcacctgccgctctccgccttccccccttagctggcgcaccagctccacaagctgggatacaccggtggctcccaggggatgcccttttgctttcaagccgcctgaggtattaatggggattttaccacccagtgcggtatcaccccggcgcaccgccagatggccttcaccccggcggaaaaagcccacttcttcgctctctacaatttccaggatctgaaacgcgtcatgcagttcggccacatccacttccgccggcgtaattccggccatatcataagcccgccgggccgccaggcgcaccgcctgcagatctgtcggcacagcacggttggccaccacatgagtatccgttgcctggccgatgccagcaatgcgcactggaacgcgtgccgcgccgttcctgcagtccatggcacacagcagcacggccgccgcaccgtcggacatggggcaaatatcataccgccgcagcggatcggccaccagtgggttcatcttatcccgcagctcgccctgcgtcagctcttccagtgtaacgcgcttatgcagctgagcatagggattgtgcatggcattggcgtgatttttcactgccacccgggccagatcctccatagtcacgccatagcgctccatgatcaggcgcgtaaacatggcggcgaaggaggtcagcgtcaggccacagttgtattctgcttccggatggagcatagtggccacaaaatccgtggccgccgcaccgccccggccgttcatcttctcgccgcccactaccagcacccggtcgcacattccgctggcaatggccatataccccagcttgactgcgctggcgccgctggcaggcccgttttccacacattcagccatggccggacatagatgcagcgaatctgccagcgcgctggcactgccgctgatatggttgaccatgccgccgcccatagaggctacgaacacctgatcgatcccggcttccgggcctggggtgatctgtgcatcctcaaagcagagcagggccgcctcgcccagcagctccaaaaatcctttctcagttttaccaaatttcgtatgaccaattccaataatcccgacctgccgcataccgctcctcctttaccgcgctttcagcgcggctgcggtttcccgcagcgaatccatatcctctacgtgcagcagcaccgcctggggcgcaatctcccacacaaacttcgaatacatggttttcggtcccagttccacaaatgtgtccacaccgtcgtgcagcatattgcggatgatgcgctcgcactgcaccgccacacacagctgcagcaccattttctcctgaatccgccgcacatcgtgctctttttcaccgtcggtattcatataaaaatccacattaggtgcagaaagcttcaccgaagaaaatacatcgtccagcgctttctgtgccggctccatcatggcacagtgagaagggatgctcaccggaataaccgtgttcttcatcccctcctgtttcaggcgctcctgaaataccttcatcgcctccatttcaccggcaaaaatcaaccgggatggcgcgttgcagttggaaagggccacatagccctccacctctttgctgatcgcaacggcacggcccgcatcgggcgccattaccgccaccatggcgcccttccccacaggcaccgcctcctgcatcgccttggaacggactttgatgatccgcagggcatcttcaaaagaaagtacgctggcagccgccagcgcgccgtattcccccagtgaaaaacccgccatggcgttcggccggatgccgtattccgacaaagccgcataagcggcgtattcggttgtcagaatacacggctgtgtattttccgtgcggttcagcgcttcttccggcccctgaaaacagatgtcccgcacgctgcgctgcaaaatccggtcggcacaatcaaaaatctctctgcagaccgctgcgccttcgtacaggctgcgccccatccccacatactgcgaggactgcccggtaaataaaaatgccagctttcccattggactctctccctttcgtcccaattatttttatcattatatcatgctccctgtcgttcgtctattgttcacaccatctgattttcccgccgtattttcggccgtttcgcctttttttgaaccgcagaaagttttttacagataccgcaacttctgtcttgtcatatgtctatccatgtgctatactataccggaattttacctctgtcgtacaaacccgaccgacaggaagacccaaaagacagatatgaagggagaatctcattatggagatccgggaaacgatccagcggctgaaaaaggaacaggatgctgtgattctggcccactactatgtgcgcgacgaagtgcaggaaatggctgattacatcggcgattccttttatctgagcaaactggccgtggatctgccgcagaaaacactggtggtgtgcggcgtgtcctttatgggcgaaagcgcaaaaattctcaatcccggcaagcgcgttctgctgcccgaccccaaagccgactgcgccatggcccacatgatcacaccggaaaaggtagccgcactgcgccaagcgcaccccaaagccgccgttgtgtgttatatcaattccaccgcggaactgaaaacttgctcagacgtgtgcgtcacctctgccaatgcgctaaagattgtccgcgccctgcccaacgaggaaatcatttttatccctgatgaaaatctgggccgttacatcgcctcccagctgccggagaaaacctttattttcaacgacggccactgccccatccacgcaaggatcacggctgcggatatcgatgcggccaaagccgctcatcccggcgcgccggtgctagcacaccccgaatgcgttccagctgtattggaaaaagccgattacgtcggcagcacttccggtattctgaattatgccaccgcgcacagtgaaacagcctatatcatcgtcaccgaatgcggcatcggctacaagctgcgccagcagaatcccggcaaggaatttttctttattacccccacgcccacctgcgaggacatgaagttcatcacactggaaaagatcgcccacgctctggaaaccggcgaaggcgaggttacgctggaagatgcccagcgcagccgggccaacgccccgctggagcagatgcttgcactggccaaataacagaaaagagcggatacatatggaaaaacaggatattgtaatcgtcggcagcggctgcgcaggcctgttcgcggcgctgcagtttccggcggacaaacggatcaccatgattactaaggaaatcattgaacacagcgattcgtttctggcccagggcggcatctgcgtgctcaaaacccccgaggattaccaaagcttttttgacgacaccctcaaagccggccactacgaaaaccgcaaagagtctgtggacattatgatccgttcctcctgggacaccatccgggagctggtcagctacggcgtggattttgcccgcgcggaggacggcacgctgctctatacccgtgaaggcgcccacagcaagccccgcattctttaccacgaggacgaaaccggcaaggagatcacctcgcgcctgctctcccaggtacgcagcgcccaccccaacgtgcagatcatcgaaaacaccgccatggtggacctgatctgccaggacaacacctgccggggcgtcgtcatccgccgcgccgacggcagctatgacatcatccctgcagactacaccgtgctggcctgcggcggcatcggcggactgtacaagcactccaccaactatccccaactaaccggggacggcctggccgtatgcatggagcacggcgtggcgctcgaaaatatcaactatgtgcagattcatcccactacgctctataccaaaaagccagggcggagttttctcatctccgaatctgtccgcggcgagggcgcgctgctgtacaacgccaaaggcgaacgctttgccaatgaactgatgccccgggatctgctgacggaagccatccgcgcccagatggccgccgacggcacggattttgtatgggaggatctgcgtcccatcggcgaagaggaaatcaaaaaccatttccccaatatttacgcccggtgcctggaagaaggctatgacgtgacccgagaatgcatccccgtcaccccagcccagcattacttcatgggcggcatccatgtggacgaggaaagcaagaccaccatggagcacctgtatgccatcggggaaaccgcctgcaacggcgtacacggaaaaaaccggctggccagcaactctctgttggaatcgctggtgtttgccaagcgggccgcccttcacatcatcgagcattacaccccacaagatggccccttgcccgctgtggacttttccgcttacgagcccgccgaaaccctggcggcgcggcgcaaggaggcgattttatccgagatcaggaggctgaatgaacatgagtatcagtgacgtgacgatgaagctgaatatggatcgctatctcctgctggctctggaagaagacattaccagcgaggatgtatcggccaacgcagtgatgaaccgcccctgtctgggcgaggtggagctgatctgcaaacaaagcggcgtacttgcaggcttgcaggtgttttcccgcgtgtttgaattgctggacgagcgcttcaccatggaatcgttctgcgccgacggcgatcgggtggaaccgggccagcgtctggccctgctgcgcggcgatatccgcgctttgctgtccggtgagcgcacagcgctgaactttttgcagcgcatgagcggcatcgccacccataccgccgaactggtgtccctgctgcaaggcagcggcatcacgctgctggacacccgcaaaaccacccccaacctgcggatctttgaaaaatatgccgtcaccgtgggcggcggcaccaaccaccgctataacctctccgacggcgtgatgctcaagga

SEQ ID NO: 369 - DNA, 28934 bp, Unknown
  16S sequences of unknown bacteria
gggcgcgcggtgcgcgcgcccctacgccgcgtaagacaacctatactatactgatataaccgatcctcaaaaaccgaaaatcgcgccttaaaatctcaatacgctctcgcgtgcgcggagaactttaatatcatttgtaaaaagaagaaagcgcagggagccagcaggtaccatttgacgttccccttgcccgttatgtaatgctcggcaaacaacagcccgaacgccgcgagcagcagaagggacaaaatcgccgcgaacacgcagcctcccttttttagcacggatttcccctgtttgaaagaacagaccgccatgatgaggaacagcagcgccagcgcgccgaaaaggacggtgaaaggcagtccgggatatttggggagatcgaccaaacgctccaaaacgacgccgtcgaagatattttcgatgccgccgtgaatcttatcccacgctttcgtcagccactcgggaagagaggaaagcttcaccaattcgacgaggacgtaccccgccgttacgataagagaagccagaaaaccgagaatatccagccatccgctcagcttcgcgcgtttgaattcaactttatccatttttgcacctgccttatcattttattctattttgttttgtatcgtacatattttatcacaacttttcccgcctgtcaataccttcggaaagatttttacgagaattttgcatatttttatatttttccctttttctcctctcttttccttccgggcgtcaaaaatgcgttttctttgccgcctttcggacaatccttatccgacggagtatacgcattcctccgacaggcggcgtatccgccttttcccttacttcttctaaatcctcaacactaagtaaaaaagacggaaagatataaagcgcgcgttttcttcatccgcggcaggaaagggaattattctaaaatttccgcaggcgaacggacgagccgccgcgccccgtgcgcccgcaaaaacgcttcggtcttgaatccccaagtcacggaaatgcagggcagccccgcgttttcggcggtttctatatccacttccgaatccccgatatacaccgccttccccctgtccgcgtttaagagcgtcagaacggaaaacaccgaatcgggcgcgggctttttgcgtatgcccgccgcctcgttttccccgaccgccgcctccgtcagcgctccgaaatagcgcttggcaagctccttgacggcaaaatcagccttattggaaacgatcgccgcctttttgcccgtccttttcagttcccgcagcatttccaaaacgccgtcgtaaggcttggtggcgtcgcagcaatgctccgcgtagaaacgtttgaattccccgaagatatccgaaaaatgcggatgagaagccccgcccggcacggcgcgctcgatcaggaggcggatcccgtttcccacaaaacttttcacctcttccctcttgcggatcggacagccgaacgcggcgagcgcctcgttcgtcgcggcggtcagatcgtccagggtatctaaaagagtcccgtccagatcgaaaatataggtatcgtacattcctttcctgctcccgccgttttgcacggcgcttctatttcattttcccctttcgcttccgcttttcgaaacttttttgaccagcgcttttccccttactcccttcccggatagaaacgcccattcgtttcgttttttcctcccggcggaagacaaaaacaaaccgacggaaggcgggacgttcgcgctccctgaaagcgagggcgtttttcgctgcgggcgatcccgttgaaaattttacgcgctttttaagccctgcccgtgcaaagcgcacagcgccgcgtaacatcccgccgttttcaaggcatcggaaaattgacggaagattataaaatcgccttgatcgcggcggctgcgcccgctctgttttcgctgcccgtcttgatatagatggcggaaatataattgcgcgtcgttccttcggagatcttcaacgcggaagaaatctggcggtttgtgaatccctcgtacagcatcagcgctatctccacttcgcggtcggacagtccgaaagcgcgcttgatcttgatttctctgtcgctcgtcaccgtctttgcggcgtccgcgatccgccgcgcgattttcgcgggcagaatggtatctcccgcataggcgtttttcacggcgtcgatgagcgccgtgctgccaatatctttcaaaagatacccgctggcgccgttgttgatggcgttgaggatatagtcgctgtcgtcaaacgtcgtcaaaatgaccactttcacttcggggaatttggctttgatactctgcgtcgccaccacgccgttcatgttaggcatacgaatgtccatcagcactacgtccggacaatctttttccatcttctgcaaagcgtcgaaaccgtcgaaagcgatgccgatgacttccagttgaggatccgtttccagaacgctcctgattccttcggcaagaatcacctgatcgtccgctatcattaccctgattttcttatccatattctatcctccgtcccgtctcgcgtttttgtgtctatctcaataaattttactttttcgccgcgcgcccatccgccgcccgtgctttctcggcttttcaccccgccgctttgcgtacgggggaaaaaattgcgttctccaacgtctgttctttttccgtttcctcaaaggggcatatgttttcccgttgccctttggtttcgcccaagaggcgatcgtttttctttgtgcgctttttagtccaaagagctattttttccctatcgttttatttctttaaaaattgtatatttctcccctttgtccgattctatataaaaaggctatattttttctcatcgctttattcagtcaaagactacacatttttactctctttatttgcttttcaaaagaattgtatgtttcccctctctgttccgtttcgtcgaaggttatacgtttcttttctttatttcgtttcgtcaaaaaattattcaattcccttctcgttcattttatcaaagggttatccgctttttctttcctcgcgggaggcgaaacgttctgctgtttgtatcctccccatttcttgcgtccgccccgctccgtttcccgcgccaaagccctctttttcgcttttcaaactctcgtcggctgcgctttcccgccgttcccgcgcctttcttccgattctacgcgccgcggcgcccggggcgcgagccttttgcgtcggttagctcccttgcgtatccgctcccgcttcccgcgctgagagctttctttcccgccgtttttccgtttcccgcgcccgtagtttcaaggctcagcgttcctgctccgataaagaatcgtgcgggagcatgagatgtatttcgaagccctcgtcgggttcggaaacgaaccacacttctccgccgagcgattccgctctgcccgacattcccgtcagtccgaagccctctttcaattgattgatcgccacgcccgaaccgttgtccgagagcagaaaactgattttcccgtccgcttccttcaattcgaaccaaaacgcggtggcgtttccgtgtctgagtccgttggaaatcccctctttgagcgtattgcacaaaagccggtatttggcgtccgacacgcagatatcgtctatatccgagcggatttttatgcccgtaccgtcggtggattcgttgatgatgccttccagggcgtctttcagcgtcgccttgcccgggatgcccgagaggagatgaacgctctccctcagctcttcgagggcgtgtttggcttgcagattggcggcgatgatcttgctttttgcctcctcgggctgcgaatcgatgatgagtttcgcggcttccgtctgcatgatgacggtagtgatggagtgccccgccgtatcgtgaatgtctttcgctatccgctgacgctcttcgagcgcggtcacttccgcgagatcgtcataggctttttgcagatcctccttgctcttgtccaaatctttgagcgctttggtcagtctgagatactgccgataaaaacgcacggaaaaattgacgaggataaaatgcaccaggaggatgacgaggtcgttgaaagactgcgtgaggagcggcagaaaggaaacgctttccccctgcctgaaaaaggcgaatcccgccagcgtgagcacatacaccaccatgcacaccgcgcaaatgacgacggacgggagtatcttttccgagctgatataaaattccgtcagaatgatgaggtagagggtgcaaaggtacgtgctgcccgtgacggcggtcaaaatgaaggcggcgacgaaatcgatgacgtagcaatagatcttgttgcggaagcccttgacggcaaagagtttcacggcctccgaaacggtgagcacgatctcgatcccgaacgtagacaaaagagtgccccagcgatgcgtttccaccgctatgctcacctgatcgaggaggataaggacctcgacgatgacgagcagaccgaaaaggagttttttcccgaatcgctgaaattccctttcttctcggaaatcgggtttttcgaaaaatcgcatccagcggaagcgatgctccttttgcggctttttttcgtcggcaagcggcgctgtcgtagaaatgcggcgcccgtcctcctcgggcagtgccgcttctttcgacggagcctcgcaggaagcgtatgccttatagtcccctttattccccgtgaactttctgtccgcaatcccgttatttttatcagccgcctgcggtgcaggcggcgcggcgcctttgcgtttcgttctccccattttcagcctccctctctttcgagaacggagccgatggaaaaattcctgctgatctcgcgcatctttccgcttttgtaatagctgtaaatccccgcgggggaatagatgaaatgatcgcagaaaagcacgttgtgaaaactgcatatgagctgaaactgacgcgtcgttttgtcgtccgcgacggagggaaaacagtttcccttcaaatggttgtgcacggcgacgatgccgaaaggcttgttttcgacgatgagcttcgtcagttcctccggcttcaccaccacccgctgcggactgtcaatcgtaaagcgcttgcagagcacgatattctgtttttcgtcgatgaggtaaaaatccagcacctctttatccgcgggggcgtatttttctttgacgaacgccataaagctttccgcttcgaatttttttgggaaacgctcctcgtccgccgcgcgatagacctcgtaaaatttgccgacgcaccgcagatacgccgccacgttttcgcctaccccgtccaccgttttgagctgcgccaccgtcgcggaaaaaatgccgcggacggagccgaacgccgccaggagccgatgcgccagctcgttcgtgttgcggcggggaatggcgttgaacaggagaatttccaaaatttcgtgttcgcacaaatttccgctgtctaatttttctatgattctgtgacgatgcccgtcgtgttcggacataagcctacctccccgaaacggtcttgtttccgcttatccgcgtttacccgtttattttagcatattctttacaaaaagtcaaagggaaaaaggcgggcggtccccccgcataaagttttttctcgtttttccttgtctttttgtttacgtaagcgcccgcaaagggtatatatgaagagaaacagaatgtaaggacgtataattatgactcatgtaatggaaaagtatttcaacgatatcgtcgattccatctgcaaaacggtgagattcgattcctctttaaagcccgcggaagggaactgccccttcgggaaggaaacggcggattgcctcggctatttcctttccctcgcctccgaaatgggttttgaaacgcacaattacgacaattacgtcggagaagtgatcttcggagagggcgaagaatttgccattctcgcgcacctcgacgtggtgcccgcgggcagcggatggagattcccgcctttcggcgcggccatcaacgacgaactttccgcgggcggcgttccgggcgtcaagatctgggggcgcggcaccatggacgacaagggtcccgccgtggcgacgctctggtgcctcaaagccttgaaagacgagggcttccggccgaagcgcaaaatcaaactcatcgtcggctgcaacgaggagagcggctgggcttgcctcgatcattacaacaaagcggcgcatatgcccgaagagggcttctcgcccgacgcagacttccccgccatttacgcggaaaagggaatcctacatttttccgcctcttttcagacggaaacgccccctttcctctctctgaccgcgggcggagcggtgaatatggtttgcgacgccgccgcggcggtgctgaccgaagaagccgcgaaaaaactccgcgcctatcaaaacgacgttcccgatacgtctttccatttcgacgaagagagcagaacgctgacggtgaagggcaaatctgcgcacggctccacgcccgaaaagggcgccaacgcgctgggcgcgatgctgaaattctttgctttgcaggacgtcggatgcaaaaaggcgtacgaactgctttttgcggatagcctcggactcagacagctacacgacgaaacgggatatctcaccatgtcccccgacgtggcggctttcgaaaacggaaaactcgtcgtcaccacggacatccgctttcccgcaacgcacgaaaaggaggaaattacaaacgcgctcgaaagggcgggcgcggaatacgaaatcctgcactatcaggctcccctctacaacgatccgaacggcaaactgataacgaccctgatgaacgtgtacaacaagatcacgggcaaaaacgaaaaggcgatcgccatcggcggaggaacctacgcgagagcgctcaaatgcggctgcggtttcggccccgaattggaagaagaagccaccatccatcagccaaacgaatatatcaccttcgacagaatccgcctcatgagcgagatttactacgaagcaatcaaagaactgacaaaataagttttttcgctcctttcggcgcaaaggagaaaaaagcgccgacggaggtctttgaaaaatgcggatctgaaagccgaaggcaagcgcgacaaacactccggcaataaaatcgccgtttgcacgccgccgctgttttatcggctccgtcccgacggcggcaggacgctccgcccaagcgtcctacgctttttgtccccgtattccgacggcggtcccggctttcgtaagagcgacagtccctctttttctttcggtacgattgctcgcggagattccgtaacgatagcccttttgtccgtacgtttcgacgaccattaagagtttcgacaacccttcccctgtgtctatgtgcctctgcccacggctatgaaagaactcggctgcgcctcccctatcttcctgcaaacgacgggcagagaagcgccctgcaatcataacgccgttcctctcttcccgtagatcggcggctctatgactgccgacaataaacgcacagaacgggatacgcgccttttcggagtttcccttttaccgccgcggacaatcattccgcagcggtttttcgcgccttttccacccatatcgaaagcattataccacggatttttgcgatgtcaagcgccgactgccaaaaatttttgcttttccataacattttttgttcgggactcctttccgttcccctttccgataaaatcttagctgcgtaggaaccccggcgtttgcaacggctatgaaaaaatgcggcttcttttatgcgcttgcgtacaaagaaaaattgcgaattgacgcaattgccccgcaaacgagaatccgtttatcgcacacttttttaaatttcctatcgatatagcggcttttgcgttttttacgtcggcgtttttttctttatattcgtcgagtaaaacgctttttctctccgttaagtcggagagtttctttacgcacaaatatgtagcccgcaggaaaaaacctgcgggctacatattttagtgagagaatatgaaaaaagttttacgtataatcctgaccgatgcggaaagcgatgaaatgaactccgcctgccttgtccccttctcaatccttactttgtgatataataatacacctgtactgtgtttaatttgtgaaaaaattgtgattaatatgtgaaaactttataatttttacatttcaagggcattttttccattttttttcgataagaataaaaaaatcgcaaaaattaggtcgaatgacctgattttccttatattttcgaagttttgaatcgttcaaaaatcgcctccgcgacgcgaaaaccgtccgccgcagaagaagtgatgccgccggcgtagcccgcgccctcgccgcaagggtataaacttaaagttgaaacggattgcaggtcctctccccgttcgaggcgcaggggagagctcgtccgggattccacagccgtgagaaccgcgtcgggacaggcgaaacctttgagttttcgatccatatcgacgatcgctttcttcatcgtttccaccacggaggaagggagcaccgcgcgaaggtcggcaaattccgtccccgccgcataggtgggtacgacgcttttaaaacgggcgctttcccgatcctttaaaaaatcgcccgccagctgaacgggggcgcgataatcgcttccgcccgccgcaaacgccgccctttcaaggcggcgctgaaattctacgcccgccagaggagagtcgccgcaaaagtccctgcccgtcacctgtacgacgagcgcgctgttggcattcgttccgtttctcgtgtaattgctcatgccgttcgtgacgacgccgttctcctcgctcgccgcaggcatgacatagccgcccggacacatacagaacgtgaaggccgcgcgttcggaggcatgggaaacgagcttataatccgccgcgggcaggagggaatagctcccgccgtattgggaaagccctatttccgattgcaggtgttcgatgcgcgcgcctacggcaaaatccttctgccgcatggcaacgccgcgggaatgcagcatttcgaacgtgtcccgcgcgctgtgccccaccgcgagcaccacggcggaaacttccgccgtttcttccagggagccttcccgcttccatttaaccgcctttacgccgccgtctttgacgagaatatcggtcaattttgtattgaactctaccctgcccccctgctttatgatgaactcccgtatattttttacgactttcttcaaattgtcgctgccgatatgcggcttattgagccagaggatctcctcgggcgcgccgaaagaaacgaacgtttcgagaacttcgcggttaaaggcgccgtgcgtccccgtattcagttttccgtccgaaaaggtacccgcgccgccctcgccgaactgtacgtttccttccgtgtcgagcctgcgttcccgagaaaatatcccgatctttttttcccgttcttccacgtcgggaccgcgctctatcacgagcggacgaatgccgtgcgccagcagtttcaaagcgcagaaaagccccgcgggaccgctccccgccaccagaacgggcgccgagggcagtctttccgcgggcagaacgggcgctttcgtttcgggcgctcgctccgtttccgcggaaaactctatcgaataaatataccgaatattccccttgtcccgcgcgtcgagggattttttgagaattttaaaataagcgggttttgcccgcagctttttttccgcaatgcgtaggagttctcgctcgctctgcgcgagagaaagcttgatgtcggtgagaatttgttttttcatatcgtccaaaataggcgcacccgccttataaatccactttccgctttttcgaaggtaaggacagcttttaacgcacggcggaagagttcagcgccgcggctacgacccgcgcggacgagtatgcccattgcaggttatagcctccgcattcgccgtccacgtcgagtatttcgcccgcgaaatatagtcccttcgccagtttgctctggaaattttcgtccgtttccgagagcggaatcccgcccttcgtcacctgcgcgtaatcgaagccgagagagcctgtcacggacagcgtaaactctttgacgcggcgggcgatctctgccgccgtacccgttttacagcgtttcatcactgccctgcctagttgattattcaaaatcccgcacaaaagttcccctgcgggaacgccgctttgcgccgacagttttcgcgacaaaacggagcaaagccgttcttcttcgacgcccggaagaaactccaaggacagagaaacgtcttccccgccgagcttgtccgtcaaaaaagccgagaggcggaaaatcgcgtcgcccgatacgccgtaatcggtgaaaatgacgtccccccgagcctctgcgagcgtgcatttgccgcagcgggcaaaaacgcgcgcttccgcacggattcctttgagtcctttgataggctccgtctgcgtcttcaattgaacgagagagggatagagcgcggtcaccgtatgtcccatctgttttgccagcgcataggcgccgccgtccgtgccgaaattctttgccgccttccctcccgcgcagagcacgacgttccgcgcctgaacgatctccgtttccgagcccttttccgcgcggatgacgaatccgtccaagacgcgggagagggaaacgactttcgcgcccgtttctacggagatcctcttttcggcgagcgcatagcgcaaaagatcggtgacggcggaggcctgcctgcccgcaggatagaccctgccgcgctcgtcgggaagaaacagaccgcccagcccttccaaaaaagttagcatctccccttcgccgtacttcgtcagcgcacgggaaatccgcggcttcgtttccgcctcggaagaaaagtaatgttccgcggacatatgcgcgttggtgacgttcccctgaccgttgcccgtcgcggagagttttcgccccaatcgttccccccgttcgaggatgagaacgtcgtgttccgccgagagagaagccgcgcaaaacatacccgccgcgccgccgcctatgattgccgtcccgatttttctcgtcatggtttcattgtacctcttttatcgcataaagtcaaatttatttcgaaaactattgaattttttttcgattagctattgacttttacgctaatttatattacaatatatacgaataatataataatgtatagatttacaaatgagtcatcgattatcgggagattaacatgtttgaatatttgaaagaaaatcccgttttggcggcgatcctcgccgtcagtcttttcgtcatcgtcgtcgttgtcgtcattctcgccgccagaagctccaaagcaaaaaaacgcgcttcttcgggcggcgcggaagaaaaaggcgctttgacggaaaatgcggaaaacggcgcggaagggacgcaaaaggacgggaacacctcccctgccgcggggaaaacgaacagcgaaaccggttcgctccccgcggaaaacatccgctcctccgtttcggaaaaagacgggcacgccgcagacgccgcggcggcagaagccgaggacggggagaaagagagggagagcgccttgcggcagacgacagcgcagacgaaggcgacagacgatcttaaagaaacggaaagcgcggcgcccgggcgcggacaatgcgaaaacgcgaaagaaaaaacggaacaaggcgaaacgcccaccgaggatttagaaaaaaagcagattgaaaatttggcggaaaaagacgcggccgtgaaagccaaggcgcaggaaaagcccacgcctgccctttccgccgccggcgaggaaagtacggcgggcggaaataagccccgggggaaaacggcgcagtccgcttcacagaaatcgaaaaagaaaaaaaataaaaataaatccgaggagggaagtatgtatttagaagacctcaaaaacgcaccgattgaggacgaaaacgatttttacgacgaggaagacgaagccgacagaattgccaagtacagcggaaaatggatcatttgtcgggtggtgacggcaaattccagatccgccgacgtcatgaacgcggaggaaaacgaagaagagatgttctttttcgaactgcgcgcctctaacggcgaaaagctgttgacgagcgaggagtacaccacctacaacggcgccttaaacggcatcgaaacgcacaaggcgaatattgcgcggggcaatttcaaaattaccctctccaaaaagggggactatatctttaaattgctgagcggcaaaaatatgctcctgtgcatgggcgaacactataccacaaaagcgcgctgcgaaagcgccatcgaatcgacgaagcgatttgcaaagacggcgatcgtcgacgaaaacgtgcaggacatcgtcattacgcccccgcccgaagaggacgaagcggaaacgaccgattttcccgacaacggctacaacgggaaatggatcatccgcgcgcacacggcggaggacggagaacaggtattctatttcgagctgtttgcctccaatggcgaaaagctgctttccagcgaggaatacaccacctacatcggcgcgatcaacggcatcgggacgcataagacgaatatcgagcgcggcaatttccgcatttctctcacaaaacggggagattatatttacaagcttttgaacggaaacggtcagcttctctgcctcggcgagcattacaagacgaaacggcgctgcgaaaacgccgtcgaatccgtaaagagattcgcgcgcaacgcccctatcctttccgatcccgaaacggtgacgaaaaacgcctaaggagaaagacggcatttttctttcgccctttcggaaaacggccgcgcgtttttgacgggcaggatttgcttttcaaaagggaatttcttaaagcggtcaatcgttcgttttcggcaaggagcgcattcgtttctctttcctccttatgcttagtacaaaaaaatgacaaacaaaaggacttttcctccgtttttccgggggcaaagtcctttttccgttccgtgtaaaaaagggcggcgaaacgcccgtgtatcaatcaaaaagtagcgcgcggagcgataaaaaagcgtatctacctatctgtcgaagagcaacttacatatccccaattttatcgctgttttcgtccgcattttttatgatattattcgttacttgtcggtctgataaaccttatccgataaaaatttttttctttcgaatgtcggctcctcagagaaaggaaagcgcaacggacgtaaatttttacggatgcgcagggaagcagcggcaacggaatctcgcggtccgcttttcggaacgtttttcctgcgcgccccctcaaaagactacgcaacgccgcgcgcttcgagtgcatcgctatgttcaaaggctttatagggcgcctctttattttaccttttaatcgcaaaagagcgaaactctaaatcactccgcgccgcccgttttttccgtttccgatgcggcttccgccgccgcaacctccgcctgcatacggcgcagtcttttgagaaaggcgatcgtgaacggcacggcgaacacgaacgcgagaaaatcggataccgactgcgcgctctgtacgccgagcagccccatcatccaaggcaacaggactatcgcggggacatagaaaagtccttgcctcgaacaggataggagcgcggcgagcgctttattccccacgacctgataggttagccccgccataaaattgagcggcagcaacggcatacagatacattgcaggcgaagcgccagcgtgccgaccgctatcgagtcgggagattcgagaaactcccgcatgacaaagggagagatgacggcgcagacggcggcaaaaatgctcatcagaagggtggaaaacgcgagggtgaacaggtaggcgctgcgcacgcggtcaaatcttccggcgctgtaattatagccaagaacgggctgatacccctgtcccacgccgagcgcgatggaaaaggcgaacatgaacaccttttgcaccacgcccatcgccgcgagcacgccgtcgccgtacgatttcaccgcccaattcaggagcaccgtgcacaggctggcgaggatctggcggcaaaaggagggaaaacccgttccgataatttccgcatagaccttgggattgcgggaaatgcttttaaagcgaaggcgggtgatgcttcgtcccgataaaaacatgaacagcaaaatcaaaaagctgatgatctgactgatgaacgtggcgaccgcggcgccgacaattcccatgtcaaaggcgaaaatcaggagcggatcgagcgcgacgttgatgacggcgcccgtcacaagtcctatcatcgaaagcagcgccttgccctgcgaacgcagcagattgttcatgacgaaagacatacacatgaacggcgccgccagcaggataaagcgggaatacagcttggcattggcgagaacggcgtccgacgacgagccgagcagccacatcagaggggtcaaaaacagtaagccgaaacataggatcaaaacgcctaccacgcccgcggcaaagaatgccgaagaggaaacctcgtccgcttctttttgggcgcgtttgcccagcagccgcgaaatgatgctgccgccgcccatgccgaaagtaaagccgatcgcctggatgatcgccatcagggacaaaaccacattgacggcgccggtcgccgattcccccagccccgatacgaaataggtatccgccagattatagagggaggaaaccatcatgttgagcatggtgggaatccccagcatgaccaccagtttcggaatgggcgtcttggtcattttggcaaattgccgccgctcccgttcggtttcccctacgaccgcttccgtcgtattttcagagtgttccatagtatccattatacaatttttcttttaaaaacgcaactttacaaagaacgtccgcacaaaattcccgacgttttcctcgcgaaaaaggaataattttccttatccgtgcgcaaactgtcggtatgaaaagtttacaccgtattttgtccgccctgtgcgcgacgactctttgcctgtttttaccgatgacgacagcctgctccatgttcggagaaaaggactcctcctccgattcctcgtcgaatacttcgacttcgtccgactcttccagctcggcggattcctcgatagaggcaagacacggccatcccggcgatttttccgactacttccccgattcgatgcccgacgcggttccctatcccatttttcccgatcaagaaagagagcgggagggcatggatcatgcggaaatgcccgcgccgccgacggtccgccccccgcgccccgtcagaccggcacatcccggatcgcctaacggcaccgacaagatgcccgctcccagacgtccgcacaaagacgggcatcccgactcctatcagaaggattcgggcgcaggcgacaaggggagctgttcctccgactgttcaaaagacgggaagtgttccggctccgactgctccgattcctcgaaaatggtacaccccagacacggcgttcgtccccgcaaaaacaatcggcaaagctcgaattgaaaagcggcgtttgccaaaagcgccgacgttcagacccgttcccgaaagggacgggctttttttattcgagccgcaggatctccgtataaatctgttcgtcctgaggcgtgaatacgtcgaagacgaccttcatgggatattccgcattttttataagccattgtttgacgctgccgaccgcgatttccgcggcttcgtcggcggggaaattaaacacgcccgtggaaatacagcaaaaagccgtgctgtgcagtccccgttctttggcgagcgaaaggcaggattgataagaggacttcaaaagcgcccgctcctcctccccgacgcgcagcgccacacggggaccgacggtatgtaaaatatatcggcacggaagattatacgccgaggtgatcttggcgttgcccgcttcttcaacgcagccctgggtgcggataatcgccgcgcagtcgttgcgcagctgaatccccgcgcgggaatgaacgatattgtcgatacaattatgcagggggatataacatcccgtcagattgacggctgcggaattgacgacggcgtccgcgttcagcgtcgtgatgtcccccgcgtataccgccatattctctttataggaaagcccctgcacatccacgacgcctcggcggagggtttccgtccagaaaagtttgtcctgcgcggctataaactcgtcggggacgggcgcgggcaggcgcctgttcatatactcccgaatgatcttgcgtttttcgggatagggcatattgaacgccgccaccatgccccgttctccgaacagaaaatcgagcagtttatcgcagagcgtaccgcactcctccgcgtccgccgtttccccgtgaggataaggccgaagggaaattgcggattcgtattcttccgcccttaacattttatgaagcgcattcatgatctctttccttttttcccgcaaaaagacaaacccgggacttttgcgggtctgtttttcatttgatttttccgtttttatatgctataataaaagcatgaaaaagaaaactgctcccgtacaaaaaaaatgcttccgttttcaatttacgcccgtcgtccttttgatgagcgcggcggcgcttttggtatgcgcgctcggcattgcgctttccgtctataatatttttaaaagcggactgcactccttcaccgattttctcaaatatccttttctcatcctcatcagcattgcgcttgccgtcatcgtcgtcgccctcctgatcaaatctcagtatatcgtcgacgacaagaattttaccactcaattcgggctgatcaagagcaagtgcgccttgaaggacatcacttccgtcgtgctggacagggacaccaataagctgaccgtctacatgggggaagcctattccgtgctctccgtacagccctcctggaacgaggatttcgtgcgggcgcttttgaaaggcaatccctccatcgattacagttataccatcagggaaaacaaacccgacgaggacgacaaaaagaaaaaataaccttgccgcctcccgaattcgataaatttcagtttcgcttttccgattggaaagcggggctttttttatcccctgcccggttaaaagcgacgtttttaagaggagcggcacagccgccctttggcgttttccgctccgagcgtaaagggaagagcgcgaaaacgagaggcaaaaacgtgtttctcaaagtacaaaattttcagacgccgccttttgaaaagctcttttcaaggcgttttttccatccgttcgtcccgtcctgtctttcaggcttttcccatgcggcgcatggtgtccgcgatatattccgcgtaaagttttgcgacgtcgatgcccgcggcggcttccagcccctcgaaaaaggcgttggaattcacctcgcaaaggacgggtccacgctcgctttccagaaggtccacgccgcagtaatcgagtccgaggacgtttgccgccctttccgcggcaagacggaagtcctctttgagcgcgaccgccccgcccttgcctccgagttcgatattcgagcgaaattcgcccgcctttgcccgacgctccatggcgcccaccgctttgccgccgatgaccaagacgcggatatcccgccccgccgactccgcgatataacgttgataaaagtgcggacaatagagaaattcctgcgccgtttctttcaacgcttccctgtcgtacacaaggcgaacgtcttttccgaaagagccgaagctctttttcacgacgaggggaaaagagagccgctccgcaacggacgccaaaaatctctcgttcgcttgtacgccgggcgtgtaacagagcggcgccgctatcgtttcgggaacgcaaagccccgattcggaaagcgcgagataggtgagcatcttatcgtcgcagcgctccaccgcctccgcgcggttaaacagccgcaagcccgtcttttccagcattctgccgagatatttgtccttatcgaggtatacggcgaaatcgcactcccgcgccccccgtatccgtccgtccgcccccacaaaaagcgaaaggctgccgtttaagacgacctccgcttccgcgcccgccgcctttaaagcccgggcgatccgctcgctctggcgataaaatttttcgccgttgggataggcgttcatgataacgatgcctttcatattcttccccgtccggacgttcaaaaagcgagggctccccctcgctttttaaagcgctccgatttacgcctccacccgaatgacggcttccacgtcggcgatgcccgaagcgtcgattttattcgccgcgccgcggatgctgttctccgtcgtcgcgtgcgtgatcagaatgagaggaacgcggtcgcctttttccgccgtgccgctgcccgttccgcccttttgcaccaattcgacgatagaaacgttatatttcgcaagtatccccgatacttttgccaaaacgcccgcctgatcggcggccgaaaggcggagatagtaagcgctctcgaaatcggaaacgaatttcgtttccctgtccgccgccgcggtatttttaaacgtagaatacttgatgtccgaatgggtcgccgcataaatgacgtcgcccaccaccgcgctgcccgtgggaagcgcgcccgcgccccgaccgtacagcataatgtcgtccatggcgtcgccctttaaatagacggcgttgaagctatcgttgacgctggcgagaggatgggtgtttctgataaaggtggggtgtacccgcacctcgatcccccgcggcgtgtttttgccgatggcgagcagtttgagcgtatagccgagctgtttgccgtaggcgatatccgccttatccacggaagagatcccctcccggaataccttggcgtaaggcactttcgtatgaaaggcgagcgaggagagaatggcgagtttatacatcgcgtcgatcccctccacgtcgttggtggggtcggactccgcatagccgagcttctgcgcctctttgagcgccgagccgtaatcttcgttctcctccgccattttggtgaggataaaattcgtggtaccgttgatgatgcccatcatctcggaaatacagttgccctgcacgccgtcgaggagagtgcgaatgatgggcacgccgcccacacagctcgcctcgaaatacagaccgcagcagttgcggcgcgccgtgcgttccagctcgtgagagtatttgcagatgagctccttattggaggtgacgacggtcttgccctcgtgaagcgcggcgaggacgtaatccttggcggcttccacgcccccgatgcactcgattacgatgtccacgttgggattggcgatgacctccgcgatattgcccgcgacgttctcttcgggaatccccattttaagcgcgcgctttttgtcgcggaccaggacgctctccacgacgatatccacgttctgcgtcctttgataaaactcacgatgctcggtgaggatcttgtaagttccgccgcccacgacgccgagtcccaaaatcgccacgcctactcttttcatcataccttatgtgcctcctcgaatcttgttgcgtttgctaactattagtcttgctttttggtgcggcttttatgccctttataaaagccgttcttttgcgctttgtgcttgtcccgcgtttttctctttttccgcctgcggctattaggctcattcttcgggacgattgagatagtagaggtatctaagcccttccagcgtcagcagtttatccacgacgtcgatgcaggaaacctccttggagatgacctggctgaaaccgcccgtcgcgatcgtcttgacgtcctgcgtcttcaattcctttttaatgcgggtgacgatatattccaccagccctgcgaaaccgaatacgatccccgcctgcatattggtgacggtgtttttggcgatgatgcttttcggcgcctcgatctccacgcgcggcagcttcgccgtaccgttgacgagcgaatcgagcgagcctttgatgcccggggagatgacgccgccgataaattcgtgactgccgctgatgatgttaaaggtggtggcggtgccgaagtcgacgacgatcatcggcttgttttcgccgtattttacgatggcggaaacgcagttgacgatacggtctgctcccacttcccgggcatcgtcgcagcggatattcagccccgatttgagtcccggctcgatatgcagcggctctatcccaagatagagcgcgcacattttgtcgatggtgtaatcgagggaaggaacgacggacgaaatgatgccgcccgtaatcgcgccctttttgatctccattacttttaacatattcacgagttgggagccgtattcgtccgaagtctttttaaaatctgtggcgacgcggaaagatattttcagcgtttccttatcgtaaatcgcgtacttgacgttggtattgccgatatcgatgcaaataatcataaaatcgtccttttattgcgtcttccgccccgaaacgacgcggatgacggaatacatcgcgggcgaaagcatcagattgatggcaagttccaccaaaaaattaatgcccgcgcagcctataatcaaaaaataaagaaccgtgctgccgtccgccacaaaattggcggagagcgtatcgctcatcaaaagcgcgccgagaatgaaaagccccgtattgacgacgggcgccgcggcagaggcgacaaagacgccgacatacccgttctttttttctatcagtctgaacagcagccccgccgctagccccgccgccgttcctttgacaagacagaccgccgaagtgaggaagggatgctcggcaaacagcaccgccgtaaaagggtccgcgcccgttaccccgtacatcagagtgataaacccgaaaacgagtcccaaaaaggcgcctgccgacgggccgaacaggacgccgcccaagacaatgggcacgaggacaaagctcaaaccggtggcgccgattttgatgttgttgccccaaagttgaagcacgatgacgagggcgagcaacaccgccagccccgtcaccctctttgccgaaaagaattttcttttcgcaatcatgatgacctccatcgggttcctccacgaccgaaagatacccgcagaaaaaataaaatgtatttatccgtcgataggtcaaaccgcgaaagactttcgtccgccgcgtatccgcctcggatatcggatgataaaggcaggattttcaaagattcccgcaaagaacaatcttttttacgttttaatcacctttcgggcacggaagcgcatacgatcataaagagtacccgcaggataaaaagcggatccttcgcccgttttcgccgcccgcacaaagagataacgttgtattatttattataacgcatttttctctttctggcaacaaaatggacggaaaaaacggaacatttttttccgccgggtaatactatgtaatagaaagataaaaccgcaggtatttcatcccctttcggagtcgattttacatatcccctgcggtgaaaacacaggaggttttttatatgaattgctgcacacagggtaataccaccctttggattctcattgctctgctcgttttgggctcgaaagacgggtgtttctgcgacggcattctgagcggctgcggcttgcccatcatcctcgccctgctctattgcctgtacaagaacggaacgctctccgctatcctcaccccttcgtgtggttgcggctgcggctgcaactaagcggccctgcaaaccgaatccctacatcgcatcccgtttcccctctttctcccgcgaaaataaaacgcaaaaggcgaaatcccgcggaaacaaagatgccaaaaccgacgaaaaacggagcttcggctccgttttttgccgcgtctttatttttcccgctgcgaaagaaaatacgcctgcgccgcgacgattgtcttcgcgtcgttgatcgtcccatcttcgagcatttttttcactgtttccagcggaacaaactccgcttgaacgaactcgccctcgtcgggatgcgcgtccgtccgcctgccgcccgaggcccggtaaatataaatcttttcattggtgtagccgggcgtgggatacatgacgaacaaaagttccaatttttccgcttcgacgcccgcttcctcgctcagttccctcgccgcggcgagcgcgggatcttcccccgcttccagcttgcctgcgggaatctcgtaaagcacctccccgtaggcgtaacgaaactgctttacgagcagcatacgcccgtcctccacgtacagcacgcaggcgccgccggggtgttctatcagctcccgcttgcagggcttgccgtcgggacgcagcgcttcgtcgcagcgcacagagataattttgccctcgtagacatagtgcttttgtacggtcttttccgtcagatccatttcagcctcctttgcgttttccgaaaggcgtttcccttcccgtggggaacggaagcgattttcggataaactttattagctattttatacaggtttttctgcctttcctgtcattatagcacaaaaacgaaaataatttaataaaatttcagaaaatatcttgattttacacgaacttttatgtataatatagacaactaaaaatccggaggtaacaatccaaatgaaatccgttaaaatttctctcgaaatggctcaaaaagtcaaagagtttgtttctattacgcaggactgcccctatgaaatccttttgaagagcggcaaatacgtcgtggacgcgaaatctatcctcggcatcttttcgctcgatctgtcccagccccttacggtggaaatctatgccgacgaatgcgcggatcttttggaaaagcttaaaaaattcgccgcgtaagtcctttgcgacaccattcttcggacggcggacgccgtcctttcaatgacgccgttttcccttaaaaagaggcggcttcattcggccgaaaatatttttcggtcttttttccaaccgttgaggagtttttttaccaatgcagatacagggcgaaacgtcagtaaacaaattaatcgttcttttcgttttcgataagatggaaagcgccctgtccgagcgcacaatcgtcgaaatgtgcacgaccagcaacaattggctgaattacatggactgcatggagcttctgcccaaacttttggaggacgggtttatctgtcggctgtcgtccgacgaggaacccctttataccattacgacggacggaagagagagcctcaacaatttttatatcaacatccccaagagcattcgtgaagaaatttccgccttcgtcaagaaaaacagcggaaaattgagaaaccgtcaggaatgcaaggcggattattatcagaacaaggacgggacgtacaccgtttttctgaaaatcatcgcccccgtccagcccatgctggaacttaaattcgtcgttcccgacaaaaagacggctcagaatatctacaagaattgggagagcaaagcttccgagctttattccgccatttacgaaactctggtggactaaaacgacacaaacgaggttatatagttatgtttacttattctactaaggggacctgttcaagacagattctcttcgacgtcgacgcggacaacaagctgcacaatgtgcgctttatcggtggctgcggcggaaacctgcaaggaatcgcccgactcgtcgagggcaaaaatatcgacgacatccaagaccttttggctggcatcagatgccgcaacggcacttcctgccccgatcagctcgccaaagcgatagccgaatacaaggcggaaaaggaagcggccgccgcccaaaagccatagcttttcaaggcatttcgcccctctttttcctccgctctttgaaggagagctttttatgcgcccgaattttcctttgcgttcctcgggaaaattccttgtgcttttttaaaaccgatttatgagaaaatcgcccctttttgcacgaggcggtttttattttttcgtttgtttcgagccgcgttttttcggcaaaaacaggcacgaaaacgcttgcgtttatccgccttttaaaagctttgcaaaaggaatttcggcaaaacgagtctttttcttcaaagcgttgtttctccgcgttcggaaagatatttttccgcctcgtccgccgacagcttccgcacctttgcggcggaatattctttatagtttcttacagaaaatacgggggcgttctgcgggcagcgtttatcgggattctttttcagataactttgcagttcttcttcatccgcaaaaattttataggaaaccctgcctttcccgcttcgtatttcatagatcccacacgctctttttctcgtataatcggccgttctcaaatagagtttcgcaatctctatcgaacgaaagggaaaattccacctttgcagtccccgtttttcttccgtttgaatacagatacaacgaccgcagcttccgcagatatactgcatatggttgcaaagacattccctcgcgttcagcagcggcgtgctccggctgcgcgaggtataacactcccgacacatacgctctcctttttccgcaaaccgcggaaaacgatcgttttgaaaaaattttatgacgggctttccctgcgttcggaaaaagcccgtcttttttgtgcaaccttcttactcggaagaatctttttcggattcttcgccgccgctttccgacgggttatccgcgccctttttcgactgctttctcctgccgtggccatattccccgttcctgaaattttctttgtagcgggcgagcgtcgccttgatggtttccccggacgccttgaacggattgatgaaactgcttttcagcttttctgtatcgagggaacttttgatcatcagtttaagttcctcgtacttgacggcgatttgattgtccttggcgaactttctgatcttcgtcgaaagtttgagcgtagaggcgaggtcccagaaaaagagcccgaaaaagatgccgacgaaaaaggaatagtaaatattattcgtaaaccagcccaccatgcgatagacgagcggatcgagcagaaacacgtacgcgccgccgatcagcgtccagaagaaggaaaacagcggacaaatgattccctgaatatttccgggacgtttggaataatcccagagcttgattcccatgcccttgataaagactaatcccgccacgtattcgattcccgtcatgaccgcgcagatgaccgccagcagaacgacatagcgcagccaaacggcggaaatgccgcccagcggaatgcgcgcgatgagaaagaggagcgccagcccgaatccgtacagcggcagataagggccgtgcaaaaatccgggatttatccacttcttactgttgaagcggcggaaaaatagttccagcacccagccgcacagtgcgccgaccgcaaataaaaaggtcaatatcaaaaaaatttccacgtttcaccttccgccttttttctctattatcgccttgcacagcaaagaacaaacgaaaaagaaatttcttttttcgttttgtccgggatttcagcgcgcgtccttgcgcgcgagaaaaactcaatggcggaaatgacgctgtccgacgaagatcatcgcgatgcccgcttcgtcgcaggcgtcgatcgaaagctgatcgcggatactcccgcccggctgaatgatcgccgtgattcccgctttgacgcactcctccacacagtcggggaagggaaagaaagcgtcggaagccattacggagcctttcgcttcctcgcctgcgtgctctatcgcctgctgagccgcccagatgcgattggtctgtcccatgccgatgcccgtcgtcctgtcctctttgccgatgacgatggcgtttgacttggtatatttgacgactttccagttgaacagaagcgccttcctctccgcgttcgtcggcgcgcgtttggtgacgactttgacgtccgcctcgtcatagagcgtttcgtcgtaatcctgaatcaacagaccgccgtacactttcttcatatcgtaggcgctctcttcacggcgggcgcggatgtcgggcaattcgagaatgcggatatttttcttggttttaagaacggcgagcgcctcgggcgtatacccctccgcgatgacgatctcgataaaaatcttattgatctccgccgcagtcctttcgtccactatgccgttgatggcgagaatgccgccgaacacggaaacgggatcggattcatatgccttgatatacgcctcgtaaatattctcgcccacgcccacgccgcagggattggcgtgcttgctggcgacgacgcagggctcgtcgaattccttgacgagttccaaagcgccgttggcgtcgttgatattgttataggaaagctccttgccccaaagctgtttcgccttggaaagagagcctacacggataaattcttcgttataataggacgcgccctgatggggattttctccgtaacgcatatcctgcgccttctcgtaagcgaacgtcacgctttcggggaaacggatgcccagctgctgcgcgagataattggagatcaagctgtcgtatacggcagtatgcgcgaatactttgtattgcagatacttcttcgtttccaaagtaataccgcccgcttccagctccgagagcaccctttcataatcccttggatcgacgacgaccgccacgtcctgataatttttcgcggcggcgcggatcatggtgggtccgccgatgtcgatgttctccaccgcgtccgcaaaagtcacgccgggctttgaaatcgtcgccttgaagggatagaggttgacgaccacgatgtcgatggtgttgatgcccagtttttccagctgcgacatatgctcgggattcgaacgcatggcgagaagccccgcgtgcaccgccgggtgcagcgtcttgaccctgccgtccagacactcgggaaagcccgtgacgtcgctgatgccgacgacgggaagccccgcgtccgtcaacgccttcgcggtgccgcccgtggaaacgatctcgtagccgcacgccgacagccttttgcagaaatcgacgacgcccgtcttgtccgaaacacttaccaaagctcttttcttcattgtcataacttatatccacctcttttattttttgcgaaaacggaacatactgaaagtatgctgattctttatttatttttcatcgcttatattctcgccatcaacttctattcttttctcctcattaaggggctgaaagacgactacacggacgaacagccgaataaatcttcggacggcaggcttgtcctcacgggatttctcggcggagcgatcaccatctatgtctgtatgtttattttcaagtatcggctcaaaagccttttcctgatgcttttaatgcccattttaggcgttctcaacgtttatttgtgggtcctcgcattccgctccggattcacctttttcgtcgcgtaaggggcatttttgcgcgtttaaaagcgtttgagaagaaagaagaagccctgcccgttcagcgggcgaattccgcgtttttcgccagccatttcgccactccgtcctcctcgcagtagccgatgacgcccgtcgccttgcctttcagccattcatccgcgttttccacggcgtatttttcgtcgcagacgtcgaacatttcggaatcgttggcggaatccccgaaacagacgagcctgtcataggcgaaaagctctttgagctttacgacggcattcgctttcgtcgcgccttccggaaggatttccagccaatagtcgctgcggtatttttcgggataaatgcggcaatacacgccgattttttccagttcgtcgtgaatttgtttcatctgctcataggcgccgttgcacgcaaaaaaatacgcgtcgccgcgaaagagctcgcgctcggaaaagacgggcgccagacgtttgtcccccgccctgcgggaaagatagcgaagctgtcccgcggattccctgccccgcacccaaaagattttgtcttcgccgttttcgcaggcgtgcactacgggcgaaacgccgaatccgtcgagccgcgcgacaagcgcttcctccgtttccctgcgaaatgtgacggaatgcaagaccttgcgcgacgccgcctcgatgatgagcgctccgttgtagacaatcacgggaagggtgtgtcgaagccccctgacggcgctctccgccgacgccaaagaccgagccgtggcgtacgtgaaggacagcccctgacggataagctcgttcaaaacgccaagactgtactcgggaatgcgctcgccgcgggtgattaaggtgccgtccaggtcggatacgtaaagtgttttcatgggtcacctcttttcggctgcggcagaaagatgccgacggattccccgcccttttctgccttttttattataccatacatttcttctcttttgaaaatgaattgccaatatttgccctcccgctttttttgagttcgtttttaacattttatgaaagtttcgatacatgggacaaacaggaaaattttttggcaaaaatttaaaaaaaagcgcgaaaattatttgacaattatttcgattagtgctattatatacaagcgttgttgatacagcaccgaatacaactatgcgggtgtagttcaatggtagaattccagccttccaagctggttgcgtgggtc

SEQ ID NO: 370 - DNA, 32759 bp, Unknown
  16S sequences of unknown bacteria
aattttgatgacggaacgatactctcttttaagttttaagtatgaatggttccttctgtctgccttttatcctctgatgcctgctccccgtctctcttctttggttggaatcgccagcacaaaaatcgttgccaggatcagcacaaatccgagcagatccatcggtgcaaactgtaccttcatccacacgaccgacagaattgtcgccgctaccggctcgatgcaggcatacagcccggccttcacgcctccgatcagcttcacgctctgcatgtacatcgaaaatcccgccattgttccaaacacaataatataaagtacaatctcgatcatctttgcatccacaatcggcatatggttccacggctgaaatgcgagcatgagcaccattccgccaatgagcattccccatgcaagaatcatcggcgcctcatactgcttcagcagctctaccggctgcacggtgtagacaaccaccgcaaatgcagagagcagacccatgatgagcgcacgtctcgagagcaccagcgtccccggattgccatgcgtcgcgatcacaaagataccggcaagagccagaacgactgccacgatttccttcggaagcggcttccggtgcgtcgtaatgcacacaaatacaacgatcaatgctgggccgatatactgaacgaccgtcgccgtccccgcattcgaccactcgattgtctgaaagtacgcatactggcacagcataatgccagcaaaagaatagatcagaagatctatcgctgtctttttatttttccagaccgaaagtgtccttttcgcatccttggccaggaaaaacgccagcagcaaaagtcctgacacaaacagccgcaccggcaccagccaggtcgccgtcatctcctttgtctgaaacagatactgtccgcacacacctgaaagcccccagaaggctcctccgaccagcgccattgcggtaccggctgcagtgcgttttttcatgttgtccataataatagtccctcctcgtttttttgcaaatcatcccgcagtttttctgcagacgcgcagtctgactgcccttctatgtccttttcgccagcccgtcacgatatttttcagggtgtaaatacaacgcttaagtatagatgattttttatcttcgcacaatctgattttttacttttttcaaaaaatatgttgagcgttttactttaccggacgtaatcccctgtaaagcaaaaaaatactgtgaaacatcttctgtccccacagtattttatctgtcattatttattttttcttccgcccgggaagcggcagccattcgtccagcgctttcttcatatactgatcccagaaatcccattcgtggccaagatgcggtgcctcttcatagtggaatggtattccaaggcgaatcagttcgtcccgatccttccgcaccacatcccggataaaatcatcttccccgactgcaagatacagtttcggaagctctaccccatttttcagattctttctggcatgatatccaatatcaaactccgaatctgccagctttctcggatcatcaaaggcaccatacatcttcggcatccggatctggtcaaagctctccacaaaatatttgctgtccaagctgcagccaatccctccggataaatccacacaggcagcaaacagatccggacgtttcatcgccatcatcagggccgcatttccccccattgccataccgatcaaaaaattgtcttctcttcgcgcagaagatgcaaacagtgattgaaccaccaccggaagctcctctgaaaaaaaggtataatatggaattccatatgccgtatcgataaaaaagctgtcgtgtgcctgagccgtaactgtcataacctggttctgctccgcataatattccagccgtgtgtatcggtacagcaggctgtcatcatctcctcctccgtgcaggatatagactgtcggcaacttcatatccggcttataccgaaggtttccccgcttaaaaatcgaatttccttctttttccggcgtataacacgtatactgcccagacggataagtaattgtaatatccgtatgcatgcccagtacctctgagcgatagttgtatcttaaaatacccatcgtttttcccttaccctgtttatccttttagtccacttgtaacagtaccttctacgaaataccgctggccaatgaggtacagcaccagcatcggtaaaatcgaaatcagtgcgcccgcaaacgcggcaccatattctaccgtatctgttcccacaaacaaagccagtccatttgacagtgttctcacttatacatagcaatgttttgctataacatttagtaatctcattatatttattttgctaatttttgtcaatgtaaaagcttctgctttgtgttttttctccataattcacatatttttctgctttttaagcagttttaagttctcgcatttgtgatttattataatttagctatttagcttattttcttctttaatcatctatctatctattttacgggtatttgcattttcgttttagcttttttattgacatcacaatcaccgaatgctaatatgatttcatattctacttatcaaagggaggtatctgcattttgtactccaagaatcatacatttgctctcgatcagcttccgtctggatctgaccgtgatatgaaaagtgaacgtgtctcaaaacgcctgcctgatggtattacttcttccatgctataccaggacattttacgcattgcccttcctgcaacggttgagctgatgcttagctcccttgtttccatgatggatatgattatggtcggcggactgggtacatgggcgatttccgcagtcgggcttacgacccagccaaaatttattctgatgacaatgtccatgtccatcaatgtcggtgccaccgcccttgtcgcacaggcaaagggtgccggaaaacaggaaaaagcctgctcttataccaggcaggcgcttctgctgaatctgcttcttgccattcttgtttccatcacaggttttctgttttcccgcccaatggtacgttttatgggagctgcagatgagcacattttaaacgcaggcactgcctatctgcagattcagatggccagcttcttattttttacactcacaagtgtcatcacagctgttcttcgcggaattggcgattccaaaactgccatgtactacaactcaattgccaatcttgtaaatatcatcctgaattacctgctcatcggaggaaaaatgggattcccgcgacttgaagttgctggtgcctcctatgccacggcaatcagtcagatcgttgcctgcttccttgcatttttcgctatcgccaaaaaatcatgttatcttcatatcagcctgaaggattcgttttcgcctgtttcggaggatatccgtgaaatcatgcatatcggacttccggctgcgctggagcagtttatgatgcgggtcggatctatgattttttcaaaatcagttgcctcgcttggcactttggacttcgcagcccatcagatctgcatgaacatccagtcgcttaccctgatgaacggacaggtgttttccatctctgccacatcacttatgggacaaagtctcggcaaacgacgtccggatatggcgcaagcctacacaagccgctgtcggcgtgccggtatgattgtcgcaattatgcttggaatcagctttatactgtttgggcgcccactgtcttccctctatacaaatgatgaagcctgtatcgcgatctgtgtggaaattttctggatcgttgcctttatccagccatttcagtcttcccagttcattgtctccggagcgctgcgcggagccggagacacgaagtttgtcgccaagcttactttctttacggtaatgcttctccgtccgggtcttgccatcttcgccatccggtatctgcgctggggactccctggtgcatggctggccattacaaccgatcaggtactgcgggccggtatcattgccctgcgctaccgttccggaaagtggaaagaaatctgcctgactctaaatggaacccgttcttcctcttccatatagtaaaaatcaaattagctgcgttgaaagcatcttgatccactttcggctctttaaacgaaatacgcaccagaccgcttttatcacctgatccagcttcaaaaatacataaatccaaaaaacatccagatgccagtacagtccggcaagtgctccgagcggaacagatacaatccagaggaacagaacatctgctaccatcagaaaacgagtatccccaccgccccggagcacaccctttgtcattactccgttgaccgactgaaatacaacaatcagtgcaatcgcatccataagcttccatgcaatctgctttgtttccggtgtaatattataaagcccgattacataagaacggatcagcaaaataatccctgctccggctgcccctacaatcgctccgagccatagaaaggtccatgcctgctcctgtgctctttcctgctctccgcgtccaagtgtatgtccggtgataatgcaccctgcatgacagattccctgaatcagaaccgtactgatctgctgaatcaccgccgtaattgaatttgcagatacaaatccacttccgatccgtcccatgaccatcgccactgctgtatttccaagcgccagcagtgtgtcggaaataaccaccggaagcgccactcttatatattctctcagcagcgaagcgcactctccaaacagatcctttatccggtacccgattttctggtcttttccaaaaaaatatccacatataaatacaaactcaaaaattcttgccagcaaagtaccaagtgcagcaccctgtactcccattttcggcgcacccaattctccaaaaataaaaatatagttaaaaaatatattgacaaaaaaagcgccggcagaacttacaagcggaatctgaacctgtcctgtgcttctgagaatcagcgtagacgtcagtgtaagcccatgaagcaaatagcacggtaccatccaccgataataaagtatcccctgcgcaattacctctgcctcctccgtataaatcctcatcaaccgatccggtataagcagcgtcggtgccataaatacaagcagtgcaagtccgatacagatccgaaacatgatcgtcactacctttttcagtgatgtgatgtccttcattccccagaaccttgctgtcaatacactggcgcccattccgattcccatacagccgatctgataaataccgataaactgattggcaagcgctactgctgacaatgccgtctcacccagcgcaccgaccataatattgtccatcatactcacgccaatcgtaatcactgactgaagcgagatcggaatggctatacaggccgcctgtttataaaattccttttccttcacaaatccctgcatcattttcctcctgttctctatttttcggctaaatgctatttcgttttagctcatgtttaaaaagaaaactcccatctcaggagttttcttcctgtcagtcggcaacccctgcacaactgtcccgaaatgcatattctgcctgcattatcctagccattggcagggtgatcgcattgttcattaccatctctaacagctctgccgaggcttcggccaccttttctaatgacaggtaaaccgcactgatcgacggtgaaaaatacgcaaatgcgtcattgtctccatatacaatcaattccatgtcctccggaatacgaacctctgcctccctgcacgcaattacaattcccagggcctgctcatttgaggcagaaaaaattgctgtcggacgctcctcctgccgcagaatctcctgcatcgctgcgtatcctgccccacaattgcgctcctgtttctcgatatgccactgcggctttatccggagtccttccctttcgcatgcttccaggaatcccatcatccgcatactgccgctacgccccttcctggaacagccgatcagaccgacctttttatgcccatggttagagaaaagcctggctatactgccgcccactgcataatcgtctccgtaaatacagtgatatcgttcctcacttcgaaacagcaccagaatcggaaggtcaaactgcgtattattcaggaattctgaatcctgatccgatattccgcaaataatcacagcactgaaccgcagcggcgtcagaagtgcctgcatttcattcagtttatcattttcaaacatctgcacgtaaaattccattttgcagtcatgttttttctgatattcatgtagcccgcgaaagaattgccccatcattaaatcagaatatgcactgttccacagaactgcaatcacccttcccgccttctcgtgcgccgcgcttctgagtcttcttgcataaatgtttggctgatagttcatttcctttgccatatcccgtacccgcttctgcgtttcctttgaaatacgcatcacgtctccgcggccattcagaacaatggatacggttccgactgagaccccaagcgcttccgcgatctgcctgatctgtacacttccctgccttttcgctgccatatttgtctctccgtttctcacttcttttccattccggccagtcggaaggtttcaccaaattcatattttaacggaatcagtttactgattggcatactgatcttgttgttcatcaccgtcattaaaatatcaattgcatttcttccggtatccaccatagaattaccaatcatcgtaacagacggggaaatatgccgcagcattggatttaatccgtaggctacaatcgacatctcctccggaattcttatatcggaacccttaaactgcatcatcgccccgagcgccagagaatccagcagaataaagagtccttccggtcgctctttcatttcggaaaaagactttgcgcattcatatcccgtctccatgtccatgctttttccctttacgatccactcgtcccgcaccgtaagtccgctcgtcctgcattcatttaaaaagccaagctcccgcagtccgattccgatgcttccggcattcgcgctcagaattccggccgtccgaaatcctctctttgcaaacatccgtgcacactctgcaccgatctcataagcatccgcacagacactgctgaatttgttgctgggtcggtttacaacaaccgggacatcaaattcctgctcgttcaggtattccatatctgcgcttgaaacgccacagatcaggattccactgtagcgcttctgattcatatgatctcttaacgcagaaagctcgccatttcggaacattttcactacaaactccacatcataatggttctcttctgatgctttaaataatccggaaaaatagcggctcatagtatcttcgccaaagttctcattccagaatactccgactgttttttctgcctgatcctctgctatcgtccgcggatgccgcgcattcccggccgggcggtagctcatctcttttgcagcttccaaaacccttctctgagattctttcgaaatccgcatttcatctccgcgtccgttcaagacaatggatacggtactcggggataaccccacccgttctgcaatttgttttatctgtactgtcgctgttcttgccatctgccacactccatctctttcttatcttagttctgacaaatacaagataattttatcacatccacaacaaaagctcaatccactcctttttagcataagcaggggggagtgacgctgcactccccccgcttattttatagctttctttcaattgtgctctaaagcgtctgttcggacttaatatccatactcttcgttgataatacgttctgcttccttctggcagtcttccagaacggtggatgtgtctccatcaaatgtcatggtattaaaaaactgtgtcaaaggtccgctcaaaatcggtgcccatgcgcggaagttaccaggtgctacagaatccatgcaatactccggatctgtaacagtaattgccttcatatttgcattattctgatatccttcgctgtctgctaccggaatgtagtaggtcgggtatccaattcggtcagaccatgcatagaccgcggtatcctcgatcgcttcgtcatcatttccagtatgccaccaggagatgaaacgctctgctgcaagtgcttcttcatcgcttgcagagcttgtcaccataaaacactgtgtattcgacggtgcctgtttcccgccttccggtgtctcaatcaatgttgtaacaccataattgatgccatatgtattcagatccgccatcagccatgcgccggtgatatacaagccaagctgattggatacaaacatggtgtccagatcagactccgtcggattcgaaccattatcaaactgtgtcttgaaccagcttacgaagtcgatatacccctgattgttttcaaagtttgcatgccactttccatcctgctccgtgacttccagaccaccaaacatctgcatgatgcaggcatctgctccgacattggtgtagctcagtccggaaccatatacgtggctgtccgggtccgtgagcttctgtgccatctctgtccactcatcataggttgccggtggtgtctccggatccagccctgccttttcaaacagatctttgttccagtacatgacataggaactgatctggaacggtacaccatacagaccgtcatctgtcgacagcgaatccagataagaagaaacgaagtcctctttcttaatatcagtattatcccatatctcatcgagctttctgagctttccatcataggtatacttatctgccgcatttccgagaatcagtgccggagctgcatccgctgccattgctgtcgtaattttatcccggaactcagaggacatatccatttccactgtaatattccacttattcgtctcattaaatttgtccacgtactccatcagaacctgtccgtctgatccggtccagccattccaaaactgaatcgtaatcggatcatagctctcctcatctgcctgaaccgcaaaacctccgagcatgctcagtaccatcgtgcctgcaagaaccgttgccattccccgtcttttcatttgcgtacctccctgtacattttatttttccgttctctgcttctgccattgattcgtgcaatccccttgtccttatctggcagaagtttttatagctgtatcatagcacttttagctaataaagtcaattatatttagcaattattttttgctaaatttagcccttcagaccacttgttgccgttccttctacaaaataccgctgcccgaaaatgtacagcaccagcatcggacagattgaaataaatgcacctgcaaacgcagttccatactgaaggctggaatcgacaaacatggccagaccattggtcagcgtccgcatgctcgtattgcttgtcacgatcagcggccacatcagatcattccatgcaccgttgattccaagtacaataaccgtcacaacagtcggctttacaagcggaagcatgattttccagaaaataccaaattccgaaagaccgtcaatacgggcggcctcttcaagctccttcggaagccccgcaaatgatgcgcgcgtcataaataccgtcatcgccgctccgaggttcgggataatcagacccgcaaaattatcatacatgcccatcttgtacacttcaaggaacaacggcaccatgattacctgaaacggaatcatcatcgtggcaagcaccatgataaacaacacatgcttccctttaaagtccagccttgcgaacgcatagcccgcaagagagttcaaaaatactcccggaatcgtagagccaaggcagtaaagcagagagtttttcacatagccccatatcttgattcttttcgctatgtcaataaagttctgaagggtcagctgctctgcaaaaaatttaggcggatactgcatcagctctgtctgaggacggaaggcgcaaatgccaatccacacaaccggtatcaaaattaccagcgccaatgcggtaagaataattgtaatgatcgtatagctgatagcagttttcattttacgctgcatgatatttcccccttacgcttcatctttaaaaagttttgcataaaaaatcactgtgatcactaatatgattgcaaataaaaacatggaaaccgccgaaccatagcccatccggttatttgaaaaagcttttacataagtatagtaaaccagactttccgtcgtgtaattcggcccgccctctgttgttgtaaatacaagatcaaatacctgtaaggagccaataaaccgcgtaatcaatacaaacgaaaatgtatctttgatcacaggaagggtaatcgcaaaaaactgtctcggcctgctgcagccatccagatccgccgactcatataactcatgcggcacattctgcatggcagatacaaaaataaccgtactgattccaaatgaccgccaaaccgacataaatacgatgacataaaatgtaattttcgggtcattcagaaaatttactcctttaattccaatcagctcaaaccagtaggtcataatcccgacatttgaatgcaggaacatccgccacataattgccactgccgttgccgaacatacaatcggcaggaaataaaccgcacggaaaatcttattgcgcgcagtatttcttgtaagaagtgccgccaacaccagtccgaccaccatctgaaccgttacttctatcagagtaaaccggatcgtgacccatagactgttccagagacgtttatccgcaaatgcctctatatagttctgaaatcccacaaatccttttccgacaaggaacatatccatatcaaaaaaactgcatacaaaagctgccactgtcggaatcaatcggaaaatcaaaagcagtaaaacaaccggcattacaaagagatatgccacatgtgacggctttgcccaaaaagctttccactgtttcataatacgtttttctcccttctaattctccagacttacttttacagttccatccttttcccgtcggaactgtttcatataattccaggacagctgtgcatcctttggtgccacctcatgacctttgtgatgcatgagtgcaaagttataataattccgtccttctgcattaaagaaatgctgaaccgtataataatgatccgggtgctgtatatccgggtaaagcgtttcactcgtatctccgtcaactccgtgctccggaagaagcggatcctccagctctctggttgactttacctctatgcggttaaactgtttccagaaatcatactgatgctgctgcgagcatccacggcacaccggagaagatgcctccctggtcccgtaggtataccacaccggcatgtcaatctgtctctcctgctgtttttcaagtgcgatccgcatcggctcgacggtctgataatcaacttccactcttccatagcgtacccccggccagttcgaatcaatatgtccgagtgctgccaccagttccggataaatcattgccacagtctgtgccattcctgccccgtttgaaaaaccagaaagatagactctcgacggatcaaccggataatgcttcagcatatacagaatcagttccttacaataagccagatcatccgcctgatccttcagcaactccatattccagcctgcccggttcgtcgaccacggataaacggtaataaaatgttccttttctccgatttcatgaaaccggctcatttccgccgcttcgctcgggttatccgaacctccatgataaaaaaagacaaccgggacatttttctgcccgttacgtaccgctgttgggacatgcaccagccaggtatgtggagttccatcgatttctgtattatctacgaaccattcaaagcccgcatccgtcagatcggttcgatctgcacagtcgccatatacagaggtattcagccttctcgttttggaaaacagctctttccagatctgttccagaatttccgtattgagttctgccttttcgtttttcagtacgaccctgcatgccgggtttatggcattccagtattcaccttgtgtatctgttctgtccgaattttcaacaccatttgtcttacatacatagtgcttcaagcgctccccgcacccgtacagccacgccggaaccggagagtcgaccgccttctcaatggtcttcttatccacttctccgccaatcaataccatggccgccatattctgcggacgcaatgccatcattgccgccagtatggaagcgcctgagtcgattccgatataataatgtgtatcattcatcggatgccaggtactctgcataaattcataggtcggaatccccttctcatttaccggcaccggttcatcgtccttccggttcatcgcttcctgaaaggctgcgatcgttcggatatctgcttcctgatagccctcctgattccatcctcgttcttccggattcggaaaacacagaatcagatgtttctcctgcgccagttgctccagccccgccctaagaagtcgctgtaccgactcttctgaagcctccggccttaccacagtaacagaacataccttaatctcagaccgattcggcatattcgggtagaacaaccacgcacttcgtttctccttttttaattcctttaaaaataatggcatcctctttcctcttttcttcttatttttctgtttttgtacaactctcccggtattccagctccagctgaaatattctggatatcggtatccactctcctgtcgtcagcattgtattcagaagctgaacgcaggcactgctcatttcctcaatcggaagacgaagcgttgtcaatgacggagttacccactcattccactcatttccaccgtaggataaaatactgatctgctcgggaactgcaactttcttttcttgcagttttctcataattccaagtgcaattgcatcattcgttgtaaacagcgcctccggaagctccggctgagccagtagctgttccgccgcctcgctccctccaccaacactcataaagcagtctattttctgttcctcggccacttttattccgaacttccggcatccgtccagatatccaagctttcgcatggcacttgatttgtttggatttaaggaagaaaccacaccggcactggtaatccctttttcagaaaagaccctggcagcctgcatccctgcgccgtaattgtccacataaacagatgcaaatttatcgctcgcccgattatagacaacaaccggtatatccagctcctgcttttccaggtcttccatgtctttatcggacagggcaaatatcaccgcaccgctgcaaaactcagaactgaggtatgcatacttttcactcagtcgatcataagtaaacgggcataaaaccagatcataagcgagtccctcatcctgtatctctttttctgcaccaatcataatcggattagccggtatcatgactttctcataaaccgacagaaaaatcgcgattatctttttccctgccatctgctttcgcagtgggtacccaagtttctttgctgtatccagaatcagtttttgtgtctctgccgaaatccgcatttcatcgcctcttccattcaatacaagtgacacggtaccaagcgatacggaaagctgttctgcaatctgcttcatactaaccttttttctttctttcacactacacctcccccattctgtctttagcacatttcagcatctgttttttcattatgcttctctattttattgactttttgctaaaataattatatcatattattaaacattttgctactattttttagctaaaaggaggaaaatatgagctattgcaaaaacaaccctgcgcttatttcgcacatgatgttttttgatcccccgtttcgtatgcctgcaatgggaaatttttttgagaacggacaggattacgaaaacatgtgctaccatgatgtggctcccgcagttgcacttccggctcccggtaccgtcgtcttacgtttctttgcgccggatgcaacgtgcgtggaggtagccggaatcggaggtggcatgggaaatacacaccatgtcatgaagcgttccacagaagaggacggctggtgggaaatcaccttgcatgacattcctgaaggcttccattaccatgaatactttgttgacggcaaccgttgtctcaatccacatgctccgatcggctatggttgcttccgaccgatcaattattttgaaatgcccggtgaagactcttctttctactatttaaacgacgttcctcacggtgatatccgtatggaacaatatcgttccccggtcaccggccgtatcaaagcctgctgggtatacaccccgccgggttatgaacacgcacacactgaatcatatccggtcttatatcttcagcacggagtaggagaaaatgagaccggatggatctggcagggcaaagcaaacctgattctggataatttaattgcagaaaataaatgcagaccgattctgcttgtcatgaatgccggatatgcatttctcccggatgaggatccgaccttcttccctggcgactatgaaacagaactaattcatggctgtatcccatttattgaacagaaataccgtgttgccgccggacggaaaaatcgtgccatcgccggcctttcactcggctctgtgcaatcttttgccattggtatgggacatcgggatcttttttcccgcattggcgtcttcagcggcggctttcccatctcacgtccggaatatgactataccgctttacttcaaaacccggaagagctcaacgcaagtctggatctgctgttcttctcaaatggcgatcaggaaccaatgtgcacttccgcacttgcatcgatccactccctgcaggaaaagggtgcccatgttctgtccggcgccgcatatccaggctatcatgtatgggacgtatggcgttacagcctgcgcgattttgtaaagcaggcatttggaacggaggaaatgatatgaatatggaaaaatatcttgcaaatcagtcactgccctcatatgcactaaattttgaccccacacagaaggatctgatccgtatcacagatccagacggacatccgatgggcaaatacattccggttccctccggcgccagcgttgatcgcaacggaaccgtacactttgtcttccgtgctcccggcgcgcattccgtagctgtgcagggtctcggaggcgccttttctgaacgaattcctctttatcgacaagaaaatggcgactggaccggcactgcagaaggtcttccggcaggttttcattatcatgattatatcgtcgatggcacacgcatgtgcaatgacctcgctccaatcggctacggcgatttccgcgctatcaattattttgaaattccggatgcggactctggtttttatcttctgcaggacgtcccacacggcactgtccggatggattattacaacagtaccgtgaccgctcgataccgctcctgctttgtctatacgcctcctggctatgaaacacatccggaaaaacattatcctgttctgtatctgcagcacggaggcggtgaaaccgagaccggatggatctggcagggcaaggtcaactacattatggataatctgattgccgccggtcagtgtcaggaaatgattcttgtcatgaatgatggctatgcatttttgccggacgcaagcgagcatccggccagaggagccattgatcttgtactggcgaaagactgcattccgttcattgaccaaaaataccgtactctcccggaccgcagaacccgcgccgttgccggactttccatgggcggatttcaggcgcaggctgccgcccttcactttccagaactctttgcttctgccggtctgttcagctgttatttcatcatcaaagatcactatgatgattatacagaactgttcagcgatgccaggacgttcaacgaactgttcgatctgttcttcttctcaaccggaacggaggagtcaaacttttatgagcaaaatctccgtacggttcagcacctgaaggagctcggcatagacattacttattttgagacaccaggctatcatgactggcaggtatggcggcacagcttccgtgcctttgttacaaagctgtttcgtccgttttcatcatgcaattcatttgagtaaaaagaaagcagacaggacattttttccagtgtcctgcctgcttctttttccatttagaattcagatattctgatattccattttgcaatccattcgctcatcagagcattccaaacgcgatatctcgtactctgtgatgcacatactgctccatattcggcacactgttgtgcatatatacaacgctcatcctctctgtgggatcaattgccacataggttcccatatagcctgtccagccaaactcaccaacggatgtgtttcccgttgcccggcggcagtccagccttgtcctcacgccaaggccatagccatagccatcaagatacggtgccgcaaaatccttcagctgctgatcattcaactgattcgtcctcatcaggtcgattgtctttcttccgatcagctgctctcccttccatacgccgccgcaggccatcatctgtgaaaatctcagataatccggaatcgtagaaaacagtcctgctccaccggcttcatactttgcattttcttcaaaccgttcatcaaacatggaataagcaatcggcgtcctttttccgtcctccagctgatacggcgtcaccatgcgctcccggatgtctccaaaataatgatatccggtgttcttcatttccagcggatcgaacagtgcttccttcaaaaactgtccgacgctttttcccgataccgcttcaatcaatccggctaccagttcatgtccgaaaccatacagccagtgctcaccaggatcaaacatcaccggaacggatgccattgcccggatatcatctctcagtgtataatccccaattgatgccgccagctgtgcacggctcttctccatcatctgatgcgtatattccggcccgccatagccgattcccattgccatggaaaagcagtcccgcacctcgatcggccgtttcgcctcccgaaggcgaattgccccatcctcctgcgtttctgcaaccatcgtatgcttccattccggaaaatactcatagatcggatcattcagtaaaaactttcctctctcataaagcatcattgctcctgtgcatacaagaaccttggtcgcagaatactgtcggtaaacactgtcagctgttatttttttctttttttccaaatcggcataaccaaaataattttcatataaaagctctccgtcccttgctaccgcacagccacagccggccggtccggtctttaccagatctgataaaaatatatccaaatattcttttcctgccattttcttctcctttcatcgaaccgcatgaagcattgcccagtccataaagcccgaaatgagagtatcccataccttccactcatgcttccccggaatttccaggctgtgaatttccagcccctgttttcgacaatacgccagatagcgcacagaatctgcaaagctaaaatcttctgttcctattccggaatataatgcaggcagatccgtcttttcccggacggcttgatctacccacgtctttgaatcactgacactgcccgcaagcgcatccaggcttccccagtttcggatcaccagcggattatttccattctcatcgtctgcaaatgcaaatccgccctttttgaaaacctctgtcacaaaggaaatacccgacaaattcgctgccgctccaaaaaactgcggtgcggcaaatgcccacttccaggctccgtatccccccatagacaaccctgccacaaaccgcctgccacgctctttattcaccggaaacagcgcttccaccagagccggtatctcttttgtcaaatatgtaaaatatggatacccatatttcatatccgcataaaagcaagtcccatccacctccggcatgatcactgccatctgcctttcatccgcatagcgttcaacagacgtgtaacgcagccagtcctccgcattaccgccgcccccatgcagaagatataaggtggcatccgggagctttccggcatgtgcctgttccggcagtaccatgcagagccttatctgttttccaagcagcttagaataaaattcatatcgaaggactcccatctgttactcctcctttcttatcgatccatctgttcctttataaatgaaaatacttgcggaatatagagattccagctgttccagtcatgaactcccggtgcctccacccattttaccggaactccctttgctgtggcatactgataaaattctttatttccattataagtgaagtcctctgttccctgtgccatcataaatgccggaaggatctttttctgttccagagcctgatccagaagccagtagcagtcctcctcgcttccaagcagctcttccggatgctcgtaatgaccaaaaatcttttcaaattctcttccaaaccattcgcgttcatctgtcctgtgatgcacatactggtttgtcagctgtactgccgatgcgatcggacaggctgccagaaaacgttccggataacgcagtgcaatttttagcgttccgaagcctcccatcgacattcctgcaataaaattcttctcccgctccctggaaaatggaaaacgctgataaagatattccggaagctcctgcgtcatatagtcaaaccaggccggtccgaacgccatattggaatagctgccgttctgggcatccggcatgatgacggcaatcttgtattgatctgccaaaatctgaactgtcgtgcagtcatgccagtctgcataattatcactgcccccatgcagaagccacagcaccggcagcttttccttgttctcatagtacactttatagtcaaattctttcccccattcagtcggaattaaaatccgcactgcggtggaaaatccaagaagctttgattgaaaccgaagactgagcactgccattaccgaacacctcccttccaaagcccgagccagtcaaaaaatggctcaatatatctgtcccatattgcaaaattatgttccccgtgatcctccagccaggtgacgtccagccccatgccgctcaatcgctcacaggctgccttgcaaagtccgtacccaaagtcctctgttccgcataccatccagcattccggaagaagctttcctgctttctgctgttttgctgccagccaaaacagatcatcctttgtatgctcgattgcctccggcgaaccaaaggagttcgccagataatgtccaaaatccggctttccttttccgatatgtttgtgcagcaccgacacaatgtcgatcgagcctgcaaagccgcctgcctttgcaaactgttccgggcaggtcagcgcccatttgtaagcaatatacccgcccattgatgcgcctgcaacgaaatttttttcctttttctgtgacagacacgggaacatccagtgcagctccggccacagctcccttgtaaccatggaaaaatagtctgcaccatatttcatatccatgccatagctgtgtagcatcgtcggcataatgactgccagcccccgctcattcgcaaaccgctcaacagatgaattccgaacccattcggagcagtcttgatgtgctccgtggaacagccagaggactggatagccgtccttgggcggcttctcatccggaaggatcatccacacctcctcatggctgttcaaatagccagatcgcagatccaattctataaatgccattttaattcctgcctttctcttttttataaacatccatataccacattacgcatgcgatggtggtgatacagttcttcatttggtatcatattgtgcatataggcaatggaaattcccgttatcgggtctgcttctacccacgttccggtaccaccggtccacccaaatgcccccggatgaccattgtgaaaacctccggcctgccttttcaacacccggaatccaagaccatagccatagcctgcaagatatggattttcaaaatctctgcgtgtactctcatcaagctgatccgatgtgagcatccggacagttccttctgcaagataccggactccatcataccttcccccgtttgcgagcatgctcataaatatggaaaaatccccggcgctggtcagcagctgtactcttgcgcctgccggtactgcgtccggctccagcgaagcatccgcttcctttcccagcgcatgcagtattccatgttccttccggtacatcgtcacgagatgcttcctgatttttggagtcaggcacgtgccggtatccttcagcccaagtggttcgatcagccgttcggaaaagctgactctcagcggctttccggtgatttcttccacaattgccccgatgatctcacttccaaatccgtacagccagtgtgtacccggttcaaaatataccggaacctccgccatctgccgaacctcctcccgcaacgtcggagttccgtttttcagaagctgctccatcttctcactcatgcccttcacagtcggatctgccgcattcggatccggaaacatgcaatacggcaggccgcacatcatagctgccgcatcccggactgtgatcggatgctccaatggcacaagctcaatcgttccgttttccctgcgctgccatctgactgtgtgcctccactccggcagatattcactgaccggatcggaaaaaaggaactttccctcctcatacaacattcccataatcgcataggtaaacagcttggtcgtggaggcctgtcggaagacactctcccgatccactgctgttttctgttcgatatctgcccagccggcatagctttcatgtaaaatttcgttcccttttcgaatgacacacgcacatcctggtaatgtttttcctgcaaacccggtcagaagatcatcaagctttgtaaaatcccccatattttcctctttctgcagcctttactgctgccgctttgctgtacagtgttttatcgtataacggttatctgaaacagtcagtcgatccttatagaaagtcatctccagaatatctccctttttcttcattacaatccggtcatcgaaccatccattcagccattttgtcgtaatctgcaaggtatcttcatccagatatctggcataagaacaattccatcctatctccggaagcacattatctgtgtaaaccggatgatgctttccgtcaaaatatgcttcaaagaccgcataaccgtccactgtgaatacgcacttctgctcatccattttcagtgtaaaatccgtaaatgcctgttttttatcagcgtgataaaagcaggtgaagaagttgtatccgcccggtgcaacgctgatccaaggatctccgtcccctgatacaacgacatagcttccggaaaaacactctgtcggtacatacagcgtattcgcttcctgctccggcaccttcagattccgctcaaactccagaagtgctgcatctgcctggggattctccggaagtggctcatttcgcatctcattcagcaagtactcatacaggacatccagcgtaatctgtgggccttccggcatcacagctccctcgtgaattgctactgcgattttccgttccggccagatcaggccatactgtccctgtcccccgtcgaaacggtaaacgcccggaatcgcactgttccagagctgaaatccataaccgtgccgataatcctctgtaccgccatttggctctgtcgaaatctgacagctcatagccatgtgcatccagtcctccgcaatgatctgctctccattccagtttccgtaattcataaataatattgccaaacggagattatcttccgtcacagacgctgtgccgggttctgcatcatatccgtccggaaatctgaaaatctgaaagcgttccccgtctattcctattttatcaaataagaactctttcaggaactccctcatccctttaccggtctttttcttcacgatagcaccaagcagacaggaaccggaggaattgtaaaggaattccgttcccggttctgcgactaccggctctgccaggtaatttttcagccattcggcatccatgatcggatgacgcgccatgccattggtcatcgtaaggacatgatagacggtcagcttcttcatattttcatctggttcgattccatactgcctcagctcatctgcaaataagtccaccacccgctcttcgagcttcagctttctttgcgtatataaaattccaatcgctgctgccgtatagcttttcccaagcgaatggttgcagtgaatccgctccggaccatacggtgtccaccagccttctgcaaaaaccttcccatcccgcgccgccataaacccatgcatctgcgtctcatcatgcatcagcttctggatacactccttaactttttctcctggaattccagcctgttcaggtgttattctttctaattccatattcctcctccatttagctatttcgttttagctccatctgtaatacttgtataaattatattactcagcatttttattgtcaataacgcttttctttttttagcatttttagcttatatattgacatatcttttcgcttatattatgatttaaattagcaaaataattagcgccagattttcatcagcgcggaaatggagattagtctatgaaaaaaccaaaaaaacttatgaacgccggctttctgattctaattgcggtcagtctgatcaccgcgctcgggttcaacatgattaccaccctgatttcatcctatgctgtctcgtttggcacagaactgaccgccgtcggattgatatccggaatcttttcgattactgcgctgtttttccgaccggtaggaggctttctctcggattttctcaataaaaagcggatctgcgtttatactacctttttaatcgcgcttgtcatcgttttctatgctttatctccgactgtaagtatccttcttgtcatgcgcgtgcttcacggcgcactgtttggcattaatggaaccgccaatatggcgcttgctacggaatttattccggatgaccacatgggagaaggcctcggctactatgggctcggtcaggtactggcacaaatcgtaggaccaaccatcgggattgcgatccgggatgccttcggatacagagctctgttctttatcatagcggcttctacgctgctcgcagccgtcgttttgcagaccgcttttcattatgaaacagttgtcggccattcttcggaaggcagacattctctgtcatttagcagcctgattgcaaaggaatgtattttctattcactgatcgccggactcttctccatgggcaacggaatcgtaaattccttccttgtcctcctcggcgaatccagtaagattgctcagatttccctgttcttttctgtaaacgcaatcgtccttttcgtcctgcgtctccttgtcgggaaagtaatcgaccgggccaatctgctgtttattgtaaatctttcgttgcttgccggtgcaggctccatgattctcatcggtaaatccggcattcttgtaccaatcctcattgcagcggctataaaagccttcggcaatgtcggcgggcaaatctcccttcagtctgcctgtgtcaaacgggtggatgccgcaagaattggtgtcgctacaagcacctattatattggtgcggatatcggacagggacttggaccgatctggggcggaaaagtcgcagagcaattcggatatgagggcgtcttcttctgcatggcaggattttttctcctgggagttatctgctttactgcttatcagcttcatctcaaccgaaagactgcttctgaaacagtcattcaataatattttttcatttcataaggaggtattactatgtcatctgtaaaagatcttgatctgctgctgcaaagctttgtggataaaggcatcccgggctgtgcgctgaaggtcgtccaaaatggcactaccctgtacgaaggatactttggccattcggatacttccgggactcccctcacggataaatccgtatttcggctcgcatccatgtctaaaatcccactgtataccgctatgatgatgctgtatgagcgcggtgcctttcttctgtcagatcccgtcagcacattttttccggaatgggccacaagcaaaaaatacgtccgtcatgcaaacggctatatcgatgtcgttccgacggaacatccggtcacaatccgcgataccctcaccatgaaatgcggacttccttactgtaattccgacgccccgaccgcagaccctacccttcagggcatgcagaactgtatgaaacccctctgggaaaaagggcactatacccttcgggaacagatccgggcaatggctgatgctccacttgccttcgagcctggctctcactggctttatggcttctccagcgagctggccgccggaattatcgaagccgtatgtgaaaaaccggtaaatgaggcactgcgggatatgatttttgatcctctggaaatgaacgataccggagatatctttttcggggatatttctgatcgtatggtaaagctttatgtgaaaaaagaggatggttctcttggaaacgggcctaccttctttgatgaaaagcatcttagcggcgatgagcatgaagctggatggcgcagacttttctcaacagtagatgactattccaagctgatgcagctgctctcctgcggtggctcctgtaagggcagacaattgatcggcagtcagacgattgatctgatgcgtgccaacagccttactccacagcagcagattgattttgaagatgcctataatgccggatacggctatggctgcggtgtccgcactgtcatcgcaccggaacgcggaaatatgaacagctccattggtgccttcggctggaccggtgcttttggcacctggtgcgaggcagatccatccgaaaagctttcaatcgtatatatgcacaatttgattccaaatgatgagctttcctgccatcaccgcgtacgtactgccgcatatggactgatctagagattgaatcaggcaagctacaagtgaattacaaatatgtgcctgacatggcaaaaaaggaggttttattatgtctgattttaaagcgctggaccggcttctgcaaggatatgtagacaacggtcttcccggctgcagctgtatgattgcccgcagaggggaaattttatatgaaaattactttggatattctgatgtggaacatcagattccactctcagcccagaatgtctttcgtcaggcatccctgaccaaaatcgcgatgtataccgttggaatgatgctatatgaacagggaaaatttttaatgaccgatccactgtatgaatattttccggaatttcggcattccactaaaatcattcagaaatccaacggaacactcgaagaggtgcctaccgagcacccgatcacaataaaaaatgtcttcaatatgacaagcggtcttccctatgagctgattatcggcggggttccggttccgcatcctacttcgcttgccatggcaaaggctatgaagccgctccgggaaaaggggtatttcacgcttcgcgagcagattcgggccgcagcatctgccccgctcgcatttgaacccggaacccgttttctctatggcttctccagcgaacttatggccggactgatcgaggttctgtctggaaagcctgccgaaatggtaatcaaggaaatgctgtttgagccacttgacatggaaagctccgcaaacttcctgtttggtgatcttgagtccagactcgtaaaggattattatctccagcctgggaaacagctcggcgaagcagatgcactgtacatccccactgctgagcatgaagcaaagtttgtcgggaaactcggcactgttcccggttttgccagggtcattacaaactgccgcgattacacaaagctgatgcagatgctggcaaacggcggaatccataacggcaggcggatcatcgggcgcaagaccatcgatctgattcgttcgaacaccctgaccccgacgatgattgaagaggacttctcaaatacatatctggccgggtatggctatggttatggaatgcgaacactcatgaaccgacatgttggacagaacaatggaaacattggacagttcggctggaccggcggctccggcacctgggcggaggcagacccatctaccggtgtctccgtcgtatacatgcacaacttgcagcccaaccttgaagaatatcatcacctgcgcatgcgcgcgactgcgtttggctgtctgaacaattaggcttcttaatcctaaatcaaatcgagtaggaggcggtgactaaccgccgtcctctcacagcgccgtacgtaccgctcggtatacggcgttttctttcattttaggatcgcttttctttattatttctatgattaccaaagtccgcaatccctgccgccagaagttcttcctcataacgtttttcttcgatcaccagccttttaccatccccgcaaacataatacggacttccagattcgtcaggcgaagctcataaagctgacgccatccgccaaatccgcgctcttctgtccaatacttttttatcgtcagatacccactcgccagaagcaggctccagactgcgctctcatctaaatccagctgatcatatacaatctgctcatccagttccgttatgatactctcccctgcaagcaactggtaaagcggacattcgcaatccgcttcgctacttgctcatgaacgcagtcgcttcgcgatctgtcagtgggagctttcaacccccactgacataagcatcccccctcacccgccgcttagtgctccgcgcactcgaagcggtggaatgcttatctgcgttcaaatgcttccttatctgtatatccttttttcttggtctcttactgtttcccgtctcccctcaccaccggattcgtccagaacgcgatcaccagctctaccgccataaagcaccagatgaccggctcgcagaaaacgacggcaaggtactggaagcgcgggacgagaaggctgacgaagaggatttttccaatcagctcgatgacactggaaaaaagcggcagcaccttgcttccgattgcctgcagcgctgtccgagtgtcgttaatcaggccgagtacaaaaaaggcaggagccgctaccttcagatacagcgaaccgttttcgataatgaccggctcactggaaccggagatgagccggagcatcgccggggcaaaggcgtaaacaacgaccgtgatcagcaccgtcacaatcgcattgtacaaataagctgccttcatagcctggcggatccggtcatgtttgcctgctccgaagttctgtgagacgaaggtattcacggatgcgatcatcgccgacagcggcatcatcgaaaaggaacagagcttccgggccgccgtgtgtccggcaatcacgaggtagccaaggtcattgatcccggtctgcaaaatcgccgtgcctgcgtagacgaggcagttcatcagtcccatcgagccgccctgcgtcagcatctccgcatacatcttcccgtctgggcgaaaatgacgttttgccgggatcagcatctggaccgaatgcaggatatacaggacacacagcgctaccgagatcgcctgtgccagcaccgtggcaaccgcagctccacggactcccataccaagcccggcgataaaccaaagatccagaacaatattgagcactgaagaaatgatcaggaaaatgagtggcatcacactgtctccgactgcacgcaaaataccggagcaaaggttatatgcaaaagttacacccataaacagcatgatgcaggagctgtactcgtaagcctccggcagaatatcttcgggtgtgttgagcagcttcagaaacggcatcaggccgattctggtcatcagcgtcaggatcaaagtcagcaccactccgatcacgagcgcacccgacactgattttttcaaagtctcctcatcctttgatccatagctgcgcgcggtcacaatcgacagaccgctcccgatgccaagggcaaaccccatcagcagatcataggccggtgtcgccgccccaattgccgccagtgcagtctccccgagtgtatgtcctacaatgaccgtgtccattgtattataaagctgctgaaaaatgctggaaaacagcaccggtatcgcaaaccgtaccatcgtggaaaagatcgggccgtccaacatgtttacttctgtatgtttttgtttgtacatttccaattgctctctttacatcttttctctgaatgttccattctattgtacacatttttttccagatgcgtccactgccagcttactcctgtagagccttccgtatctgcaccgccatatacggtctccccggcagctctatgcggaattttcctttgtagatgccgcgatcctctgccgtcatgttccacgtatcgatgacgcgcaccgtaaagctcgtatcgtcatcaaaatagaaatcgcggaaggatgggcgcatgaagctgtagtagtacagataatagctctttactgcgccccatttttcactctccggcactgcgcatacctcgtcccagccgcatctgtcatacggcgccagtccgatgcccggtgtctcctccatgatctgatgcagcagatgaaaacgcttgtggctctctccgtgcaaaataccgccatgcgaccaccagagcacatcctccttattcagataggtctctccgtgtcccggatagccgccacgacagacagcctcccagaaacggcgcaccatctcttcaccgctgatattgccccatccgtgctggatatttccctcgtaggcaatttcatcgagcacggccggtttgcggtaccgctcccgccactcattgaccagctccgctgtcttataaatatcctggcgctggatgctgcagtgcgtcacccatggacgactgtgatcgtaaaatgcaatgcagttatggatcgaacgaagatggtggtacggatcatgctcacagatcagctttgcatagctctcccagtcttcaatcgtcttgtgtggaaaaatatcgtattcatttgccagcgaccaccagatgttccggtacgccgcaaaccgtgcaagcacatatttccagtagagatgatcctgctcacgggtcatacacgaaaaaccccagcggtcatatggatgcattacgatcagatctgcctcaatgccaagcgcctgcagctgctccacacaccactcgatatgccggaaatgcgccggattgaaccgggtcagatcgaagtgatttccctccgtctttccggtgtactcctggaaattgtctttcgtgagcacagtagaatccatcggcgttccctcatacgggtaggagcgcggctcgccaagattgtaatcataatgcttcgggaaaatgcagaaacggattttgttaaaggcgctctcctttaacgtctgtaaggtctcggcaatccgttcatctgactgcagatcccagacatagcaggtcgtaccgatggaataatacggcttgccatcctcgtaagcaaaatggtacgtattcgccacacgcaccgggccgtgattgtccgcggaaggcggtgtcacagtaaagctgccggtgagctttccgttctcgcctcccactttgtccatacctgataaattgaaatcctgcagccttgcactttcacacacagccacctcgttgccatagtttccctcaacccgaaatgtatactccccctcaaacgacggcataaaccgcaccttatacacaccatccccgtcataaaatccatccacccagacggtctcctgggacccctgaaaacacccgcgaatctgtcgctctgtgaatggattgccggtcgatgtgcccttgcagacaatttcctgcatgccccatttttctacggatgattgataagtcatctgctgcatcttcccctcctgttcttgcctgtgcgttcacaaacatctgatatctttatttggtaaagcggacattcgcaatccgcttcgctacttgctcatgaacgcagtcgcttcgcgatctgtcagtgggagctttcaactcccactgacataagcatcccccctcccccgccgcttagtgctccgcgcacttgaagcgggggaatgcttatctgcgtccaagaaataatttttcaaacacgcgataggtttatcgtaacatattcactgagtttttgggggcgtttttcacattttttctctatcttttcaagatttgaaaggttttacaaaattctccatatcctgctgaagaattgcttcatgccttttttaccgaatcagacaagtagcgaagcggatttcaaatattcacttaactcacaaaaaacgccgcacaggacttttccatcctatacggcgctcttttaaccaggtcaagcaagtttccttctttcatttacttgcctgtatcaggcttatttatctctccagataattcttccctttgtcagatcgtacggggacagctcaatggtgaccttgtcacccggaagaatccggataaagttcatgcggagcttgccgctgatgtgggcaagtacaacatgcttgttttccagctccacgcggaacatagcgttcgggagcttctcgagtacggttccttctacttcaataacatctgcttttgacattctatacctccggtcttttatttctactgggcaatctgtgccgatttttattccgcgtccggtttctgatccatccgcagttcataagatttgattatttttttcagatgggcatccagccggatttcctgcatctgctccagaagtgattccggcaaatgcgtgatcagctgtacatgcatctgtttcttctttttcggcgatgcaaggctcctgcgctttccgtctgcaagccacaaataagatccttcctgggcaagcacgacgtacagaacatccttatcgtgcccggctcttgacaccgcaagcatatttgccgacaacggttcaccgttttgcagcctctgctgcagtccggctgcgatcacatctgctttcacaggctgcttctttccacgtcctttcatggcgcctccctactcggcaagtgtcaggatctccggctcaccgtcggtgatcaggatcgtgttctcataatgtgccgcaagacttccgtcttctgtcacaaccgtccagtcgtcatccagccattctacatccgcacggccggcattgatcatcggctcaatcgcaaaagtcatcccctttacgatacgaagtccacggtttctctggcggaaattcggaatctgcggatcctcatgaagcgcatgaccgatgccgtgcccgaccagatcccgaacaacgccgtagccgaaggactctgcgtagtcgccgattgctgctgaaatctcatgcagatgatggccatcctttgcgaactcaatgccacggaaaaagctctccttcgtcacatcaataagcttctgtgcctccggtgtgatcactccgacgccataggtgcgtgcagcatcggagtgcattcccttgtaaatcagtcctgcgtcgatgctgacgatatcgccctcatgcagaattttatccttgcgcggaattccgtgtacgacctcatcatttacagagatgcaaaacgaagccggaaacccattatagttcaggaaattcggcacacagccaaagctgcggatcacgcgctcaccgagcttatccagctcccaggtagagatacccggacggatcgccgcctcgagctccttgtgtacaatattcagcagtcttcctgcttcacgcatcagctcaatctcatgtgctgtcttaatcgttactgacatgattacgcccccagaatctttacgatttcagcaaatacatcgttcatatcctgtgttccgtctacggtgcgcaggatagactgctttgtatagtaatcaatcagcggctgtgtctgctcatgatatacattcagtctcttctgtacggtttccggcttgtcatcgtcacgaagaatcagtttctcaccgcatacttcacagcagtcacccttctttgacggattgtatacgatgtggtaggtcgcaccgcatccagtgcaggctcttctgcctgacatacgggatacgatattctcatccggtacatctacatcgattgcatagtccatcttttcgccaagcttcgcaagtgctgcgtcgagagcctctgcctgcgggatggtacgcgggaatccatcgagaatatagccgttcttgcagtcatcctgtgcaaggcggtcgataaccagatctacggtcagctcatccggaacaagcagtccctgatccatataagattttgctttcttaccgagctccgttccgttcttgatgttcgcacggaaaatatctccggtagaaatatgcggaatctgatattttgctgcgatcattttcgcctgcgtgccttttcctgcaccaggtgctccaagcattacaattttc

SEQ ID NO: 371 - DNA, 7909 bp, Unknown
  16S sequences of unknown bacteria
ttgtccactgctgtctgcagggcatccatcgctgcctggctcgctctgttctgcagcgctgcaactgctgtgttcagcgcattggccgctgtatctaccgcattctgatctgcagcgtcatccgcagcgacgctcattgcattgtccagtgcagcggacacggcggtccagctgttggccgtgtaatcttcttcattcagtgcctgtgcggcagtgatcgcttcattcagcgcggtcttgtcgacggtctctacatattccggaggcagcgtgatggccttatccagtccatgtacttcgaattcatagatacgtgccgcgctgtctccgccctgggtcggttcatcgatccacagcttgacataacggcccagcgtgaccggaacggcgttgaccgtctggttggcggtattgccgctcacgcggagcacttctgtgtaatcgctgccatcgctgctgacttctacatggaaggcagctgtattcagcgaagatccttctccgcccatcgccgcatggctgatcacgatctgggagatcgtcttcacttcgcccaggtcgacctgcatccactgactgccataattggtcgtgcaccactttgtgttgatgatgccatccagcgccttgtccggagactcgctggaagcggtatagccgctggcggtcgcgctcttgttcagcgccaggttgatctgttcgcctgctgattcttcagagaccgtgatgatgttttccttgatgaccgtatcttctccacgcttgttgctggcgacgagctgtacagtgtaaacgccttcgttggaatatgtcacggtcggattttcctctgtgctcgtctctacgtctgcgcccttgaacgtccagtgcagatccgtcgcagacagcgagcatgtgctcgtgaacgtcacggattcgcccggcgcgatgaacgtggaggagacatcgaagccagcttccggctgtacctgataagcgatgacctcttcgatgaacgccagcgcggtctgctcagagaccagcttgccggagcgcagagagcccagcgcgctgttgagctgggaagtcaggctgtctacgacgccctgatccggctcatccgcattcttttccaggaacagctgcagcgcgatcttgtcatattcgcctaagctcttcagcttatcgagattgccgctgcaatgggacagctcatcctcaggcagctgtgccttcaacgtatccgccgccaggatcatattgtcaaattcagtttccagcgcagcgatctcagcagaagcgtcgctgccctgtgcgaccttcttcatcatcgtatccatcaatgcgcgcacatccggtgcatccgcacgtcccgtggaagcccatccggccaccaggcgggaggaatggttggcaaaggtatacatatacggcgcaagatcgccatacagcagatcgatcgacttgcggaaagcgctgtcgtgatcatacgccgcggtattccaggaataatccgcgccggtcgccagcgtgatcttggaaagctccgcatgctccatcgggttcatcacgaggaagtcaagctcatccgccagccccttgtccagaccgtagatcggaccgagtcccagcttgttctggatatagtccgtgcacgggtagttccaccagattccgacattgtcgccatagatctccttgacggtctgtgcattgtccacggagataccttcggtgaccacggcgctgcctgtccacagcacgatgatgctgtcatcgatggtctcagagaaatccttggtgtactgagacagtctgtctcctgaccccatagcgttggaatcatactccgtcggcacggtgatcagcggtttgacatcgcctttctcttgaacgaattcctcgttgaagcggttcaacagcgacgcctgcgccacgccgtccttattggagatatcgtcgaagaagatggcaaagctgcgcacgcccatgtcatataatgactggcatttgttcaccagcgcctgatagtctgcctctcctgcttctccgccaaactggatatcgatgcctggagagagcgcgaatacaaagtctaccttattttcatttgcggtatcgatcagctcctgcatccgatccatctcggactgcggataaggctcacgccactgctcgcgatgatatggatcatccttcggggcgtaaatataggtattcatcttataatcgccatagaattcgatctggctgaggcggtcctcatgggtccatgggttgccatagaagccttcgatcgtcccgcgggtcgccatggtcggctcatcgctgacttctgcttcagcaagctgcatgccatcctctgccgtatccagctgtctgagcgtctgcacgccatagaatgtgccgtcgccgtcttttccttcgatgaccacggtatcgctggccgcatccaccttgagcacatatccttcttcgcccaggctgtccgctccgctcatgccgagcgcttccttggcgctgtccagggctgcaatctcatcatcgctctctcccaggacgaaggtcgtatctccctctacgctggtctcattgacctggatgccgttttcgctcaggaagtccttcagatcggcgactgcatccgcatccgcctgatcgcttccttccacgttgacggaaccgctgacctcgagcgttccgcctgcatatgcaactgactgcggctgagggaccagctccggcgtggaatcgctctgcgcctgcggtcctgccgcatcatttgcgagtacaggaaccgcgcccgcagtgctgctgacaaacatcgctgtcgacattgccgcggcaagcagtccccttgctttcttttcgttcatcatgttctcccttctgcagcatttgctgcctctgcgtccattctatcatcattctcacgatttgcaaccccttttacataaagcgatgatggacaaaatcacagaaatgggaaatatgccatcgatgcggcatgacaaaaagaaaacaatgaccgtggtatccggtcactgaacggttctggtcttgatgcggaagagaaaataaaatacatggaagatccaggcacagaccagcacgatgcgcccgatcacgatctcatccatcatgacgaaggctgcgcccatcatgagcgtggtgatgctcatcatggtcaccttctgacggatgctcagcccttctccgttgaagaagggcgtcatgtgcttctgatacagcgttctggcgtgcagccagtcatgaagccggcgcgagcttttcgcaaagcaccatgtcgcaagcaagtaaaacggcacagtgggcaataccggcagcacggtgccgacggttcccagcgcaaaggcgatgacgccgcctaagatatagaccattctcatcggttttcctccttcagtcttcgttgttctttttttgattcgatcagatgggagagcgcaagcagcgggtgatgcatgagcatccgcgggccgctgaagcgcatgacctctttgatccgctgccgatgcgcctgatcatagcagtgcacccggcagttggaacagaatgtcttcgtctccatgaacgggcatttcgccgtgcgcatccgggcgtattccgccagctcctcacattgcgcgcagcgtgtgcccctgtgatgatgcgcgcggcagtacaaggtgatcatctcttctaccacccgctgctcccgcgcacgctttttctctggatcccgccgcatcagctcaccctgccttggccgacctcgatgatctcatcacacagacgaagcgaggaatgccggtgagagacgaggacgatggtctttttcgccttctgctcatgtagcgatttcaggatgaccgcctcattcagcgaatccagattgctcgtcggctcatccagcaggatgagcgcgctgtcatgcaggaacacccgggcaagcccgatgcgctgccgctcgccgcctgacagcgtgtcgcccagctcgccgacctcggtgtcatagccggcaggaaggctcatgatgaactcgtggatgctcgccttgcggcaggcttcttcgacttcttcgcgcgaagcatccggcctcaccaggcggatattgttcaggatggaatcgtggaacaaatgggtctgctgggtcatgaagctttcatgcgcacgcagcgatgcggtgcggatatggcgcacatcgcctttgcccacgcgcaccgtgccgcctttgacatcccagaagcgcatcatcagccgcagcatcgtcgattttccgctgccgctcttgccgcagatcccgctcatcttccccggcgcgatgcgcaaggagaacctgctgaggatctgctgctcatcataggcgaagtccacgttttcgaaggccgcacctgccccgtcgacctcttccccttcctgcagctctgctgcttccggctcccgctggccagcgtattctgcagggtggtgcccagattggcgatggccgtgaccggaccgaaggatgaaagcagcgtgacaaagctcatcacgaccccggccagcgaaagcgcgcccgcctgatacagaaagcaagatacggcgagcatcagcaggctgagggagaggatggccgtattggtcaatgccatgccctcgccgctgcgcacgcgcaagagcccttcctgcgctgacagctgcgcgctgcgctcatgcagctcagcttgccgcgcttcgcctgcgccatactggatcgtctcatccaggccgcgcagcaattccagcataaaggtgccgaattcgcctgcctgcgtccggcagcggatgcccagatcatcacagcgcgaggagatgcgcaagggcagcgcgatgccgaccaccgcatagctgcacagcgcgatgacccccagcagcggatgccacattccgatcagcacgctcatcgagacgctcatgatcaaggcgatgagcaccggagagatcgtatgggcatagaagacctcgagcagctcgacatcactggtcagcatgctgatgagatcgccctttccttttccttccagcttggccggacagagccggcgcaaagcggtgaacacatgatcgcggatgagggccagcaggcggaacgcgatatagtgattgcaggcctgttcgccatagcgaagcagaccgcggccgatgccgaacgaggccagcagcgcaaagagcacggacaatgagagcggcgcgctcagccccagcagcgagagcaggccgtatgttcccatgacggtaatcaggatcgagcagaagaagcccgcgacaccgagcagcacagcgaggaccatccacatccacagcggcttcaccaaagcgagcatcgcgctcatgatcttccatttactctgcatgcgtgtcctcctttccatagttttccagttcttgctgcgcgtgccacaggcgggcgaacgttcccttttcctgcagcagctccgcatgtgtcccagactccgtgatccggccatcctccatcaccagtatgcggtccgcgcgcacgacattggccaggcgatgcgtgatcagcaccacggtcttcgtctctgccagctgctcgatgagccgcatgatgtcattttcgctttccacatcgatgttgctggtggcttcatcaaagatatagaccttggcatcatgcagcagcgccctggcgatggccaggcgctgacgctgcccgccagagaagttggacccttgctcgctgagcatcgtatccagcccctgctcctcccgcaggaacccggccagcttcaccttttccagcaccgcccacatctcttcatccgtcgcgtctgcccgcgccatgcgcagctgatcacgcaccgtgccggcgaacagatatgccgcgtgagagacgccgacgatcatgcggtgcacatcctcttcccggatatcccgcagatcgatgccgttcatgctgatcttcccctgatagcggtcaacagcgcccatcaacagcctggccgtcgtgctcttgccgcatccgctctccccgacgatggccgtaaagctgccctgcgcaaggcgaagatccagcgaagagatgacctgcttttccccatcataagagaagcggacatcctccatcacgatcgggagaggatcgctgcaggagcgtgtgcctttgggcggacgctccatatcgatgagtcggaagatcttgtcgcttgcggccatcccgttcatggcgatatggaaaaaagaacccagcgtgcgcatcgggatgaagaactccgctgccagcaggatgaacatgagacatcccgcgatggacagcgcctgatgctgaagctcgatcagcgcgaccgcgatgcccagcgccgcgccgccaaacgcgaccaggtccatgatggtgatcgaattgagctgcatggtcagcaccttcatcgtgatccggcggaacttctccgcttcctcccgcatgactttctgccgcgcctcatccgcctgatagatcttcagcgtggtcagcccctgcagattctccagaaaatgatcgcccagcgaagtatactgtccccaataacgagagagcagcttcttggcgaacgtctgcacagcagcgatggccacagggatcagcggcacgcagatcaagagcaccagcgccgccttccagttcagcacgcatgtcacggcaaataaggtcagcggagcgatcatcgcatagaagaactgcggaaggtagctggaaaaatacgtttccagctgatccacgccttctacgctcacctgcaccacttcgctggtggacacgcgctcacgatagctgctgcccagctcgagcagcttgcggtaaatgcgcgtccgaagcttctgcttgacctcgcggctggctttgtcgctgaagcgggccgacagcctgcacagcagccatctgccccagatcacgacgaccgcgagcaaggcggccgcccctacctgcgcgccgaagatgtccctttggaggatgacatcctccagcagcttggctatcgctgcgatcagcacgatgttcaataccagcatcccccattggcacaatacgctcagcccgacatatttcatcgaagaatccacttcgcgaatcaatcgcttattgatcatcaacatccatcactccccgtttgttgtctattgctaaccaaaagattagcatacactaacaaacgtgtcaagcgcgaattttcctgagatccgcccggttcaacgcagccttgaaaactcacgcagacatggtataatagtgcatatgtttttcacacgactgcagaaatgtcattttttacatgagaggaggcgcagaccgtgaacttcaaacagctgttctccatccccaatctgctttgttatttcaggatcgggatgatccccgtcttcgcttatacctaccttcaggctgagacgtctgcggactatctgctttccgcactgatcctgggcatcatggaattcacggacttcctggacggcttcatcgccaggaaataccatatggtcaccgaggccggaaagatcatcgatccgatcgccgataagctcctgcagctcaccctgctgcttctgatcgtcatccgcaatccgttcgcggccgtcgtgctgatcttgtttctcatcaaagaagcgagcatggccgtctgcggcctcgtctcgatcaagcgcaaatgccggttggacggcgcactgtggtgcggaaaagtatccacggccgtgttctatatctgcatggtcctgctcatcctctttccaaggatcgatcacaccgtggcaaacatcctgctgtgcatcaccgccgcgttcctgttatattccttcatcatctatatgaagacgtattaccatatgctgaaaaaagaaaaagacagccttccggattaaagtggtacccgtaaggaggacagcaccttgacagtgctggcgcctttcaggt

SEQ ID NO: 372 - DNA, 32144 bp, Unknown
  16S sequences of unknown bacteria
tttgggctgtacagcccaaacaaaaatcttattacctgtatagcggattttacgggaaaagactggcaaacgttttataaatcccttaatttcatttaagttgatataataatattatataataatatattaatattataattttaggaggtcaaaatgaaacgagctggcacaaaaacgacggcgcttatcatagcgctaagcatgttgctgacatgctgcacctggctaaccgcggttttcggcgtgaaaacggcgcgcgcggaaggggcggcgcagtggacgcccgacactacgttgctgaaagcaaatcccgattcgacggtacgcgggcctttcgattctacgagcggttttatagatatcgtagggcaggtgaacgggcaggtacagtatactgttcgtatcgacgacggcagcgataaccgcggtcccgttgaaacgtatccgatcaaaacctggggcgggcgcgtcggctacgaaacgcagttcgatttcgattctttcgaaacggaaatcgactttacctatctgaataaaactccggatgctcccaaagatacctggggggaagaaaacgtgaaaggggaacagttgaatttgatgctttcttccgtaacggcggggttgtattttggaaatgacggttgtatgatcacggtgcagcgccagagagatcaggccgccacacccgaagacgagtccagaaactatttctttaccgtgaccagcgggggaaacggaaccagcgacgtaacctttaagggcaacggcaaagcaccggattatgcgaacacgaacgatcccgactttgcgagcggatattcgggttggctgatgagttttgcgaccgacgtattatccttcaagatttcttccgagggcgacaattatcttttgacgatctcggaagccgccgatgccgaaagcaaattggtgatcaccatgccgaaggcaaccttggctaaggggatcgaagaaaaagtttatatggcttacggcggcctcaacgcaggtacgggggtagtgcgtttcaataaactgacctgcgacgatacgaaagcatacgaggcttccatcgcttccaaagtcgccacgatcaacgattattgcaccgccgtacaggatcttagcgacagttctaaaatcgcggcggcgaacgcgctgcgcaagcaggtcagccttgatggattccgcaattacgaccgcgcttacttccagccgaaagtggatgcggctaacgagttattctcgcaatatctggatatcgatagtctggaagatatcgtcgaagataccctgaccaatttacaagcaaaattgtcgaacgcagccgacaacgcggcgcttgccgaaatttattcgcttgctgcggacgcggcgactttcgcttccatggccaaggaattagacgcagaccgcggcgcggctcttcagacgaaagtggacgaggtgaacgcggacatttacgaaaaagcgaaaacgatcgtcacttcgtacatgaatgcttatgaaaacgccgtaaattcgatcaaaaatcttgccgatttgcagacaagcagcgtaaaacgcgcggatgccgtcgcttacctcgataaattgaccgatacggataagaccgaattgtacaaaaagttagaggataccgataaggtatactccgaaaagaattccgtagcgggctgggaaggcagtttaaaaagccttgcgatcagttcggacggcaaaaccatttcgtacggcgctttggcgggcggcggcatgagcagcgacgttcatacccgcgacgcctcaaccctctcctttaccgagagcaaaatggcggtcaacaatttcacgatgtccttttccatcgacaaactggctgcttctacgggatggatctccatcggcctgatggcgaaacccaacagtttttccacttcgcaggacaacgatcccgtggacggagttcctaaagtgcagaacaatcccggcctgatgtttttgatttcgccgtatgcgaacggatcggcaaaagtggaactgttctttattaaattgactacgaccgatttttatgcggctttgctcaacgaacttactttcgattacgagatcggaaagcctatcgaaatcagcgtgaaggcgcccgataaagataaggacagttatctcgagatcagcatcggcgggcaggatttccccaaaaaacgtatcgataatgcggcgatcgcctcggtgttcggcaaagattatgagggatatctcaatatctgccagatgggcggcgatcagagcaataactgctatgaagtgacgctgaataagatcaacggtcacgacgcggcgtctgcggacatcgcgaaagtgacggctctgcccgataaaaacgaccccgagcctactcctacccccaaccccgatcctacgactccgggttgcggcggaaacgttgcttttgcgggcatggctgttttcggcgcagcggcgctcgttacggctgttgtggcgatgatccgcaagaaaagagaaaatcattaagaatcttttgtaataggagttcagatgaataagacgtttaaaacaatttgcattatggcaatgaccgtctgcctcgcgctgcccgcattcgcgggctgcaaaggcggcaacggcggaaaaaaagtcattcgcatcgacggcggcggcgatataggcaccttcaacacgacggctgacatgaccgtttcgcccagtaatccttatccttacaatacgttggaaaaattgtgcgaggaatgggaaaaagagcaccccgaatacgacgtgcagatcgccaggacctcgaacggcggcgaccagcagacgctgacggcgctcttgtccgtgcccggcaacgcgcccgaaattctctatcagaacggcggcgtggtcaacagccaactcggcttggattactatgtgccgctcaacagttatctcaacgaaaagaatccctacgaccccgagcgggaaaaatggatcgacttgtacgacatatccgaatttacgacggctgccgacggcgaacgttactacatcaatctggaaagacagccgatcggaatcctttataataaggatcttctgacaaagatcggtctgacggaagcggatctgacgacgtttacgggctttttgaacgcgcagaaaacgttgcaggaatataacgccaaaaacggcacggattataatacgtatcttacttcctaccgctggtacgatttgcagttagagagcaatatcttcggatccctcgttcccgagttggatactctgatcaaggataatcgcgtggataccgaagaactcatccgcggttataaaaaaggcatatggggcgtgggacagtcgtatacggacgaaaacggcaagacgcagatcgcggacgacggacgtttcgaattatacctcgcgatgctgaaactgcgcaccaagtattatcccaaaaactttgcatctctcgacgctttgagttctttcgtgacgggcaaatgtctgttcatcgacggcacggtcggcacgatgcgccaggtcaacgcaaacaattccgttgatttcgaattgggcgtcgtaggctatcccacgctttcaatcgacgatctgaacaacttcgaggaaacgaaaggatacgtgaccaaactcgggctgaaagaggaggatatctccaactgccgccgcggatccgcaggctatgcgaccgcatggttcgtttccaacagcgccgtggaaaacgacgttgtggaaggttgtatcgatcttttgaagtacctcacggctcccgcgcagaacaaccgtctcatcggcgacctcggcggcggcataccgctcaatcccgacgacgatacggagatcaaaccgtacctgacctctctgctcgacatgtattacgaggattgcaaggacgagtctttgatgaaatggggcgcgttcagccattggtcggtactcacgctcgattataacggatactttttggtcgacacgctctcttacataaacggcaccattacgctggaaagtctgaaatcgcacctgaaaggacagatcgccacgaacgtcacgcagtttatcaacgaaaacgattacgaccagtccaaatggtaagcccgaacagaggaagaccgatgaataattcaaaaatcgaacaagaaaacatttcggccgagaccgaaataaagtcgggcaacgaaggcggaaacgccttcgttgttcgtaaaaagaagaagtatcagtaccaggcgtttatctggatcgcgcccgccatcgtgctgctgctcgtattctgctattatccgcccatctattccatcattttgtcatttacggaatcgagaaagcctcagataggggaattcgtcggctttgcgaattacgtcaaggcgctgacggataaaatgttctggataggcatgagaaacgtgctcgtctgtatcgtcgtgggattgatcgcgggcaatctgctcactttcatcatcgcggaacttttaaacgactgcaagagcacaaggacttccaatatctaccgtttcctgtttatcgtccccatggtcgtgcccggactggtcggcatgctcatctggaaaaatatcgtcttcaatccctcctcaacaggacttgtgaatgcgtttttggggctgttcggcgtggaagcgcaggggtggtacgcttcggaaagccaggcgctcctgtccattatcctgacggggtttccatgggtaggcggaccttcgctcttgatttatcttgcgggattgcagaatatcaacggcgaaatggtcgaggctgcgaaactggacggtatcaccgtgccgcagagagtcttttatattgatctgccgtgcatattgggacagttgaagtatttcctggtgacgggtatcatcggcgggttccaggcgtttacctggcaacttatttatacgggcggcggtcccggcaacaacggcgcgacgatggtgcccggattcatgatctacgacaccgcgttcaacgagcgcagattcggttacgcatcggcgatcggcgttattctgttcattatcacgctgattctgacgctcatcaatatgcgaatgacgcgaaacgtgcagacggaggagaaataaatgcaggaaagtgcggttgaattcaacaagcccgtgcatcacggcaaaatcaagcagatcgtctgtcagaccattctgcatatcattatcctttttacgctgttcctcatactctatcccttggtgctcttgatcatcaaaagtttcaaggacgtcacgcaggatcagaactatccgtttacgctgacttttccgctgtatttttccaactaccggacggcgtggctgaatatcgccgattatatcggaaacagttttatcatcacgcttttgcagacggcgggaacgcttttggtagcggcgctgacggcgttcgctttcgtgcggttcagttttccctgtaaaaatatcatctttatggcgattctgtcgctcatcatgatccccggcacgctgacgctcgtcagccaatacatattgatcaacgacctcgggctcatcaacagttttttcggcgtgatcttgccgggcgtcgcgggcagcatccccatgaatctgtttttgctgcgctcgttcttcggcggcgtgaacgcggaactgttcgatgctgccaagatcgacggcgcgagcgatcttagaacgttctggtcgatcatgctgccgctctctctgcccatcatgatgaccgtggcgatgaccacgtttatgggagcctggaacgaatatatctggacaaggctcgtacttttggacgataccatgcataccatcgcgatccgcgtggtttcctttaccgaaagttacttcaagatgacgggcggctacggcgcgccgtttgccgcgtatatcatttccgccgttcctttgatcgtcgtgtttgcgcttgcttccaaacagtttatcaaagggcttacgagcggcgccttcaaaatgtaaatcgaaaataggggaaaacaatgaaaaaattcacatctgttcttttggttctctgtttcgcgtttttgctctgcgcggtcgggtgcgacaatacgtccgccgcgcgcgagccgcagaaccttcttcccgatcccaattacacgcgcggattcaatctttccatgccttctcccgtgtacgataattttcccacggaactggaaaacgcattccgcgaaaaactcgtcaccgaactcggcatgcccgaagaaaacgccaatgcgatcatgaatccctatctgcatctcggcaacaataaactggactataacaagacgacgcagggacggccgagttggtcgctctccgaacacagttccacctattggctgggagatacgcagtacgggcagtacgatatcagttacaatgataaaacgttgaaatcggacgggtacaactataacaaagcgagcgtggaaaacggcacgtacgtctattccgcgcccggcaaaacggtaaaagtcaatcctacgacgggcgaactgacgctcgcggtcaagggctccaacgaatattccaccgacgacgatcacgacggcattcgcgacggggtgaattttgttccccgcacgagcggctcgcaaagttgggtacacctgctcatttcttccacactctatccgcaggtcaatatcgcgcagatggatagtctggaactgaatatctctttcacgatggaacaaatggagaaagtcgcgcccgaactgtttaattacaatctgcacacggcgcagttccaactgttcttcgtggtttcttcgagcaatcccgccgacggtgatttctggtacggcattcctttttacgaggcacgccagaccgaggcaggcgaggtggtaggccccaacggcgggttcgacaacggcacgagtatgtggatcgcttcggcgggcacgcgcgccacggtcggcgaacctattcagaaagggaagcgatacgacgtaaaattcgatatcctcaaggggatcaaagaagggcttgcgcaggcgcaggaaaacggttatatgctcagtacgacggcagaggatctttccatcgccaattttaatctcggttgggaagtacccggtatctacgacgtgagcgtggcgatccataattttgaaattatgggactctttcaagagtaaaggagcggccgatgaaaagaaaatataaccgcatcgtacttacgctgttatcgctggtattcacgctcgcgtgctttttcggatgcacgcgcgggggctcggataatgggggcgaccgtgtggtgaaacccgatacgcccacgagcattttacgcgaccgcgatttttcgcagggcttcaatctgatgggcatgcacgcgggcacggacgggagaaacgtttatcgggttttcgattacaacaagaccgcggacgccgcgcccgcatgggagatggcgcagtgggaaggcaaacataacttggtggaagcgcaagaaaaaatcgagggcgaccgttatacctatcagtcgggcggaaaaaaattcgtctacgacagcaaaaacgccgtgctgacgctggcgatcgacgcaacgcaggaatacgacgcgccgcgcaaaaccagcagcgagggttgggtgcatattcttatcgaacagaattttcaaacggtctattctgtggaggacgtcgagaaaatcaacgtaagcctcgatctctgcctgaccaagttcgataaaaagatgacggacgaggagtttgaccccaatctccacaacgctcaacttttatggtatattactttgaccaacaaaccgccgcaggataatcccgccgacgaggatggctatcccgtaaacggagtcgacggagattatatctggttcggcgttcccatcgtcgattatacgcggtacggcgaatttatggacgcgggactgagttacgatatcggcacgaaacattggatctgcagcgtagacagcgccgaatacctcgaccgccccgttacggtcggcgtgagaaactcgtttgagtatgatatcgttcccatgttcaaaaagacgctggaagaagtacaggcgaagggcggcatgcgcaactgcaaatatgaaaatctgtacgtaacgtacatgaatttcggttgggaagtgcccggtatcttcgacgtttccgccgacatctacgatatcggcatcgaagcggtgacaaaataagataaaaaacagaccgtgtgaaaacacggtctgtcctatcggttttttcagcggagtttgcgcacggattcccgtaaaatcagccgcaaagggatcttgatatcctcgggctgccattcgggatcctgtaagatccgtaagatctgcgcggcggcgttcgcgccgatatccttggaagactgatgcacgcaggtcggcttgacttccaaaagttcggtttcgtcgtccagcaggttatcataggaagcgacggaaatatcgccaggcacctttttccccatctttttgagaactgtataggtcttgacggagaggtcgtaattgagcgcgatgaccgcggtcaattcgggattgttcgtaaggaacgccgtgatcttttcttcccactgcgaatcgtagttttcgagttccgtgagaatttgtttcttattgatgatgagtccgtgattgctcaaagcgtcgcaatgtcccgcgatacgttcctgtatggtggatacgttgctggatttcagggagatcagcccgatatcggcgtggccgttttcgatgagataactggtcagatcgtaggcggcagggtaattgtccgaatgtacgaaactcgccttgatgcccgaaagatttctgtcgatgaacacgagcggaaaatttttcatggacagtttcaaaatttcgttgttgtacgtttcgccgtccacggggtagatgatgagtccgctgatcttattgctgataaacgattggatcagccgcttttcctccaattggtcgtagttggtcgtgccgatcatcagcgtaatgtcgtgtcgggcaaactcgttctggatgccttccatgatgtcgagcacgtacttgctgcggaaatcgggcaaaatcagacctacgcatttggtgctcttgtattcgggcgtaggggcgttcatgtattcgatgcggtcgatatccgcctgcgaaatgttggcgatgaacgtgcctttgccctgtacgcggtatacgagcccttcccgctccaattgctgaatggcggctttcgcggtgatgcggctcaccgaatggctcttggaaagatccgcttcgctcggcaggcggaaattcttgaaattataattgttcttgatgatctcaaagagatagttataaagttttctgtataaaaatttttctttcgggggcatcgtcttattccttaatgttattatatttattataacattttaaaaaaataatgtcaactattatatcaatataaatgctcagaggtaaaaatgctgaaagttgaaaagaatgcgatcaatgaaacttgctatgaaatgtcgaacgaaggcaaacacgccgcgctgatgaccacgggaaacgggtatctcggtgtacgcggcagtttcgaagaattcgggtctatccgcattcagggctgctacgtgcgcggagtgttcgacgagatcatcgaagtgatggagcccttcgccgacaacgaatacatgaaaaaatattacatagacgaagtgaaactgagaaacttcgaatatcaggacagcgtcgtaaatcttgcggatatccttaccgtccgcatcgagatcgacggggagaccttttatccgtgggaaggcaaaattctgcaatggaaccgtcttttgatggaagaggacgaaacgctgtgccgcaccgtcgtctggcagaattcgaaaagacagtgcgtgcaactcgttttcgagcgattcgcctccttttcggacgtgcacctgtattgccagcgcgtgcgcgtcaaagcgctcaatttcagcgggcgtgtgcgcgtactttcggggatcgataccaacgtaaagacgggcgggcagaaaaccgcgatcgataaaagggtggattacggcgcagacggcacgctcttctacaccgccaaagcgggcaaaaagtacggctgcgacttcgtcgttgcggcgaagagcgccctatgcggcgcgaaagaaacggccgcgcgttacgaggaagacggcgtctacggtgtccgttacgatttcgaattgcaggaagacgaacaagttacccttgaaaagatcgtgttcgtcggcgcggcgatcgattatccgcaaaacgtatctctgtatgagatcgcggccgaaacgcttgcgaaatgcggctcctaccgcgaggaatacgatcggcatctcgcggtgtattcggaaaaattcaacttgcaggacgtcgtcatcgagggcgacgacgaaagcgacgcagccgtgcgtttcgcctcctatcatacgctgatctcgggcgattttacttcctcggtgcacgggctgagcgcaaaggctttgagcggtgagcgctacaacaattttgtgtggtgggatgcggagatctatcagatgccgtatttcatccacctgtttcccgaagtcgcgcgcaactccattctgtaccgttaccgccagttgcccgacgcgcgcgaaaacgcaaaagcggaaggctgcaaaggcgcgcgctttcccttcgtctgcagcgtggacggcaaggaaaaagtctggtgctacgcgcgccatccgcatttgcagatccatatcaccgcggacgtggcgtattccgtgatcaactatttcgtcaatacgggcgatctcgacctcatgcgcgaggcgggattcgagatcttattcgagatctgccgctactgggcgagcaaagtgacggttcgcaaagggaaatacgttctcctgaacgtgacgggtacagacgagcaccatcccttcgtggataacgacgcctataccaattatctcgtgaaattcgtgctggaaaggggatatgcctattacgaaaaatataaggacggcgagcggctcggcgttactgcggcggaagcggaagaattcgcccgcgtcgcggaaaatatgtaccttcccgaacagcccaacggaatgatcccgcagttcgacggttatttcgatctgagccccgaactcatcgaggcggacggcaacgcggcgaagggctttcagatgaagacgagcgggctgtatcatctcagccagatcatcaaacaacccgacgttatgctgctatacggatatatgaacctcatacccatgaacgggaaaaattaccgcgaaaactgggattattacgaaagcgtgtgcgaggcgtcgtcttcgctcacctatcccgtgaacgcgatcaattcggtagataacgatatgccgttcaagttcgtgaaatatctgcgtcagtccgcgcttgtggacgtggaggatattttcggcatcgcctggcagggcgtgcacgcgggctgtatggcgggcgcctggtacgcgatgctgcgcggcgttttcggcgtgcgcgttctggataacgccattcatatagagccgaaaaaaattcccgtgtggaataaagtttccatgaaattcgtttaccaaggctgcgttctttccctcgaaacggacggggacgcgctgcgcgtcggccgcctgagcggcgatgcgccgatcaatattatttatagaggagagacggcggttttggcgcagtcggcgctcttccttttgggggattcgtatgaaaaagaagattctgtgtatttttctgtgcctgacgatggtcgggactcttgccgcgtgtcgggggagtaagcccgtgtcgttttcaaacgacgaaatggatatctccgacaagggctgcgtcaactggtacggccgcacctatgcggataaagaggacggctcgatgggattcgattacacgtgcagcggtttcgaggtgacgtttttcggcacttcgttgacggcgcgcatgaaaagttcgaagaccaccgtcgtttcgggcaccgattacagttgggtgaacgtgtatctggacggcgcgatggtggaaacttcggttttggaaatttcttccgaacagtacgccgatttcgaactcgccgccgatcttgacgaggggcggcataccgttaaagttttaaagcgcacggaagcgcagttttccacgctttcgctttcggcgctctctacggacggacatttcgaaacgcctcccgcaaagagcgaaaaaaagatagaggtgtacggcgacagcatcacctgcggctacggctccgtttcggcgatcggcgcctcgggcttcaagacggccaccgaggacggcacgcgcacctatgcggcgatggcggcgaactggctgggcgcgcagtgcagcattatcggatacagcggctggcggctcgccaattactggccggacgcggggctgaccgtgcccgacgtgtacgaccgcgtttattcgcccctgcggagcgtggacgccgcatggaacacgagcgactatattcccgacgtcgtgatcgtcaatctcggcaccaacgattacgcgcagtgcgccgcgagcgcgcagacgaattatgcgttcggcaacgaacagggcgagatcttccagaacgcctaccgcgattttatcgcgaaactgcaaaaatcgtatccgaaagcgcagatcattctgtgcaacggcgccatgctgacggatacggtaccatgggaaaaggagatcgtgaaagaactgaacgcggcgggaaatacgagcgtgcattacgtacagttgtatcagaccgccataggcaaggataacggaacggacggacacccgcactggactgcgcattacgagtccgcggggctgttatacgcaaaaatcaaaagcgttacggggtggtagacatggatctgaaacaaatattgaaacccgtctggaaaggcggagaagtgatcgcggagtcggcgatgtatcttgaagggaacgaggaagtgaaactcatgttccccccgaaagaaattcgcgccgtccgagattttacgggcgcgctccttcgcgcgggcgcggattacgaacagacggcggaaggcatacgctttcttcccgcggggaacgcgccgcgcctttcgcgggaaaaaatgttcccgaaagatgcggagagcgactttttcgcgctgaaagagggcggcaagatattttttaccgaaggcggcttttttcaccgccatcaggtattcgtcgattacgcgcacgagccttctgcggcttacgaacccgaaaccgtgaaaggcgggctgtctgcaacgaaaaaattgttggaagaagggaagttgaatcttctcttttacggggacagcatcacctgcggcgcgaacgcgagcgcggaaatttacgcaattccctttcagaacgcctatccgaaactggtgctcgaggggcttgccgcgcgctatccgtacgcgcagatctcctacgcgaacaccgccgagggcgggcagacttccgagtggggacttaaaaacgtacaggagcgcctgatagaccgcgcgcccgatcttttggttctcgcgttcggcatgaacgacggcacgtggtttaaagacgagggcgcgttcgacggcaatatccgcggcattttaaacgccgtgcgcgaaacgctgcccgacacggagatcattctcgtgtccccggtcttgcccaatcccttgccgtgcatgaagttcgacgacaaagcgttggttcccttttgcggcatacaggaaaagtatcctcccgttttgcggaagatcgccgaagactacggcgtttccttcgtcaatatgaccgcgttccatcagaaactgttacaaagaaagcgctactacgagatgacgggcaacaacgtcaatcatcccaacgattttctgcatcgctgttatgcgcaaataattttatcattattggaggaagaaaaatgaaaaagcgaattttggcaattttgtctgtattggcgatcagcctctgctgcgtgctcgccgcgtgccagagcgaaaaagatctgacgctcagcggctacgacaaggacggattggaactcatcgagtacgacaaggcgtacgctcctttctgggagggcacgaccgtgtataacgagagttgcgtatttatcaagggcgaagacggcaagatcacgctcaaaaccatgttcacgcccacaaaggtgatcgccgtgcgcgattccacgttggaaatcacttataaggaaggcaccgattatacctatcgggacggcgtgttcacgctgacggaaaattcttccataccttattttacctacaaccaggcgcactacaacgtcggcaagggcgtcacgacgcttacagacgaggagcgcgcggatctcacgggtatcgacattcagacctacggagtcatgcacacggagggcgcagccatcgccatgcgccaggtttgcatcacctataagcacaaggcggacgactggcagaaaatggaagggttcaatcagaaatggcagggcgaaaaactttccaaaacgcttgcgaagttggaaaataaagagccggtcgagatcacgctttacggcgacagcatcacttccataaacgcgcagggcacgggtgcaagttccgcgggtatcggcagggcgccttacttcccttgctgggcgcagggcttcgaagacgcgctggaatataaattccaatccgacgtcaccgttcacaatcttgggctgggcggctggaactcctacgacggacttctcaacgccgagggaaaactcgacaaatatcagcccgacctgttcgtgctcgcgttcggcatgaacgatgcgccgcacggcaaatcggtcaaggaatacaaggacaatctgcaaggtatgatcgatatcgtccgcaccgccaatcccgccgccgaagtgatcatcatttcgacgaccaaccgcaatattgacatggtatgggaaaacaacgcggtccgccacgccgattatctgcccgccgtgtacgaacttgccgaggaaaacgaaaacgtcgccgtatgcgatatgaccgcctttaccgattccctgttccaatataaggcgagttacgagtgtttctataacaatatcaaccatcccatcgattatatggtgcgcgcgtacgtcgccaatatgatgaaactgttcctgcgctgaaactatgagaaatacatatatatttaacgcgccgagcgaggatttttcgggcatcaacgccgctctgccgctcggcaacggctacatgggtatgcaggtagaggacaatatcgtctacgaacggctggcgctcaacgagagcacgttatggagcggcggtccgtacgacaacgatttgaacggcgcatacgcgtctttaaaagaactgcgcgagagcgctttcaaggatcggcagcgcgatttcgattgggaaagcaaattcgtgtcgcagtggggcggtcagatcatgttgcccgctggcgatttcatggcgtattttgcaaattcgcgcgaaacttcaaattacaaaaagcaactcgacctgcgttgcggcattctgacgacgacctttgaaaaacaaggcgagcgggtagaaaaacggtactttgcgaattatccttcgcgcgtgatctgcattcgctatcaaagcgatcgcaaggcgatgaatttcgcctgcgagatcgcttcgaaatcgtctggttctttgaccgtagagggcgatacgctcctgtttcacggcgccgcgaacggcgcgcgcggcgtggacggcgcgatccgctataccattgcggcgcgccttcgcaccgacggcgaactgtgggacaacggcaaacgcattttcatcaaaaatgcgggtacgacggaaatttatctttcgatcgtcaccaatttcgtgtccgacggcgatctgtccgcgccgcacgaaacgctcgcccgcgcgcttgcggacaaggcgtatgcgcgcggctacgaagccctcgaaaacgagcacgtttccgatttttccgccatatacgaccgcgtgagcctgcggttgggaaaagagacgggggacgttcccgtcaaagaattgcagcgccgctttgcggaagaggacgactgcggttgggtggaactgtatttcaattttacccgctatctcattctctcttcgacgagaaacggcgcgcagccgccctccttgcaggggaaatggaacgacaaactttctccgccctgggattgcaaatacaccgtcaatatcaacctgcagatgaattattggagccttgccccgctcgggctttccgagttgtataattctttgctcgaaaagatgaaggcggtcgcgaaaaaaggcaaaaagacggcgcgcgaaacgtacggtatcgagcgcggcgacagttgggtgctgcatcacaataccgatctttggaacgtatgcgcgcccatcgacggctgctgggggcttacgcccgtgtgcggcgcctggctcatgaacgaacttttcaccgcctacgaatatacgggaaacgaagattttctccgcgaactgtatccgctctttcgcggctgcgcgcagtttttctgcgagtttttagtgccgttcggcgaatatctcgtcacctgtccttccacttcgcccgagcgcatgaacggcgctctgggctacgtgacctacggcagcgcgcatgacaatcagatcgtgcgggaaatgttcgaacactatctcgtctgcgaaaaactcgtgcgcgctgacgcggcgctcgaaaaagaaacggaagaaaagttgaagaaacttccgccgcccgccgcggtttcggaatgcggactcgtgcgcgaattttactttcacgatttcgattatttagaagatacccaccgccatctggcgcatctgtacggcgtgtatcccgggaacagcgtctttcgtcagcacgacaaagaactcgacgccgccgtgaaaaatacgctcgactgccgcagcaaggcgggcgactggacgggctggggcatcgtgtggcgcattgcgctgtacgcgcgcctgggcgacggcgcggcggttaccgccatgctcaaaacattcctcgacaggcgcaacggcctgatgctggaaaacggcttcggcgcgttgccctatgaaaacggttctgcctttcagtacgactgcaacggcgcgttccccgcggcgcttttggagacgctcgtgcgcagcgaaaaggggcgcgtgacgctcttgcccgcgctgcccgattttcttagggacggggagttgaagggcgtttgcctgcgcggcgcgtttcgtctggaaaagttgacgttctccgacggcaaagtcacgcgctgcgatatttacagcgaaaagggcggggctttggatatttccgcgaacggtcggctctatcatttggacgcagaggcggacaggacctatacggtcatcggttaaaatattgaaggagataaaatggaaaacagcgtattgaaagacgtaaaattcaatgggaaattcgggctcaaaggtttcagttcgaaagagagcggtcacaaaatattcgacacccttacctgggaaaacgtttttgaggagcaggactggacgctcgcggaatgggcgtcggtacatccgctccgcgcggatcggaaacaggtgaaagagggcgatcgcatcgatttttccaccgaaagcaaagtcgtttcgctctggccgggaaaaggcaaactttcttttttcgcggatacttccaaagaatacggcgcgcccagaaagagtggtgaggactggatccaccttttgctggaacaaaagatcgaggcgggcgaccgcgtatatctcggcgatatgaaggcgttggatctggcgctcgatttcagcgtggacgagtgcgaaaatctgatgcgccgcgaagagtacgatcccaatctgcacgcggcgcagatcagttggttttttaccgtggaaaataaccgcgatacgaaactggatttcgagggacgccccgattatctgtggttcgggctgccgcttttcgacaaccgccacgccgtcatcgacggcccgcagatcttcctcgacaggggaacggaaaaagtcatttacagcgtaaagcgcgccgaatatatggaagagcccttccgcatagggcacaaatattgcgtgcgcatggatatccttccctccatcaaaaaggcgtttgccgtcgcaaaggagcaggattggctcaaaggcgcgcgctgggaggatatggcgatcggcagtaccaacctcggctgggagatccctggtaccttccgctgccgctgtacgttcgaaaatctttcccttacgttccgttaaaaatagagccgcttttttcaaagcggctcattctctgccgcgtcgtctgcgcggtttgcataaattgttgcaaattcgctcaaaaacagtcaaaacgaaaatttttttgtacagattttgccagaaggttgacagtaaaaagactgaaaaggtataatatatttaataagattcggcgctgcgccgaaaggagttcgctatgaaaacgatgaacaaatatcgaggtctgccgttctggtgctggaacggaaaactggataaggacgaggtgatccgccaggtacatattttaaaggaaatggggttcggcggctttttcatgcacagccgtacggggcttgcgaccgagtatctcggcgaagattggttcgatcttatccgcaccgccacggaagaagcggaaaaattgggcatgaccgcgtggctgtacgacgaggaccgttggccctccggcacagcgggcggcgaagtgaccaaaaaactcgaatatcagtttaaatatatttccgaatacgacggaaccgccgttcccgaagagggcgtatatatcgcggaggagttgggccgttttgcgatcagattcaataaaaacaacgaactttgcgattattatcccgtcaaagagggcgaacagcccaaagcaggctatgtcgtgaaaaaatacctcgtcgagcatatgcggacgcaggagttttacaacggttacacctatctcgataccctcaaccgcgaggcggtggaggagtttttgagatgcacgcacgagcggtataaacagaaatgcggcgatctgttcggcaagaccttgctcggcatatttaccgacgagccgcaccgcggcgcgctgctgaacgggttcggcacgatgaacaagaacaacgtgaatatgctgccgtattcctattctttgttcgaaaaataccgcgccgtgagcggtatggatctggcggcgaaacttcccgaactctattacaagcgcgcggacagcaaagtcaaccgcaccatgtattactatattgaaaccatgcagcaactgtttctggaatgctgggcgattccctatcacgaatggtgcaaaaaaaataagttgatcgccacggggcacatcctgcacgaggacagcctcgccattcagacgctcttccagggcagcgtacagcgctattacgagcatatggattatcccggcgtggatatccttaccgagggcaaccgcgcctattgggttgcgaaacaggtgcagtcggtcgcgcgtcagatgggacaggaattcgctttgagcgaactgtacggctgtaccggctggcagttcaatttccgcagccaccgcgacgtgggcgcatggcagacgcttctcggtatcaatcttcgctgtcaccatctgagttggtacaccatggaaggcgaggcaaagcgcgactatcccgccagcatcttctatcagtcgggttggtaccgcgactatccttacgtcgaaaattatttcacccgcctcaacgagatcgtcagcaagggcgagcccctctgcgaaacgctcgttctcaatcccgtggagagcatgtggctgtatccgcgcaagggctggctgaaaaacctcttcgaattgacgattgaagagggcgtgcgtctggaagaggcgtacataaaattgtttaagatccttacgacggggcaggtcgatttcgattacggggacgaggatattctcgcgcgcaattaccgtatcgtacaggaagacggcaatgcgaaactgatcgtcgggcggtcgaagtacacggttgtcgtcgtcagcggcatggataccgtccgctcgtctaccgtgcgtatgctcgaagaattcgccgctgcgggcggcgacgtgctgttcgcgggcgatcttcccgcatatatcgacgcgaaagagggcgatatccccgcctcgctccttgcaaagagcgcgcgcgtcgcgctcgaacgcggtgagattttgtcctatctttccaaacagagatttttcgaaataaattccgcggagatcatcacgaccgtacgcaaggagggggatacctgttatctcgtctgcctcaacgaagaccgcgaaaacgcgaaggatgggctgacgctgcggctcaacgctcccttgaatatcgaggagatccgtttggaaagggacgaagagtacggcgtggcgcgaaattgcgccgaacttcccgtccgcttcgaaccgggcgaatgccgcgtgttccgcgtattcgcaaagggcagcgttcttcccgcaaaacgcgtcgagaacgcaaaagagcaagtgcggctgaacgggccgtttgcctatacgctcagcgaaagaaacgttctgcccctcgatctcgcgacctggtccttggacggaaaagaacacgaaaaaccgcaggagatcctgcgcatcgaccgcgagatccgttcaacgctgggcttgcccctgcgcggcggcgaaatgatccagccctggtaccgtgaaaagtacggcattgccaaggcggaggcaggcgaacacgccgtcgttttgacttaccgtttcggcgtagacgttctgcccgcaaaggatatgtccttcgttttggagcagagcgaacgttactcggtggaagtcaacggaaaacttctcgataaaaaaataacggggcattggatcgatccctgtttcgacgaactcgttctgcccgcggcatatctcaggaaaggggagaacgtcgtccgccttacggcgaagtacgaagattcgctcaatctcgaatgcgcgtatatcttgggcgaattcggcgtatcgttacgggggagcgcggcgacgatatgcaaacttcccgaaacgctcgcgctcggcgacgtcacgggacaggggctgcctttttacagcggttcgatcgcctatcataccggcatccgcgattgccgcgtgagcgtcgcgctcggcgactgctacggcgcggtcagcaaggcggagggcaattcgcataccgaatatatcgcattcgcgccctacgaaagcggtgtattcgattgcaggggagagttgaagatcgtcgtttctctcacccgccgcaatacgttcggccctctgcatcttacttccgtgctttcgccctcctacggtcccgaaaccttcttgacttcgggtgccgactacaccgattcttattgtctgatcccccagggtattctcggcgatgcgattgtaaaactgtattaaaaagttaccccgtccgaaaattcccggacggggtttttgcgggcgggctgatttttgttcaagtattttagatggaaaattttggaaaaaatacttgacagaatttttataacagtatatactattaacaataaatgaaggaaggtagattttgcctttttacaattaaaaattctgttgcgataaacagtagtaatttgtgagtttttcataaacgatggattcgcaaaaagggactagtccctttttttatcggcttttcagccgacaaaaaaagggactagtccctttttttatcggcttttcagccgacaaaaaaaggcatttaatagatctctttgctcgtttcggcggcggtgatttttattgtaacggcaaaagtcgatcttttttaaaaagatatttgtcaaaatgaaatcaaataaggagaagttatcatgacaaagacaatgaaaacgggaattatcgcggtattgaccgttgttctgattgctgtttgctgtctgtttgttgggaccctcaacaagtcggcgtatgcagcaagccaagaacagattgaagccttcgaaaatcacgttaaaaccaacttggcgaaagaagacgattcgatgtataccgaagatctctttgccgagagcgggtacgtacttgcctttaaacgggcgaaaagcctttatgtggaaggggcgagcgaagaggttatggctgtctataataaggttttggaaattttcagagagcctctcgaattggagtccttcgccacgtctaccctttatttcagaatacataaaatgaacggtaacgaacttttatatacgcagaacgaggagttacaaggttacgaggccatttataataagtatacggacgggagtcataccgccgttgccgattatctgaacggcgttttgggattgaccgataatttaacggaagccagaacgcaaatgaatgcgatcggggagaagatcgccgccgccgttgccgccatcgatcggattcaatactacaattccgatacccaagaaatgcagatatatagtgaggaagcaggcgctgcgctgtatatcgttgcggacagcgcggattcgatcggctataaattcacggaggatggcggcgctcttgacgaaacgatagaaaacagtgcgaccgcggccttattcgatatctacggtaaagattttaccgcgcttaccgccgagcaggaaacggtttcgaattatgctttctacgcggctgccgtggaagcgttgcgggcgcagtatgacaaggcaatcgcagtcatgaccgaaatcgcggacctttcggatatcattaacgacgacgtttgctatacggaagcgggcaaagtcaaagcggcaagatccgcttacggggcgctgtccgaatacaatgcaatggattcagtctccgcaaataattttaatgatttgcagtcgctcgtatcgaatattgcagaccttgaagcgatcgaagcgcgtatagcggaaatcgaaactgccatccaaaacacgatcgacgcgatcagcgcgatcggagacgtcgcttataccgcagagagcaacggtaaaatacaggctgccgaagccctttttgagaatctcgataaagatatcaaagataacgacacggcggaaggacaagaccttatcgtcaccaattatgcgacgttggttgcgtcgcgcgcggcgtacgataaaatgcatgagcaggtagaaaccgcggtttccgcgatcgtggggttgagcgtctttgaaaccgatggcgatctctacggcgaattcctcaaggtgcaaggtctttatacggcgctcgatgccgagcagaaaacggcggtcgacgaaaccgtgccgcaggatacagataaaacctgccgcgaattgtacgcatactatcaggcaaaagcgaacgctatttgggcaaaggtggaccccgtggtgacggcgattaaaaatcttggcgacgttaccatttctgtggagtttaccgaaagattgaacgcggcgcgcaaggcgtacgacgctttgagcgatcaggaaaaactggctgtttcgaattattccgaattacaggcaaaagaagcggcttttaaagttctgatggatgttgcgacgcagtgggtggaggcagtcgcagcgatcgaagatcctgtgaccattgagaatatggggctggtcgaaaccgcaaaagagttttttgagagtttcgagcaaaatgtgcaggatgttttgaaacagagcaacgaatataaggattcttacgaaaagtatgcggatgcagtagaacagtatactgctttattgaataaaatttccggattggcgggcaaaatggctgatcttcccaccgcggaaatttctttggacgaagcgtttgaacaaaatctgttgaatttcgatcaggcggtcacgcccgttgtagatgaatataccgctttgacggaaaatgaacaggcgtatctccgtgaaaattatgccgagcaatatgcaaactatcttgcggccaccgagaactatgcgcagtaccacgtggaatacttgatcgtaaagatcggttcggtggaaaaaatcacacttgcgcaggcagcggctatcagcgaggcgagagatgcgtatgatgctctcgacgaatctttgcagaataaggtgcgtaactatgaagataaagagggggccgaaactctgctcgatcctacgctcgttgccgccgaaacgaaactgaaagaattcaccgtcgcgtacgatgcgtggatagccgaagtaaataagtttgtgcccgaaggcactgccgtagccgatctgatctccgtatcttttgaaaaagtgaacggactgaaagaagagtatgaggctttcttgaaggaagtcgaggaagatcctgacgcgacggcggcggttaccgattatctcaaagaaggtaaagcgatgctcgatgaggttgaagcaaaagccaaagatctgatcaccgcattgacagaggaattgaacgaaatcgtagccgtacccgaaggggagcgttataccgcggaatttatgcttcgtttggagaatgcggaaaagaaatacggcgaactcgacgatacccaaaaagatatcgcttacgacgatgagaattcgatcattgccgcgctgaattccgcttacgaatcgtttaaaaatgtttatgtaatgcaggtactcgtaaccgattatacagcgtcggtcgatgcgctttataaaaacgttgtgaccgatgaaatttataccgttgacgtagaggtcatgctcaacaccttaaaagccgtatataacggaatgcctgcgtatcgcgcggtccttgccgatgcgtatgcgaagttgggcgaagtggaaaccgcgttcaatgccgcaaaggaagaagggaaagtactcggcctgaaaaacgtgagcagtgatatcgccgcgaaaaacgaagaggtcaacgacaggatcgatcaggtcgttgaagatttgaccaaagcgtatggggctgccgatgcggctctgaaacagcagatcgaagaaactttcaacgcggccattgaaggtttggaacaggcttacaagaatgctgacactgcgctgaaaaactcgattgcggaaaatctgggcaagatcgagaaggcaacgcaagatatagccgctcttaaaaccgaactcgaaggcaagatcgccgctgcaaaagaagcgctggaagcggctgatgcggagttgcgcgatgacttaaacgccgcgcttgctgagatcgaacaactggcgaaggattatgcggatgccgatgctgcgctcagaaccgaaattctgaacaaaatcaacgagaaagcgcaggaattgacgacgaagtacagccgggccgacgcggatctgaaagccgaattgcaggcggaaatagcgaaagcagtggcggatgccgttaaaactttgacggatggttaccaggctgccgataaggcgttgaaagatcagatcgaagcaacgatcgacgaactcgaagaagccctgattgcggatatcgcggagttggaagagtcctttaccgcggcgaaaaccgcgatcgaagcggaagaagacgcccgtaaacaggcggacgcagatttgcaggcacaacttgatgccgctctcaaacgcatcgaagaactggaagcgaataaagcgtcgaagtggctgggaatcatcgcgctccttgtcggtatcttcggcacggtcggcgccgtatggttcatcatcgataagtttgcaggcaaaaagaattaaatacagaacaaaattcaagccgccgaggttttctcggcggctttgttttatctctgtaaaagggctttcgtcgggaataaaaaaacatcggctttgaaacattttgcatcaaaaccgacgtcttaaacatggtcgaggtgacgggacttgaacccacgacctcttggtccctaaccaagcgcgctaccaaactgcgctacacctcgaaagcaacatgaatattatactatattttttgaaaaagggaaatctttttgacctgtttttcgaaaaaattttttaaaatttttaaatttttttttcgcggcgcaaaaattcgagaaaacatttgcagccttccgaaacgtcgcggtaggttctttcgaaatcgcccgtgtaccaagggtcggaaatgtcgcgggggctttccgaaaaatccagcaggcggaaaagtttatgcgcgggatcgccgccgaaaaaggagagcatatccgcaagattgcgccgttccatgccgacgagataatcgtattcggaataatcgctccgcacgatcttccgcgcccgcttgcctgcgcaggagatgttgcgcatggaaagttgcgcggcggtgccgcggtgcacgggatttcccgcttcttcggaagaagtgcccgcggacgcgaccaaacatacgtcgctcaaattttgcttttgcagcatatctttgaatacgaattccgccatgggcgatcggcagatattcccgaggcatacgaacaaaactttgaccatggcgttattatagcataaattttgaaaagaggaaagcaaaatccgcgttttcgtttgacaaaggattggcgttttgttataatgaaatgcgttgatatcgaggtgtagcgcagtttggtagcgcgcttggttcgggaccaagaggtcgtgggttcaagtcccgtcacctcgaccagagttcgtaacggcgccgttatctttttcttaagaaaaagataacggcgccgttatctttttcttaagaaaaagataattatatttcacagccgtaatcgggattgacaaaagcgcggcatatccattataatgactgaaaacaaggagtaactatgcaagaaattttaaaggtggaaaacgtccggaagacttttcggctttccagacggcagcaaaagatagagcgggccgaaagcgaatggaaagtcgcgttggacgggctgtctttttcggcgtacgaaggggagatcttcgggcttttaggtcccaacggcgcgggcaagacgaccatgctgcgcattctgtccaccctcatcaaggcggacgaaggcgaggcgtacgtaaacggcgcaaacgtgaagagcgaaccagacaaggtgcgcgcctcgctcggctttatgacgggcgaactcaaactggaagagtttttcacgcccaattacctgttcggttttttcgggaaactgtacggcatgagcgaggaaaagatcgccgccaggcggcgggaactgttcgaaaaattcgggatcgataaatttgccgaggtcaaggtgggggaactgtccacgggcatgaaacaaaaagtttcgctcgttatctccatcatccacgatcccgccatcatcgtattcgacgagccgaccaacgggcttgacgttctgaccgccaaggtcgtcaccgattttctgttggaactcaaagcgcagggcaagagcgtcattctctccacgcacatcttttcgctcgtcgagaaactgtgcgacagggttggcgtggtcatcgaggggaaaatggctgcctgcggcacgctggaagatctgtgcggcggccgtccgctggaagaggtattctttgaaatttacgaaaggacggtggggacatacgatgcgtaacgtgctgacgatcattcaaaaagaattttcccgctttttcagggataagcggctggtgctcggcacgctgcttttgccggggcttctcattttcgttctctattcctttatgggcaacgctttcgcgacgccgtcaaacgagccgtccaagatccgcgtcgtcaatccctcgcaggcgtttgccgcgtatatcggtatgttggaaagcgcgtcggaggattttccctttgagtttaccgattcggaaacgaacgacgtaacggcggaaaaagaagcgctcgccaagggagaagtgcacgccgtgctcgtgtttccggaaaatttcgacgccgtgctcggcgcggaaaatacagaggcgcccaatgtggaagtgttttacaattccgccgcgacaaagtcttcctccgcgttttcgggcttgacgtcgcttctggacggctgggaggacatgatgagcaatctgttcgacgtcaaccgcggcggctcctacgatatcgcaaccaaacaggaggcggaagcgagcctgtacgccatgatgctgccgttcatcatcatgacgatgctgtacagcggatgtatgggcatcgcgcccgagtccatcgcgggcgaaaaggagcgcggcaccatcgcgacgcttttggtcacgccgatcaagaggagcgaactcgtcgtcggcaaagtcctgtcgctgagcgctttatcgtcgctgagcgccatcagttcgtttatcggaacttttttatccataccgaaactgataggcggctccatcggctcgactctcggcgcctactctttcggtcagtacgtcagtctgtttctcatcatgctgtcggcggtgctcatcatcgtgtcgctgatcgcgatcatctcctcgttttccaagagcgtgaaagaggcgaccacgctcgccgtgccgctcatgctcgtggtcatgctcgtatccgtcacgtccatgtttttcaccgtagacagttcctcgcacgcgctctttctcattcccatctacaactgcgtgcaaatgatgagcgaaatattcgcgttcgatttcagcggcgtcaacctcgcggtcacgctcgcgagcaacctcgcgtacgtggcggcgctggtgttcgtgctcgcgaaaatgttcaagagcgaaaaaatcatgttcaaccattaaaagaaaaaagcccgcgggcattgcctgcgggctgatttttttcggtttagtctttgaacaggcggttgagccttcttgaaatggaacggatattctcgcgcaccgcgctgcgggcgctgccgcccacgactttgcgcgcttctaccgatttgttcactttgacgacggtcaggatatcttcttcgaagagggaagagaacgtctgatacacgaacaggtcgagtttgtcgagcgacttgccgttttcgatgcagtggcgcacgatctgtcccgtcaccgcgtgcgcgtcgcggaaaggcattcctttcatcacgaggtaatcggcaacgtccgtcgcggtcgagaacccgcccgccgccgcgaaacgcatgccgcgcgtgtcgaaggaaatattctgcaaaagttcggtaaagatgccgaggcagttcaaaacggtctcttccgcgtcgaacagcggctccttgtcctcttgcaagtctttattataggaaagggggattcccttgatgacggtcaaaatcgcggtcagatcgccgtatacgcgccccgtcttgccgcggatgagttcggggatatcggggttctttttctggggcatgatggaagagcccgtcgaatactggtcggaaatttcgatgaagccgaactcgtcggtcgaatagacgatgagatcttcgcagaaacgcgaaaggtgcgccatgacggtcgaacagcagaaaatatattcggccacgaaatcgcggtcggataccgcgtcgatcgaattctgcgaaatttcggagaaggagagaaggcttgcggtcatgcggcggtcgatggggaaatccgtgcccgcgagcgcgcaactgccgaggggcatcacgtcggcgcgcttgtagcagtcggtaaagcgttccagatcgcgcagaaacatttcgctgtacgcgttgaaatactgggcgacggaaattggctgggcgcggcgcatatgcgtatagcctggcatgatgaactggatattgttgttcgccgtctccaataaaacgttgacgagcgcgcgcaggcgcgaactgatattgacgatgctgtcctttacgtacagtctgagatcggtcgccacctggtcgttgcgcgaacgcgcggcgtgcatcattttgcccttgctgccgatgcgcttgatcagttcgttttcgatgaaagtgtgaatatcttcggcaccttcgatggtcaggctgcctttttcgatgtcggcgacgatgttgacgagggtatcgctgatcagttccgcgtcgtccttgggaatgatctgcgtttcgcccaacatttttacgtgcgcgatgctcgcgagaatatcgtgccagtacaacttatagtcgaacgacagcgattggttaaactcgtccgcgctcttcgcgctcggttcggtgaatcttccttcccacaatttcatgatttatatctccgttttagatttaagtcgaaatcatttgacttattccgaggaaaactttaaaatatgatagtaattctcggttactactattctaatatattttatgaaaaaattcaagttatttttgtgattttatcaaaagagagtgaaatttgattatactgggcatcgacccggggcttgcgaccctcggttacggaattttggataaggataagggcggcaacgtgcgcccgctcgattacggcgtggtgctcacgcccaaggaagaaaatcttcccgtgcgtctcgccatgctcgaagagggcatcgctaaaattttagataaattcactcccgacgaagtggctgtcgaggaactttttttcagcaaaaacgtgactacgggcatcgcggtcgcccatgcgcgcggcgtagcgctcttaacgtgcgtcaagcgctgcggccgtctgttcgaatatacgcccatgcagatcaagcaggcgctgacgggctacggcaaggcggacaagcgccagatgcagcaggtgacggcgtcgctgttaaagttgaaaagcattccccgtcccgacgacgccgccgacgcgctcgccgtcgctttgtgccattcctatacgtcgcggctgtcttcgctgttcgggatctgaggagaaaaatatgatcggttatatcaagggaaaggtgatccactcggaagcgggggtgatccttctggaaaataacggcgtggggtacgaactcgtctgttcgggcgcggcgttcgcacggctcgtcaccgacggcgcgggcgaggcgtatacctatctgcaagtgaaggaagacgggctgacgctgttcggtttcgtgagtatggaggagaaaaatatgttcctgaaactcaccaccgtgtcgggcgtggggccgaaaatgggcatagccattctttcgcagatgaatatcaacgagatcgccgtcgccatcgccacatccgacgtaaaaggtctttgcgccgtcaaggggctgggcaaaaagacggcggagcgcatcatattggaactgcgcgaaaaggtgggggcggcggaactcgccccgcagaaaggacagcccgtcatacccgcggcggacggggaggacgatgcgatcgtagggctgatgtcgctcggctatacccgcgcggagagcgccaaagcggtcaaacgcgccaaggagagcggcgccgcgagtctggaagatatcatcatgaccgcgctcaaaagcatgtaaacggcggagatttttatggatttcgaagaatacgacgacgaacggctcgtcatgagcacgcggggtgaactggatagcgaagaaaacgttctgcgccccaagagcatggcggactatgtcgggcaaaaaaaggtaaaagagaatctgggcgtgtatatctcctcggcgaaaatgcgcggcgaggcgctcgaccacgtcctcttgtacggccctccgggacttggaaagaccacgctcgcgcacatcatcgccaacgaactgggcgtgcagatcaaactgaccagcggccccgccatcgaaagaggcggcgatctggcggcgatcctcaccaacctcaacgagggcgacgtgctctttatcgacgagatccaccgcctcaaccactcggtggaagaaatactgtattccgccatggaggattacgcgctggacatcatcgtcggcaaagggccgtcggcgcgcaatatccgtttcagtctgaaaaaattcacgctcatcggcgcgaccaccaaggcgggtatgctcgcctcgcctcttcgcgaccgtttcggcgttttgtgccgtctcgatatgtacacccccgacgaactttccgagatcgtcacgcgttcggcaaagacgctgggcatcggcatggaggagcgcgcggcgaaagagatcgcccgccgctcgcgcggcacgcc

SEQ ID NO: 373 - DNA, 4491 bp, Unknown
  16S sequences of unknown bacteria
ttataaaaatttttattaagtatgcaacggaacaggcgcttttctctacttaataagcgtaaatataaaagctgaacgggggatctatgcaaaaaaagactgtactgattatcggcgcgggaccggcggggcttacggccgcctacgagcttttgacgaaatcttcggatattcatcccgtcattttggaaacggaggatttcgtcggcggtatttcccgcacggcgacgtataagggcaatcgcatggacatcgggggacatcgctttttttccaaggacgaaagagtgacgcagttatggacgcagctcttgcccgtacagggacaccccgcgaaagacgatttgattttagggcgggaaaagcctcttagagagggcggccccgatcccgaaacgacggatcggacgatgctcgtgcgcgaccgcgtttcgcgcatcgtatatctccgtaagtttttcgattatcccatttccctcaaagcccaaactttttttaatatgggctttttgcgcacgatgaaagcgggcttcggctatctcggcagctgtctgcacaagcgcgaggaaaacagcctcgaaaacttctatatcaatcgattcggaaagcccttgtattcgatgtttttcgaggattatacggaaaagctctggggcgttcatcccagcaatatcgccgcggattggggggcgcagagggtcaagggactgtccgtttccaaagcgatcaaaaacgctttgtcgaaaccctttaaaaagaagaataaagaagtcgaaaccagcctcatcgaacagtttttatatcccaaaaagggacccgggcaactgtacgaaacgatggcggaaaaaatagaggaaatgggcggggagatcgtactgaatacgaccgtgaaagaactcgtcgtcgaggaaaatcgggtcgtagccgccgttgccgaagacaaggacgggaacgagatccgatacgacgcggacttcttcatctcttccatgcccatcaaggatctcgcggaagcgatcggtccgaaacatattccgagcgaggcgtaccgcgtcgcccgggaacttccctatcgcgacttcatcaccgtgggcttgcttctcgacggcttaaaggtaaagaataagacgaagatgaagacgctgaacggcatcgttcccgactgctggatctatgtgcaggagcgggacgtgcgcctcggcagaattcagattttcaacaattggtcgccgtatatggtggaggatcccgaacataaggtgtggataggtctggaatacttctgtacggaaggggacgatatgtggacgagcccggacgacgaatttatccggaaagcgatcggcgagctggtgaaaatcggtatcatcgaatcggagaacaacgttctcgattccacgatgatccgcgtcaaaaaagcgtaccccgcctatttcggctcttataaggagttcgataaagtacgggaatatctcgacaccctttccaatctgtactgcgtggggcgcaacggtcagcatcgctataacaatatggatcactcgatggtcactgccatggtagcctgcgaagacatcctgaacggcaatacggacaagacttccctctggaacgtcaacaccgagaaatcttatcacgaggtcaaagatgaatctgcaaaatcctgacgcttccgaagaagacggcggagaggtcgaagttttgcggaccctgccgctgaaatcccaagcgcctttctcctttatgggcgcgctcaaagaaatcgctctgtatgcggggatatttttgtcggcgctggtgctttttctgacgataaagccgctgtacggctttgaacggaacggcgtggtggcacaggcgattgaggcggcggcgatcggcgcgtgccttttcgtcggcggctttctggcattcaataagaaattgacggcgcagagattggtgttgctgctatttatcatgggagtcgctcttcgcatggggtatatgctctatacgcccgccaatacccgtcagtacgatacctttaccaagaatttcgacgggcacgaagcgtatgcgtggacgctcttttcgacgggaaaacttccggcaaagaatatctatcaattttatcatcctcctctcaacgctttgttgcaggcgggattcatgcactttatgtccgggttgacggacgcgttgacctccgtcttttccctcggcagctattttcccgacaaatttttggcggcaaagcccgaatatctcgaggcggaacgctattttctctttcagtcctgccaaattctgagcctgatgtattccgtcgccgtctgccgtatctctttaaaaattctcaaacgcctgaatatcggcggcaacgcgtatgtgggactcgcggcgtttctcatcttttttccgagaaacattcaatttgcaggcgcgctcaataacgacgccgtttcctatttatgcggcatcgccgcgctctatttcgcgttgagctggtggaaaggcgcaaaggactttttaaacatccttttttgttccctgttcgtggggctgggaatgatggcaaagctgtcttccgcgacgatttgcctgcccatcgcggggatctttatctgggaattcgtgcgaacgctgataaaaaaggacggctccctttcattgcaaaaaatgataggggaatacggagcgtttttgctcctttgtatccccttgggactttggtttcaggtatatgcgaaaattcgtttcgatcagccgttcggatttgttttttctaatctaaaccaaaaattgtatacggggaaccattccttcttcggacggttttttatcgccttcgacgcgaacgaatatttcggctccctttattgccgtcctttctccttccactataacttgttcaattacgcgctgcgctcggctattttcggtgaattttcctattggcagggcgaggggctggcggtttcggcggtcgttttggcgtatattgcctgcctcgttttgtttgtagctttgattcgggcggtctatctctttttcagatacgacagaaaaaagagcggcgaaggcgcgatggaggaaaggcgcaacgtctttttcgtctttttgctcgtgcagtcccaggccctttcggaaatctatttctatatcaagatgccctatggctgtacgatggattttcgttatatcatgcccatgattttaggcattgcgctcaccgtctggttggtcaacggaagactggtgaaggagggcgggaagctttctctggcgctcagtcgcctgactgtcgtttccttcggattggcaatgctcttttcctcactattttatatggtttgtatctaaggagagatatggaagaaattacttcagataaaatccctgtacaaattcccgagccggatcaacaagcacccgcgcgggaatcggcgcgggaaccgcggcaaaacctcgcggagagtgaacagccgctcgcgcgggaaccgcggcaggattttagggagagcgagcaaacgccctcgccggaatgcgaacgggaaaccgagccgaaacaggaatccgcgggagaaggcgtacaaaaaatgggacaagaccttgcggaggattctcccgcgcaggaggctcctaagcagacgaaaaagcagctgattctcgaaatcctgcgttttttgatcgtcggcggaacagcgacggtgttcgattatgcggtggcgtatctgttttatcaatggctgctgccgccccgggtcgtcggcggtacgctttcgctcgtcatttccacggcgctcggcttttgcgtgggattgatcgtcaattggattctgtctgtgaaattcgtctttaaggatgtaaaaaacaaaaaggaatcccgctccaaaaaatctttcgtcatttttacaatcatcggcgtcatcggactcgggatcaccgagctcggaatgcatctcggcgtttccttcctccccgacgtcacgctcttttcctcgcagacttttttaggcacggaatggaaatggtggatcatgaaggtgatcatgacctgtatcgtcctcgtgtggaattacgtaggcagaaaactgctcattttcaaataaatccccgggcgttcgtgcggaaaaaacgtcgtgcaaaagcagtttgtaaagaaagcggactgctttttctttttcaaaggacttcgcggcgacagaagaagcctttaaacgggtaagatcttcgtttggggggaagcgatcggcaataaatatgctttttttataaattcggctaaaatattttgtaaattcttaaaaaattttgccgaaaggtattgaaattttgtaaaatgtgttgtataatataatcacctaacaaaagaagcgaaaacggcgtttgcattgtacgaaaacggatatatgggaaacgagagttgggtgcaacccgcgggcggcgtttttgcgattgaattaactacaagagatgtgttaaactccttttttgatgtcggaaaga

SEQ ID NO: 374 - DNA, 11804 bp, Unknown
  16S sequences of unknown bacteria
tttatatacttaattgtgatgaaaaatctctccttacctctgttaaactgaccttagccggcaaatatgggtcgtccgcataacgatcctctttgggagagtggagagatgaaccgcgctaataatcttcggaaacttcgggaggcgaaatgcctgacacagcccgagctggccgaacagttcggctcgacgcagtcggccatcagcaattacgagtcggggacccgcgaaccggatatatcccttctcatgaaattcgctgacttttttgatgtaaccattgattatctggttggccgcaccgatctgccttatcgagtggactcggggaatatcttttataccaatctcgaaaaggagattctccttttatgccgcgaacttcccacggaggaccaggagatgatggcgtcggtcggccggtatctcagagagaaaaaccgcgagaaaaaacggccgcgaccggttgatttgaacacttgaaaacaaagccggccgcctttatatccggccgcgtgtcatatcttcgggccgaaacctgttccggggagggcgctgccctccctctgacacgtgcagagagacaggtgatgacactttatgctgggtgaacggctgcgggccctccgcctgagcaggggcctgacacagcggcagctggccgcacggatgtttcgccggtgaacaccatatcgtcctatgcgcacgatgtcgacacgcccgacgacgcgaccaaaatctggctggcggaatacttcgacgtctccctcgactatttgatgggcttgaccgacattccgcttcctctcagctcttcccgcttggtgcgtatagaaaatcccccttccgcccccagttcggagagtcacgaagagagaaaagacggccataccgagccttcccgcctataaatatcgcttgcacgcctggtggggcctgctgcgtcaataatatgtagccacaatttttgtgttttcacattctccttatgaccttgaatcaagctacgcaacccggtccggaacacggattgttcgcggaccgggttgttcttttataaatggagcttgagtgccagatccaacgccgggccgtagggcagatgccggacgcgatggcgccgcctcttttccccgaagcagcgcagctcgacggtgcatccgtcggagccccgctgccaagggctgcggcggatgacggcgcaatcggttacctcaagggggatatatacccggtatagagccaatccccgggaatacccgatcgctgcggcactcctcccgaccccgaaacccgcctgatagaaccccaggaaccgcacaagcagccaccaggctgcccccgcggcccacaggaccgccgcgactttccagacaccgcccagccacaacggcacaaggcagccggccagcagccagagcgccggagccagatacccgaagagtgccgtttttttgggccgcaggatgcttgtgcagatgggataatcgggcagaaggacgtcgagtgccgcgcagagctccttcggccgggcggcggggatgagcaccggccgggcgccgctgtcccgtccgtagcccgccgcggtgatgaccgcggtatacaacccgaacaggcgcataaaaagtgtctggcgcagctccagggccgtgattttgtcgcagtcgatgagaacatcccgtcgggtaaaaagccccgagacgaggtgaaggcggttcccctgtcgctcggcccgaaatccgatataccgcagcagactgcgcaaaaacgcgaaagcccacccgaggacgagtatattggccacactctccaggataggcggcagcccgagcgagacgaaccggcggaacaggctgaccacctcgccgggcagctcttctcccagcaccttgcctgtctggcgcagggcgggcgccagcgcgagcaggccgagcgccgcgttcgaactggaggcggacatcatcaaaaccggccagagacgggcggtgtagcggtttttccccgcatgtccgaccccgctgcccatcaggcttttcgcctgcgcggccgacaggtaaaggaccgcatcggattttcggcggaggccggccgtattcacccggatcctccgcccgccaagcagccacagcagcggcgtacgttccatttccacagacgccgcatcctccgccgagatccgcagcacccggcggaggaccaccccctgggagagggtgaggctgtgcaggctcccgcccgcatattcccgcagatgatatcggcaccgccgccatttgagcaccgaatagagcagcagcagcgctgcgacgccgccgtctcggaccgaggccaggatcaaaccggcggccgtggtgtaggaatcctctagaaacggggcggtcaggatccgcagggccgggatgagcagcaggggaatccactttttcgcgtcgtagaatatatatgcgccgtacggatgaatttcgatattcgtcccctcccttcaaccgttctcgctgtcttccagcatttgtacgagctgcccggcctccctctccgacagcaggggcagcatggccccccctcccgcgaagcgcagcacaatggtacggcagttccatatccgatgcagcggaggcgcccagctttcaaacgtccgcagggcgttcatggggatgaatacctcccgtttccacagcactcccatccgggcgcgtacggcttctccgtcaaagctgccctccatcgaagcggcaaagcggggcggataccacaaaaacaagaatacccccgcggcggaaatggggattaaggcgagtaggatccagggggtgaacagcccggccagcagcccgatcagcgcagccagcaggacactggccgccgcaatcgccagcatgaggattttccgtgcaccctcaccggcgtgaaagtccatccgcccgcctccttttcggctgtccatccacctattcgagaggtggatgtcggccagcttatgcaatagtgtatgcgcaaagtccggaatctaaaccctgcccgcctcgtctttcccgatttttgcccgatggcataaacgccttatctccctgtacggtgggcatggacggcgcggcccggtgaatcgatgcaggcacccgagaatactttttctgtgtcctgtttgtgataaagcagcccgagccatcctttgagatggttcgggctgctttcctcttgttctaggtatactcttggcgaaggtcaatatagggggatgccgcgactgctaggcagtgtttttattccgatacgatctccacgtcgtaaaactggctcagcccatcgagctgccagcttccgttggtaaggaccagctcgtgcagcgtcctcgtcgacggcagcgtatccgaaatgaccaccttttcttccgtggtcgtctccagatgccgtagcaacctcgtcgcatccttgtgatacgcgcggccttcgcctatcaccacatcttccgctgcggcgagggagcccatatccagcagcgtatcttgtaccgtttgcgtggacaggggcaccagcagggccacgcatgccgccagcgccgcgccgaacttcatcggccggtcgagcgactgaatccccagcttcttcaccagccagccggtccaataaaacaccgtgaacagcgtcagccaggtgagcagcatatacaccatgctcatataccgctccgggatgtagccggagcccatggcatacagacctggggtaaacaaagtcgcatacaggcaaaacacgaggagggagaccagcccaggcagccggaaacggaaagccgtctttgaaaggatacgcaccatcaacgggatgcacagcagtgtaaagaataggatcggtgtcttggtcagccaggatgccaaatgatccagggcgaaatagaaggactcgaacaccgccttggccgggtgcatctgctcataccattcaattcgctcctgattaccgggcgccacgacattgatgaagaagcccgccgccaaaaataggaagacgggcagcgcccacagtgtctgccggcggtttttcgccagaacgttgatccccagcacaacagccagtgtacagcagctaaacagggccaagggataattggtcccgccgatcaggaagcccaggagacaggcggccgcggcaaacagcgggcgcttttcctttcggaactgcatacggatcaatgccgctgccagcaacatgaacaggcagagcggcagattgtaagcgatgaaccctgcataccagtaaaacgtttcttccaagggaatgaactgagtaagcaagaagatcgccagcatccagaggtatatcgtgttcttccaggtggagtgcaggaaatacttcaccacgcagcgggacagcaccaacaccgagaccagcgttgaaaaaaagttgatcaggcaggccacgggatagagtgacaggttatatccgagggggttgagaaaaatcattacatcgatggtaaaggccccttgaatattgaaataggtctccctggccagcatccacacattttgtatatagttgccgagcgaccagtcgctccccatggcctcgcggagtttggccatctgagagaagtcgtccgccgccggcaaagccaagaagcacattgccaccataggcaaaagaaacacaacaaacgccccaatcagcagcaggaatagcccgttttcccgaatcttttgcctcagcggatttcccatgaacgcaaaccctcctaaaaatagaggaatcgtacatcctcatcctgtatctctactttaccaatcagcctggccggcgttcccgcggcaatatggccgtcggggatgtcctgcgtcaccatactgcccgcgccgacaacgcagtgggagccgatcgtcaccccgcaggcgatcatcgacatgctgccgatcaccgtacagtcgccgatggtcaccggcccggtcttgaacggcaccttgccgccggatacgtaatgcttggtagagtcgtgggaatatacttgcacccctgtgttgatgctgacaaaatccccgacggtcaccggcgcgtgtatcccctcgatcagggtataggggccgacccacaccttttttccaagtcggacgtcgcccatgatcacactggtatcgtacaccgatgtgccctcgccggcgcccagataggccgccttgtcgtaccggttgaacagcagctctcccgtggggagaacccgatggaagcggcgggtcatggcctctcgcttttcctcaagataggccagcagctcctgttcaaatcgctcattgtccatggctgttcttctccgcgtaccagtcgagggtgcgcttgaggccctcctctagggtatattccggttcaaagcccatgagctcctttgccaaggccgagctcgcgcaaagtcgctgcacatccgccttgcgggcgggccgatactccacgccgccggtataattgtaatactcactgattacctcaaccagccggttcatggaaatttccatccccgagccgaggttgacgacacggccgcgggttttttcgttctcatacgccaggataaaggcgcgggcggtgtcctccacataaatgaaatcgcgcgtctgttcgcccgtcccctcgatgacgggtttttctccccggaatacccgtttggccgtaagggggatgatcgcggcgagttgctggtcgttctgccgggggccgtagttgttgaaggggcggaccaccgcgatgtccaggttcaagacgttgtaaaacgacagggccatcaaatccgccgccgctttgcccgcggcatagggggtggtcgggttcatgggatggttctcatccatcggggaatactgcgccgtgccgtaagcttcggaggatgaggaatggatcagggtatcgtacgcccgcattttcagcagctcgagcagcgtgttcatgatctccacgttgaccatatacgcgtcgaaggggttgaaaaaggaatagttgagcgcgatggtcgcgagattgaagaccacctcgatttgctccttttcgaatacggcctgcatcacgccgaaattccgcgcgtcgtcgcggtacaccaccacgttgtcatactggtccagcgccggctggagattctccatttttcctaaaaagaaattgtccacaataacgaccttggccgcaccggcggccagcagccggtcggtcaggtggctgcctataaagcctgccccacccgtcacacatacgttttttccgcgaatactcggcataacagttcctccgtcctgtcaaaaggcctcctcagcggacggccttttctcccttttcaatctgttcaattacatagtcctggtcgtcgtcggacagctccacatacagcgggagcgccagggacagccggtcgcaggcatacgcccccggaagatcctccggccgatatccgtacttatcccggtaataccccagcgtatggaccgcgtgggtcccctgccgggtactgatcccatgctcctccagatacgccatcaaccggttgcggaacgcgtttccctcctcgacgccggacaggccgagggcccggcaatccaccatcgtcacataggattgataggtatggacgtacccttccggcacataggggatccgcaggaaagacgcccgctcgggcagcagccggtcgtaacgggctgctgctgcccggcgtttttccagaatatacggaaacttttccaactgcgcctgtccaactgcaccttggatatccgtcatacggtagttgaagccgagctcattgtattccggcagcaggaagccgtgattttgatgacgggcgatctccgatacgctcgcgccatggctgcgcagccggcgcaccttttccgccagctccgcgtcgctggtcagcaccatgccgccttctccggtggtaatggatttacgggcgtgaaaactcaggcacgagggattaccgaacgccccctcgtggacaccatggatagaggcccccagcgcgcaggcactgtcctcaatcacctggatcgaataccgcgcggcaatggcgttcacggccggaatatcggcacagatgccgaataggttcaccgccaccacaccgaacaggcggtttccggtcgtcttattcaccatgccgccgtcacggggctcgtaatgctcctcgatatacgcctgcaggaaggccgtatcgagacagtaggtatcggtcgtgacgtccacgagcaccgccgtggcgccggtgtattccaccgcgtttgctgtagccacaaaggtgaaggacggtaccagcacgtcctgcccctcgtgcaggcccatcgcggccatgaccagatgcagcgcggtcgtacaggacgttgtcgcgatgccgtacgccgtcccctcataggccgccgtctgccgctcgaactccgccacacgcggcccctgcgccacccagccgctcttcaggcattcttccacccgccggagttcgtcctgtgtaaaatatggcacaatgattggaatcgtccgcatagtctgtcagttccttccctattgccgtcatgatatttacagccggagccgttacagcctgtccatcgccgcgtcgagaattttagtcacgcgcagggcctgttcgggtccggacagagaggggcgcccgctctgcacacagtcggcaaagtgctccacgctgttgcgcagcgcgtcctcgtgggggatgaagggcaccaaaatgtctccggtgcgcaccttgaattcgtacgcaccgtattcgtcgcctttctcctttttgatgatgccctggtcatagatggtcagcttgtccaccaggcgcatatcgtcaaagatcagcatttttttggtaccgccgatcatcacgcggcgttccttgagaggggagatccaactggatttgatgtgcgccaggaagcccgggtatttcatggtcagataagtcagcgtctcctgttcgccgtaccgcttttctccgatggcctcgacatggaagggctcctgcccgccggacaggtagtcgatgaccgccaggtcgtgcaccgccaggtccagcatggaattcacgtccatgcggatgggccctaaattgatgcggctgacgtcgaaatagatcaggtcgcccagctcgcctgaatccaccatgtttttgatgtaacggatgatcggatgatacaccatgatgtggtcgcagtggacgatccgccctttctcgttggccaggcggcagatgtcttcggcgcgcttggtgttggaggccatgggcttttcaatgaacagatgcttgcccgcggcaaggacgtccagtgccacctgatagctcggctcggtctggatcaccaccgcaaaggcatccacccggggatcgtccagatatttttggtactccagggagtattccacggtatccagatatactttgcgcgccttgtccaggctctcctgcctcgaatcgcagatggcgtataggttggcgttccgcgcggccatcaggtttcgtgccacgttcgttccccaatagccgtaacctacctgaaccacattaatcatgttcctcgactccttctccattccgtgtcgtttcatattccaaaggaatttcctcatcgatcaggaacaccggacggtcccgggcggcgtccagcgtcctccacaggtattccgcgatgatgcccagcgagatgttggtgatcccgaacccgatggtgagcactgagaccaaggtcggccagccaagtgagagagggtagaggtggaacagccggatgatgaccacggataggccgaacagaaagcctaaaaccgccaataggatgcccagaacactgatgaagcggatgggggcgaaagagaacgccacgaaggaatcgatgaacagcttgacctttttgcccagcgtccatttggatttgcccttggccctctccttgtaattgcaggtaatcagggtaaagcgatagcccatgttcaggatctgaagaaaaatggaggaattggcctctatgtggcggttcaggttgtcccgtattttggcgttgaacatcacgttgttgatgccaccgagcgggaagctcgcaaccgcgtgcttttggatcagccgggcgtaggtgtgggaaaacgccttttcaaaggcgctgatccggacctctcccttctgtaccccgaccaggtcgtagccctcctgtatcttgtcgtacagcaaaccgataagctccaccggctcctgcagatcggcggaaaaaaacatacagtactcagactgtgccctcccgacacccgcgcgcagcgcggcatgggaaccgtaatttttcgagaggcgcagaatcttcgcctgtatagacgaaaagggatattccctcagccgttccaccgaccggtcggtggaaccgtcgtccacaaacagcacctccagccggtacggcttgtcctgcgcatagccgtcgagcgcccggcacaggtcatggatattatcttcctcgttcaaaaacggaacgatcacggagatatcggtcttcaacgccatccctcaatcactttttaatattgatcgccacgacgcccagcaggatcagcaccaggccggccgcctgccacggcgtcagcttctccttgagaaacagcaggccgaccacggtaatcacgacgtagagaatccctgccgccaccggatagatataggtcagattgaactgggggacgatgaaggtgaacagcaggaagctgcagatgtaaaacagcatccccaacagcattttcagactgatattcagatggaacacgccctgctgaacccctaaggcgagatcctgccccccggccttaatcagcacaagcccgacggccgaacagaggatgtacagcgcaaacatcacatagagcatcgttttcgtcttcccttttcgttcgtgtcgcatatcgtcactcttccaccggcggccgggcgtggcacttcgggcagacgccgtcttccaatttctgcccgcagcggcaaacgtgcccgatgatccgcgccggatttcccaccaccagcgcatagggtgggacgtcccgcgtcacgacgcttcccgcgcccaccatacagtattccccgagcgtatgcccgcagacgatcgttgcgttcgcccctatcgagcagccctcccgcagcacggtctcccgcacctcccagtcggggttgcaggcacggggataatagtcgttcgtaaaggcgacgttgggtccaacgaatacgttgtcgccgatggtgaccccgtgataaatcgatacgccgttctggatcttgcagttgctgccgatgcagacgtcgaagtccagataggtgtccttgctgatgatgcagttttcacctaccgtcacattttcacggatttgggagttgatccagattttgctgcccgccccgattgacgccttgtccgatacatgggcggacggatggataaaaatgctcgcgtcgtccattcccgatccctccctctgtcaatgaaaggcgttgatcacgcgcgccaccgtttccagctcgtccgtcgtcagctggggatgtacgggaatcgagaccacctcattcttgatctcgtcggtcaccggatatcgggtgtccagatccatctccgcataacaggcctgctccggtatggataggggatagaataccccgaagccgattccgctatccgccagatattgtgtaaaggcgtcccggcggccgtttttgatccgcagggtgtattgatgatagcagtggaagcgctcctcctcccggaaaggtgtcacgatatccgcgtggcgaatgtgctcgtcgtaaaacgccgcattgcggttgcgcagggcgttgaatctgtcgagcttgtccagctggcacagcccgatggacgcggccatgttggtcatgcggtagttatagcccacgatgtcatgatgataccgcaccttcatgccgtgattgatcagcagccgggctttctccgcgacctcttgatgaggcgtgagcatcatgccgccttcccctgtggtcatgtttttcgtcggataaaaactgaaagcggcggcatcgccgaaggttcccacccggcggcctttatacatggcgccgtgagcctgcgcacagtcctccacgagcagcagtccatgctttttcaccacgtcgagcagggggtccatgtcgcaggcctgtccaaacagatggacgatcaacagagccttgatatccggctgctccgcaagctttttctcaatctgatcgaccgaaatgttgaaggtgcgcggatcgatatcggcaaagacgggcgttgcccccgtatagacaatggaattcgtcgaggcaataaaggaaaagggcgtggtcagcaccttgtcccccggtccaatgcccagcgcgcgcagcgccacctcgagagcggtcgtccccgacgtagtggcaattccatgcgctgcgcccgtataagcggcaaaccggcgctcaaattcctccacgaccgccccgcaggcgatcatgccgctgtcaatcacgctccccactgcttgcttttcctcttcgcccaaaaaaggctttgcaattgctatcatcgttgtacccctcctgctttttttagacggtggcggttcggcgcacacccgtcttatacaataataaatggctgaaactcaaggatatcattgcacgcaaaaaggcgcatccctccccttataaaggggaagaatacacctttgaaatttatgcaatttaccacttgacaagtttacatgaacaaagttatgcttgcttgcttgcttgcttgcttgcttgcttgcttgcttgcttgcttgcttgc

SEQ ID NO: 375 - DNA, 7975 bp, Unknown
  16S sequences of unknown bacteria
atctcggatatgactaccttgtgttcgataagagggcgtcaaaatgagcgaagaacacaacaacggcggtcctccgctcaagcacatcattccgttctgggaaaaagctactatgacacttgatgaagcgtctgaatactccggaatcggcagaaacactctttacaggctgacaaatcagaataactgcccattcgtattatgggttggttccaaaaggagaatcaagcgtaaacagctcgacgagtttatttccagatcgtactcgatttgatgacgaaaagtcaagtatgcgatttggaaaatcgcatacttggcgactctcattcttctaagtaaactctatatgggtaaaccgaacaacaatctaaatatcaaaggagcaactgttatggcacaagaaaagagacgggataagtcaaggatcgttctttgcaaaggagagttccagcgacctaacggaacataccagtacggatggaccgacagtaatggcaaaaggcacgtcatctatgcaaagactcttgacgaactgagggagaaggagcgcaagatctccaaagacaaggttgacggcattaaatccgagtcaaggttcatgaccgtgaacgatatgtttgacatgtggaaggaactgaaacgcggtctgaaagataacactttcagcaactacatctatatgtacaacacattcgttcgtgacacgtttggatacaagcgtatttcggagcttaagaaaagtgatgtcaagcgattttataatactctgatagaagacagagggttaaagcccaatacacttgacaatgtacacacggttcttcatcaggttttcgagatggcggtcgatgatgattatatcagaagcaatccatcgagcaacgtcataagagaaatcaaacaagcttacggaataaagatcgaacgaaggaaatcattgactctgcccgaacagaaattgtttctcgactatctctcgaggaacaatgccaattcacactggtacccgatcttcgcttttatgctcgggaccggtctcagagttggcgaagtcaccgggctgagatggtgtgacattgatctcgatgaaggatacgttgacgtgaaccacactttagtatattacgctcacagtcttccgggatataaagaaggatgctatttcgcaatcacttctcccaagaccccttcaagcgtaaggcaggttcctctaatggattttgccagagaagctctcgaacaggaaaagctttatcaagaaggagtaggcttgacctgcaacgtcaccatagacgattatacggatttcgtgttcctcaaccgaaacggatctgtatataacgaatcctctctcaacagagctttgaaacggatcatacgcgactgtaacaccgaagagtttgaaaaatccgaaacacctccggtactgcttccgaacttcagttgtcacaatctgaggcacccttatgtcaagcccacgacaaaaaaatatttattttttcttgtccccataatccagctttcttgatagggattttgccgcctcccgtttctgttcggcggcaaaaaaagcatgaagccgttccttttcttccggcagcatacagccaaaagttgtgctgccttttctgtaataaaacgcaatccgcataatcaatccctttccctcatttgtgagctgccaaactgtcccttatcttaaattcaacatccacccgtttatcagggtaaacataaatcttatcaatcagaagatcaaccaattccgaagtcagcccatcgctttccgtcagcatccgggaaatatccatctgctggcgctggtggtgccgttcttcctgttcggcttcaagacgggccatgacaaccgctttggtattctgcacttccaacagcctttcactgatctgctctttttgctccttatatttcgggagcggaatccccccggaaacaagcgattcatacagcttccgcttttcttcctgcagttcaaaaatctgccggtcaaagtcagcttgacgtaaagcaacggtatctaccttacggagatccgctaagctgtcaacgccaaatgctacctggaactgtttgcacagtaattcataaacaagctggttcagttctttttctcggatatgaatattatagcagtccagtgagggaatcgtgctggaaaagcggcaccggtaagatgtcccgtttgccaggtgcagggcatgtttacagcatccacagataaccttcccacgcaggagatagttgtgctttttcctgtttggaatcttaaaacgctgaatagaggcattggcctttgaaaagatttcctcattcaccagcggtatatgatggtccggtattttgatccagtcgctttccgctttgctccgcatcttgtggccgccaatttccgtaacctctcttttgccaatcacataagtgcccatatatcgttcgtcagcaagaatccgaagcaccgtagaattgcaccacattccgtgagttcttgaaacatcgtgtgtcttaattccttttcgggccttatgttctccgggcgtaggaatctgctgacgggaaagctcccgtgcaatatcggctgcgttcatgccatttacggcatattcaaaaattttctggactacttcggaagtctccgggtccggcaccatccgtccgttttcccctttgcgataaccgtaagggcagattttactttggtattcgccacgctggaatttcaggtatttggccgttttggtctttaccgacatatcacggctgtaatactcactgattaaatacttgaaggcaacttccatacctccggtatcaccttttaacttttgggtgtcaaaatcatcattgacagaaataaagcgggtatggaacaacggaaatacccgctcgataaagtagccggtttccaaactgttgcgaccaaaccgggaaaaatcttttaccatgatacagtcaatccgattggcccgtaccaggtcaagtaattcctgcacagcagggcgctcgaagtttgccccgctgtacccgttatctacaaactccataagttccgcattggtatattcaggcagttcagaggcatattcccgaaggatgcttcgctggctggaaatactcatactatctgttttggcgtcctccaaagaaagacggatataaagagcaatcatatactttttcattctgccgccgcctccttaaacgcctcaaattccgtacggaatgtaaattttacatctacctgtttatccgggtagactgtgatccgctcaatcaaacgctcaatgagagcggcagtcagggagcctccggccaaaagttcctgctcgtctttttccaggtccttgcacttttcggtctgtttctgacggacggcagactggttttcataaaagaaaagctctttttgggccgcctgcatctgttcttcgtaagtcgctttcaaaacgaaatattcttcgctgtcaatcgctccgttcatcagactttcataaagagtttgcaaaaactcacgactttggttaagctgtaactttgcccggttgattttctcacgggtggcagcctctttttcctgtttttgaatgttgtcgttcagaagcagcgcataatcccccagaacggcggctaattcccttttaagaatgtccagcaccgttgcgatcagctcggtttcgctgatggaaacaccagcgcatttatctttatgtaccctggtaggggtcaggcagtggaagcgatatgaaccattgcattgttggcgctgccggtgcaggcttctcccacagtctccacagaaaatccgccccttgaaaatattgggcgtatatggaataaccgggtgcttcttgctttcctcggccacttctgcccggtacttctgaacggcatcgaaaatctctttggaaacgataggctcatgggttccagtaacgacaatcaggttttcctcgcctgcgggcacctgccggtgaaggaccgtttttgtccgcccttgcaccatgtcgccggtatatttatcctccttcaaaatcttggcaactgtccaggtctgccagtagccgcgccctgctaacgcctgatgggtgatctccccggtttgcatcttatactttccgggagaagggtggtttccttcattgagcagaagcacaatccggttgagggggactttttcataagcccactggaaaatctggcgtaccacaggagccgccaccggatcaataatcaatttgtgacagtcatcagggtctttcatatatccaaatggcgccctgccacccacatacttgccctctttcatatcctgacgggcctgggcctttatcttgcgtcctatgtccagcgcataggcttcgttaatcatatttttcagcggaaggataataccgccgtggagattatcagcattttcagagtcaaattgatccgtaacgctgatgaaccggacattatgggaaggaaaataacgctcaatgtaatatcccgtgtcaatggcattgcgtcccaggcgcgacagatccttgacgatcacacagcctactttgccggattcaatatccgaaagcatccgctggaagccgtcacggttgaaattcgtgcctgttgctccgttgtcgatatagatgtcgtaaagacgcagttcgggtttcccaaataggaatttttcaagaaccagcttttgagtttcgatagaatttccacgtttattgttatcctccacagacagccggatatacagcgccgtactgataaacgggcaaacaggtatggcagcctgcgctgtattatgcttcctgctttttcttgccatttcagaccaccatcctttcctgtaccggcgtaatcagggcaagtgctttttcgtattcgtcctgataattaaattgaatctgcaattcgtctttccccagcactgtgataacctgcacaagctggatgattgccttgcggtcaagttcttccagatcggaaaaacgcttaaaattctcaatccagcgattcctttcactccggttttccataacatccgcccgtttttctttaagagcggcaatcgcctgttcaagctgggtaatccgggcactataactgcttttgttataaaggaactccgacttgtccagaaatccgtttaccatactttcatacagtttcattttatattgacgaatcctctccaactgctgctcattctgggtgatctgccgcgaatactctttgataagctcacggttgatacggctctggtctatgccggataagatttcatccagagagactacattggcaataaaccctttcaggctgtcccgcacgcactccatcagctcattttcctttaccatgaccggatgagcgcacccattcttctttccggtaggacaatagtaatagtgatactctttgtctttatagcggttggttttacgtaccatccggcttccgcagcagccgcagaccagtatgccggaaaacagatagactttatctttttggggagatgtacgggtgtccaggttgcgaatcctttgtaccaggtcaaaatcattccgatcaataatggcttcgtgagcattttccacgcgaatccactcggaggaagggcggctctccatctctttcagcttaaagtgctgagaaccttttcggccctggaccagcgtgccggtataggtttcatcctgcaaaatccgggtgacggtatttgccgaccaccggcaatctttccggtctgtatagcctttcttggcatggggaaggccataatactttttatatgccaggggagagagtgtacccagccggttcagctcattagcgatggcgtaggggctgaatccttccaggcgcatcctgaaaatgctccgcaccacctgggcagcatattcgtctaccacaagaagattatgattttcttcggatttacgatagccataaaccgggaaagctccaacgaaatcaccgttcttgcgctttgtctccagagaacttctcgtcttgatggaaatatcccgtgcgtaggcttcattcataatgttctttactgatacagtcaggtcatcgcctgcgctttcattaagagtatcaatattgtcattgatggcaataaacctcacgccataggccggaaagacacggcgcatatagcggccagtctcaatatactctcgaccaagacgggaaaggtctttgacaatgacgcagttgatctttccttccatgatgtcatccatcatttccttaaaagccggacggtcaaagataaccccactgtacccatcgtctaccttttcggaaaccagctcgatttccgggtgacggctcacgaaatcttcgatcagctttcgttgattgccgacactgttgctttcatttgatttgtcatccgtataagataagcggatatatttggcagccttataaacctgcatagaaaaacactcctttcatcacggaaaaatccccgcaattcaaggagtgcagtctgcttatcggtattcaattccttttccatgtttattataacgctccatgcgggaaaaatcagcccccaaaatgaaaaaaatcagcaaatttcagcgaaggattccgcgcagacattcctccagggtggcaccttcctgggaaaaacttgcccggacaacaaatctgccgcatttgaaatgatacgggtcccggatctgccgaataaactcggcaatcctttcttctcgcggcaaatccttattaacagatacatcccggatgtcggcaagtttatctgcctccggtgtttgaatgaccgtatatgccggtgtgtgactcataacagcagctcctttcctttcatactgaatcatcaaaatcacatgaataaggccggacacactgaaagagtggcccggcctcatggtatctgatttcgattttataggaatccatgccgctgctcgaaaattaaaacaacggcatggatggtttttggtaacttgccgtatttgccacgccccccggcaggcccttttcagggccggggatgccacaggctgcggtcagctttaccgcatcatagccctgcttatgccgtcgcttcgccagagctaacgaacacagaagggactccccccaagtctttgacgggtcgtgagaaagtatcattgtgccctgtatcggtcatcgcgcctggcctgccacagccaggtcaatggattgcgtagatcgctcgtacggctgggcttcaccacctccttaaagccgtctgtcatcgcgccgctccatttgccgctcggaatacagggaaagtacctatggcaccgtatattcagttgtcaaagaacaagcgagggatgtggcagttatgacagtatttcagttgggcgggccggaacgtgtgttaccggccacacccatcaggcttgtcccgccgaatatgtccctctattattcatttcattttcaggcgtttttttcggggtctgactccatttttttcaaaatttttttcagacgccgaagccctctctggattccttcatgcacagagctggcgccggaaccttcgctttttgcaatctccgatatactcatgccgagaagaaaatgagaagtgatccggctccgctgtttttcaggcaaggaagcaatcgcctggtatagccgatcattttcttctttctgctccaaaatatcagccggtgtcagaaccaccaccagtgcatcacgttccacattggtatcgtaatccagtgaaaagtatgctttatgccggtatgtacgcagaaaagaggctgcctctgctaattttaattcatagagaagggctgccacttcgtccggtacttcaacaatagcgtcctgtgtataaaacgggtaataatcccgcagattgatttctttcatggtaatcctccaatttcgatttttgagtgggttaatgggcaaatcgaaatcagaggggcggtgatctacaccg

SEQ ID NO: 376 - DNA, 2168 bp, Unknown
  16S sequences of unknown bacteria
aacctacggttttggagaccgctactctaccgttgagccactcccctaaacaacgaagccattatataataaaaaaaattttttgtcaattatttttcgggcgaatcgggtcggaatttcaagattattttaagtttttagaaaaacgctccgtatcaactcccaagaaaattaaaaaaggaacgaggaatgaagaaacaggtcactttgtataccgacggagcctgctcgggaaacccggggatcggcggatatgcgggaatccttatttacggagagatccgtcgggaatataacggcggggagctttccaccaccaataaccgcatggaggtaaaggcggtcatcgtgggacttcaaaagctgaaatatccctgtaaagtagacgtatacagcgactctgcgtatacggtgaacgcttttgccaatcgctggatttacggctggaaaaaaaacgattggaaaaaggcggacggaaaagcggtattgaacatcgatctgtgggaagaacttttttcccttgtcgaaatgcacgaagtagtctttcataaggtggcggggcacgcggataacgagctgaataatcgctgcgacgaacttgcgcgggcggcgatacgggatttgagaaattcaatccccgcagctgccgtgcaagaggaatcgagtatataaatatccgcttcgaagcggatgattttatcggaagtataatatttttaaagcagaaacgctataatatattaacggagaatatgaattttaaaccgtatggagtggagaagagatgacatccaaagaaaagcgcagcgtagataaagagtccgaaggctttacgaaaaagggaatattggtcagcattctcgtttcgctggctttgacggccgtctgtatcgtctttgaagttttgtgtttaaaaaacttcaaaatagaattttttgtcaaatattccacgctgttgatctcgcttgcctgtgcggtgactatcttgtattgtctgactgccatttttttctgcgcaaaaggaaaaagcacggcgtaccgggtcctgttgagcggctatctgctgattattttctttctcgtcttgctcttcattttacaaaagacgggatttctcgaaatttttcagaatcccgacctttataaggaatatctcgaaaaagccggcgtgtggatgcctcttttatatatcgtgctgcaatatctgcaagtggtgattttgccgattcccggcgtagtcagcacattggctggcgtggcgctgttcggggcgaccaaggctatgttatgcagtttggtcggcattattctcggctccctgaccgcttttgtcatcggtaggaaagtcggctataaagcggtcgcctggatggtgggaaaggaggacctcgacaaatggctgaaaaaagtaaagggaaaggataactttatcctgacggcaatgtttatcttgcctctttttccagacgatatgctttgcttcgtcgcggggctctcttccatgacctggcaatatttcctcatcatgatcgttatatcgcgcctgataggaatcgcggctacttgctattcgatcgattttatcccgttcaatacttggtggggaatccttatttggatcattctcatagccgtcgtcatcatcgctttcgtgctgctctataaaaatctggacgcgatcaattcgtggttcaataagaaattcagatggggaaaccgcaaaaagcaaaagacaaaggaagaaagacaatcctcaaaagaaacggagtcggaaaaaaaggcggggaaggagccggacgcgccgaagaaaacggacggcggaagttcctaaaagccgattgataaaataggaagaaaagcggtataatagtagaaaagtgccgctgtcgaccaaaattctttcctgaaacaatattgatagaatcgacaatgcgaatggagcgggcgcgcacaatcggattgtcgttttttattggaaaaaagtcgtaaaaagacgtaaaaagacgtaaaaacttgtcgcttaggggttgctttttggatttatttggagtataatgatattcggtaaaaatttggcaaaaaaataaccgaccgattttttaacaaccgatatttcttggaggagacattatggataaaattcaattgctgcaagaaagaaaggcgaa

SEQ ID NO: 377 - DNA, 5618 bp, Unknown
  16S sequences of unknown bacteria
gtcgctgttttcgagtaacaccccggaaagcgcgaccgcgtcgtcgatgtcctcgtcggttccggtcacgggagcgcacttcgcgctcagaattatcgggtcgtgtattatttcattttccatttatttttcccttcatcaaaaaatgcggttgcggacgatatacgcggcgattccctcgcacgcctcgcggatgtcgcggtaggttatatcgaatctgccggaataccacgggtcggcgacgtttcccgggcgggtcgtgaagtccatcatccggcgtattttcttctccgggtcgcctccgaaaatccggcgcgcctcgcggacatttccggcgtccatgcagacgatgagatcgttcgagccatactcggcggggctgagcttctgcgcgcgcttcccgcggcagtcgattccgtgcttcgcgagctcctccgcggcgggcgggtagacaggcgctccgacgccgcgatgtatctcctcgtccgaaaccgcgcgggaggtgattatgaaattgccgggaacgtcgctcttctcaaggatatcccgcaggatgaactccgccataggcgagcggcagatgttgccgtggcagacaaaaactatgccatacattaagattccccgttccttcctcgtacatgaaataaatccggtttccgcgaagtcagcctttcatcccgcctccctccgagtgcggacggcaaaaagccggacgatagtattattatataccacgtccggcgtgttgtcaagtcggaattgtatttattatgtaaaaccgcgcagatcgggcttccggcggcgggcagggatcgcccgcgctgtcttcttatctgccttcgaagaagtgctcgttgacctcgtcaatcttcgccttcgccattgattccttttccgcgtaatatctcgggaaattgtgatccgcgtcgagcgagagatctctgccggtactgttgaacagactcatgacgtcccaataatagtacccgaggtcaaagactctgccgtccctgattatgtcaagcatctggacagaatcgtcgtcccgcgtgtatttcgactgaaggacagtctcatagtagagcggcatgacattcttgcttccgtcgcggcagagcgcctctattattatcgaagtgcgctccggatccgggttcgtcaccggaaccgcgaccatattgcagccggcgtcgacgttcgcgcggtacttctcctcagccgcgtcgaatttcggccacggcagaattccgaagtcgtcgttcatgccgcggaaaagcgcgacgttcttgacgttcatgtcgacaaacagcgatcttccggtcgtgaagaactccacgagcctctccgaacgccagtccgggatgatatacgccgagtcggaatcggtcatcttgaagaacttgtcaaatatatcgaccgtgcgctcggtattcagggagagatacacctttcccgcgtcgtccttcttccatatcctctgaccgccggagtagagaacctgtatcggacctatccactctgtcgtcacataaccgagacggtcgtcctcctcgcttatcttcgcgtctccgttcaggtcggacgcgccctttttcacaagctccgagaagacgtcgagcgtccagccgccgtcacgaaccgtgtcatagatatcagccgcgccgatatccgcgagaatgcgcttattgtagaacatacagtcagccgctccgaggttcatgtagctgatatctccggcgcaggtgtaaagcttgcccgctatcgagagattatcccgcgcgtcctggttccaccactcgccgtcaaggtcgatatacggcagattttcgttccattcgagcagcaggtcgttgtgcgaatactgcgacagacgtctcgcgtggcagacgagaatatcatacgagtcgtcgcccgccattatcgtgttcatcgcttccttgccctcgtcgtcgccgctcacgctgaacattttgaaattcaccccataagtctcggacacacggcggttgcgctcgaaaatagcgtcgttcattgtttcaccgtcaagatcctccgcccacatatccgggatgaacgcgtcgtcgccgcggatgaacatacggaactcatatccgccgtagtcgcgctccggcagaggagaatccgtctcgtccggcgcggagctgaccgtatcgctcccgccgtcggtcgtgccggtcacatccggcgtctgcgccgcgcccccgcaggaggtcaggagcagagccgtcagtatcagtgtaaaaaattttgtcttttcctttttcattttgacttatacctttccctgtgaaatccggcacacgccggatcttttattacattataccacatctgtccgccaaatggaataacaaaaaacggggattcagtatcaaagccacaggtcatatatcatttcacgctgtttctgaactcagccggggtcatcgagaacaccttctcgaaatgccgccagaaatcggtgcggttcgtgaagccgaccctgtccattatctcgtcgatcgaaaggtcagtcagccggagcagccgcgccgcctcgttcacgcgccgttcgcggatatagtccttcagcgacacgccgaaggtgcgcttgaaaacctcgccgaaatagttcggattgtagaagcagcgctccgcgatcttctccgcggtcagcttctctccgaggttcgcgtcgatatactcaagtatacccgcaggtatacggcagggcgggcggttcccgccggtcagccttcgtatcagctcactgaatattatcgacagacagccgcgtatctccgcctcatagccgatacgccgtctcgtatactcatcgagcatccttcggaacagcgactccacgaacagcatctcctccccgtcgaacgccgtgaagggtatctccgcgccggtgaactcccgcagctccgaaaactgcgacagcgcaagtatctcaagaaaattgtcacaccccgcaagctcacgcgaaatgaagcccggagacaacaatacatccagctgcgtcatcggcgtctcaggtctgatatcatgcaccgacccataatttataaatatcaccgccccgcgccgcaccggataggacaccccatccaccacctgcgctcccgtccccgaaaacacatacacaagctccgcgaactcatgcgtatgctccgcgacgtctcccggactatgacacctcttcgttatcgaaatgtcgcttccggtctcgaaataatctgttttgcggtaattcttcattgcagttcctcctgtgtgtcggattactctgaccttttcgtttaattctaacacttatccatgcggaaatcaagacacaaatattgaattatcggagatttatgaaagatatccggcagatcgtttgttaataaattgtaaacattccccatcccacttgacaagtaaccgaacggtaactataatataagcagttaccgttcggtcacttttatgaaatggaggaaaatgatggctgagaacacgaaggacaggatcatggagacggcgctcggacttttcgcggaagaagggttcgaggcggcgtccatgagcgacgtcacccacatcagcagaatcgtcatcgacaacgtcatccttaaaggcacagccgcgagaccggatcagatcatgatcggaagccgcgtcgactccctgtcgataaacggcgtctctgcgggagatgtcaggaagggcgagctgatcgaaagacgcggcaacggggaagtcgacagcctgacgataagataaccaaatatacgggcggaaaacgccggaaaaaagcggacggactccatatctcggtgtccgcccgctgtcgtattgattcagacttttttcgtgaaaacccggttctttcagcggtttcgcgacaggaagctgtcaaagccgtctctgatacgattcatgtcgtattttataatattatcgaagctgtcggtcccgagcagatatctcacgaaccgcgcgccgagataatagccggtgtccgggcggccctcaaggctcacccaatcgccgaagtatcgctgattctcccgcgtcatctccggaaggtcgcgggcaaacgagcgcagaataaactccgcgtgttcgtcgcaccaccgcttccagccgtttttatcctgatggaagtaatcggcgctcccgacgacctcctgctcgaagaccatcgcgacgccctcggaaaacagctggcggaggaactcatccggcgcgcgatccgcggcgggggctgagagaccgtaccgcgaatgccagacatgaccaagctcatgaattataagtccggtcatgtcgtcgactccgcaccagtcaagctcgattatcttctcgatcccgagaagcacagtcgttctgccgccgatccgagcgacccagcccgcgccgccgcagagcccgacataaagaaccacatccgcgtcgacagtcctcccgaaaacctcagcgatcctctcgtcaaggcgtccggtcacaacccggaacgagcgtacagccatctcacgcttaaaaggctcaatcatcaccgactcaagcaccgggagaaaactctcctcccacgaataccccgcgccaaggcactcctccatgtctgaaagacacagctccgcagctcccgggatatatttctccatataaattttccatctgtcaagatcaaaacgcccattgtcgtacaacgaacagattccgggcgacgtatcaattatgttcatcaaataacctccggaaagccgcgaaggcggcactgattgatggcacagcccaaaaaatacaaaaagccgcaagcgtaaacctgcggttttctggcgttcccgaggtgattcgaacacccgacctaccgcttaggaggcggtcgctctatcctgctgagctacggaaacccgagtgcctcggggcgcatagtcaatgtttcggctacagtcggatgaaggctctgcctcatcaaacatcctgcgtcgaaaaagtaaccaaatgtccctcgacctatttattataccacctccggagagatttgtcaagtacttttttcaaaattaaccgtttatctattgaaaaacgcgcggaagagaagtataatattcttaatatcattttccgaaaggtccgaaattccaatgaaacgcgctgtcatcggcatcgtcgctcacgtcgactccggcaagaccaccctctccgaagccatcctcaaagcctccggcgtcatccgcgccgccggccgcgtcgaccacggcaactccttcctcgacaccgatcaggtcgaaaaagaacgcggcatcaccatcttcatgggctccgccgccttcgaacgctccggagtctccttcaccctcctcgacaccccgggtcacgtcgacttctcgcccgaaaccgaacgcgccctccgcgtcctcgacgccgccgtcctcgtcatctccggcgtcgacggcgttcaaagccacaccatcaccctctggcgcctcctcgcccactacgaaatcccaacaataatcttcataaacaaactcgacatcgccgcgagaagccgcgaagacctcatccgcgaactctccgacaccttcggctcaggcttcgccgacttcaccggcgaa

SEQ ID NO: 378 - DNA, 3445 bp, Unknown
  16S sequences of unknown bacteria
agcatttgctctgcaaaaaatgccagaaatgacgtacacgccgtcatttctgatttaagcctcgctctttcgatactttgtcaaggctctgggctcccctgtgtaaggggagctgtcagcgaagctgactgaggggttgacctttgcgctggcagcgaagcttgccgagaatgcgtactagctttatcaacgaacaaatcaacgctttgcaaaaaccactctggaggaaaacacatggatggaaaccaactgctcgcgcggatgaagcgcctggggagcgtggagacgatcaaggacgtgcatccgctcacggcggccatgttccccggcacccactgcccgctgatgggcgcggccatggccgtgcgcggcatatcggacgcgctgatgctcatcatcggcaccgacgagtgcacctattacaccaagcatttcagcgtgcaggcggaaaacttcggcggcctgcacggccgctgcgtgtccgtggccctggatgggcacgacgtgacgttcggctgcgcaaagaaagtcgaggcggcgtttgccgaaatgatggaggaataccacccgcaggcggtgtttttggtcaccacctgcgtggtggaggtcatcggcgacgactttgacgccgtggccgccgcgctcaccgaaaaatacggcctgcccgtgatggccgtgcatacggagcacttcaagtgcgaaaaccacctgcccggcgtggagcgcaccatgaccgcctgcttcgacctgatgcgcgcgcgtccctgcgatggcagcgtcaacctgctgggccagcgcctgggcgatttccaggaaaccgagttgtttggcgttttgcaagaggcgggcgtgcgcgttggcctgcgcctgccctgcggctgccgcgtggaggatatccgcaacgcgcccgcggcccaggtgaacattgtggtggacgataccgccctgcctttggcgcgcaagatgcgcagcgcctttggcacgccctacgtcatgttcgacaaattcgccgcccccgcgcgcatcgcggcctgctaccaaacgctcttcgacgcgctcaaactgccccagcccgcgcggctgcaaaccctgcgcgcccaggcggaagcggcccgcgaggaagccgcgcgggagctgcggggcgtaacgtatatctacggcaacactcccttgcgctgctacgaattcaaccgcttcatggtggaactgggcatgcagccccaagtgatccagagcaatgccatcctgcccgaggacgaggaggaccgcgcggccatcctgcgccattgcgacccctatatcaccaaaacggccaacatcgccccgctgcaatccatttacgatgtgttgcaccccatgctctatctgggccacgaatacgccgcgcgcctgcgcgccaagggcattgccctcgtgcgcacggacggagtgagcaacatgttgggctatgagatcacgccctttgtgacgcaggcgttgcgcgccgccgcgcgggaagcgcgcgccctgcgggaaggaggcgccgcatgagcctgtgccgctattttcccacgccctcggaccgcatgggcatcctctggagcctgctgtgcatcgaggatagcgtggtgttggaatatggccccgcgggcaccacgcactatagcatcagcctgtttggcggcctgggcgtggatcagcagaaccgcctgttcaccacccacatgagcgaggacgacgtggtgatgggcgacgtttcccggctggagcgggcgctcgtggaggtcgatcagaactacgcgccgcgggtgatcttcgtggtggcctcgtccgtttcggcggtgatcggcacggatttgcgcggcgtgtgcgcttacatgcaggaaaaggtgcgcgcccgcctcatcgcctttgagcagggcggcttccgcggcgattacagcgcgggcctgtgcgaaacctatcgcctgatcgccgaacaggcggtcgcccccgcgcaaaagcgggcagagaacacctacaacctgctgggcctgtccgccggggcgtaccgcgcgcgcagcgaccggaacgaaatcgttcgcctgatgcgcgcggccttcggcatggaaatgcacgcctgcctgtgcctggatacggatatgcgcgcggtggaaacctgcggcgcagcgcggctgaacctcgtgctgcgcggggaagccctgcccgcggcgcgaatcctcgcggaaacgtgccacacgccctatgtggcaggcgcgccctatggctacgcgggcacgctcgcctggctggagcgcgtggccgacgcgctcggccagcccatcgcgcccgaactggtgcgcgagctgaaggagaaaagcctgcaggccagccagttgcgcatgtacgcccgcatgcggaaacagcatcgccccaccgccacgctctacggcgaatacgaaatggtgcgcggcctggcggcgttcctggaagaggtggggctccgcgtggaaaaccgcctcagcgcgcacagcctgcgcgcgctggaagcgcccgaccccgccgtgcgccacctgccggtggaaaaggagcgcatcgaactgctgcgcggcctgcgccatcagctcgtgctggccgacgaggtctcgcacgcgctgctcgcgccggacaacttcttcgtgcgcgcgagcatgccgctggtgcacggcgcgcagaccgccacccacctgcccctggccgggccccgcggagcggacgccctgctcgagagcgtggaagaatacctggaaaccctcgcgtaaaccccaaatggaggaggccaaaccatgaaagtacaaatcgtgtattccagcctttccggctgcacgcgccgcctggcggagggcattttcgcggccctgccggtggcggacaagcaaatttttgatctggcgcagggcgaaccggcgctcgacgccgatgtggtgctcctgggctactgggtggataagggcggccccaacgccgccatgaaagcctttatggaaaagctttccggcaaaaccgtgggcgtgttctgcacgctggccttctgggccgattccgcgcacgcgcacgcctccctcgccgcgggcgcggccctgctcaaggagaaaaattgcctgctgggcggctacgtgtgcaatggagccatgtcccaggcgatgatcgaccgcttccgcgccgccggtaccagcggcccgcacagcgcttccccggccagcgaggcgcgctgggccttgctgaaaggccatcccaccgaggccgaaatcgcgctggccgccgagcgctttggcgagcgcatccgcctgctggaaaccttgcaaagccaggggctggaatacgcctcgatcgccctctaaggccgcgcgcccgttttcgcgccgccgcggcggaaggcttctaggccattcacgcgcagcactccgctttctcagcgcttgtatcgccgaaccaggtggcaagcgct

SEQ ID NO: 379 - DNA, 17510 bp, Unknown
  16S sequences of unknown bacteria
tccccgacgcgggccggctccccgacacggggtggacccccggcgcgcgaggctccgacgccgggcgccgccgcgcctgcccaacccccgcggcaggacttccctccgcgggccttctcccctctgcgttcgaccgcgcttccgcctgcgcccggtccggggcatggcgcggcgccccggcctgcgcgcccgcaggccggggcccgccgagcggctgatcctgaagctcgcggcgctccgcctccccggcgcggtccgcgccctccgttttcctcttgtctgtcataggcttcctacgctcccgtatcgtgatcgcgggcaaagggcccgtatgttaacaacgcctcattataccatgattgcctgcctttgcgcgaatcccgttcctcatggagaaacggcctgcgccttctgcgccgcttccacggcctcgcacaggcgcgccgcgcagtcctgcgcgtcctcccagcgggcaaggcccgtgcccaggtccacgtccggccgcgtcgcgccgtggaagtcgctgccgccggtgacgagcagcccatacctgcgcgccatgcgccgcagaaaggcctctgtcgcgggcgtgtgcgcgttgtggtagcactccaggcccatcagccctgcgccgcacatggcgtgaatccactgctccagctccgtctcgctgagcttgagcaggccgccgtgcgccaatacaggaacgccgccggccgcgcgaatgttccggatcaccgcctcggaggtcatctttcggcgctcggcataggcgcgcgcgcccaggccgatgtactcgcgaaaggccgtgcgcacgtccggcaccacgccgtgctgcacgagcacgcgggcgatgtgcggccggccgatcgcgccgcccgccagcgcctccacctccccgacctcgatggggatgcccatgccctgcaggttttcgatgatgcggaccatccgctccacgcgcgccctgcgcatgtcctccagcatctcccgcatgacggggtggtccggcgacatgccgtagcccagcaggtggacctccagcgccacgcccgagctgatctccacgcccggcaggacccgcaccccggcgcgcgcgcccgcggccagggcctccggcacgccgtccatggtgtcgtgatccgtcacggccagcagggagaagcccctctgcgcgcccaggcgcaccacctgctcgggcgccagcgtcccatctgaggccgtggtgtgaatgtgcaaatccagcatggttttcccccctttacttcataacctataggtatttgccggttgcccctgcttttcctgccaatcggccaaagtttaacctatcgttcgtttttttgcaaaaacaggcagcgtccgcttgcggaacgtctgcctgtctgcaacaaatcttacgcgttcaggagggactcgatggggttcttgccgccgtccaggggcggcagctcctccccgcgcatgagcgcggcgaactcctccttgtcgagcttttcgcggttgatgagctcgcgcgcgatgcggtcgagcttttcgcggttctcgttcagcagctgcgtggcgcggtccagcgccgcgtgcagcgtcttttccagctgctcgtccacgcgcgcggccagctcctcggagtagttgcgcgcatggccgaagtcgcgcccgacaaagacctcctggtcgccgcccaggtagacgggcccgatctcgtcgttcatgccgtactcggtgatcatcttgcgcgcaagctcgctggcgcgggagaggtccgaggtagagcccgtggagacgtcgcccaggacgatcttctccgccacgtggccgcccaggagctcgacgatctggtcgcgcagccgcgcgccggagacgtagtgcttctcctcgtcgggcatggtcatggtgtagccgcccgcgccgccgcgcgggatgatggagacctcgtgcaccgcgtcgcagccgggcaggacgtaggccagcaccgcgtgccccgcctcgtggaacgcgacgagctccttgtccttctccgtgatgacgcgggacttcttctccgggccgacctgcacgcgggtgatggcctcctccagctcgcgcatggtgatgaccttggcgttgcggcgcgcggcgaggatcgccgcctcgttcatgacgttctccaggtccgcgcccgtcatgtagggcgtgcggcgcgccagcaccgccagggagacgtcctcgcccaggggcttgcccttggagtggaccttgaggatctcctcgcggcccttgacgtcggggtagttgacggtgacctgccggtcaaaccggccggggcgcagcagcgcgtggtccaggatgtccgggcggttggtcgcggcaaggacgatgacgccctggttggcggtgaagccgtccatctcgaccaggagctggttgagcgtctgttcgcgctcgtcgtggccgccgcccaggcccgcgccgcgctggcggcccacggcgtcgatctcgtcgatgaagatgatggccggcgcgttgcgcttggcctgctcaaacaggtcgcgcacgcgcgaggcgccaacgcccacgaacatctccacaaagtccgagccggagatggagaagaacggcacgccggcctcgcccgcgacggccttggccagcagcgtcttgcccgtgcccggcgggccgatgagcagcacgcccttggggatgcgcgcgcccagctgcatgaagcggtccgagtgcttcaggaactccacgatctcgcgaagctcctccttctcctcgtccgcgccggcaacctgcgcgaaggtgacgcggttcttgtcgtccgtcacggtgcgggcgtgggccttgccaaagttcatgaccttgttgtttccgcccatctgctggcgcatgaagaagaaccagaacgcgcccagcagcaggatcgtgatgaggaagggaatccactccacccaccaggccggctgcggcgccggctggttgacgagcgtgaagccatagtccaggggcgtgatgctcgccggatcgacgcctctggcggttgcgagcacctgctttacgtcgtcatagaagctggccacgtcgttggggatctgcagggtgaaatcgtatctctcggggaaactcgattccgagattgtggaatccttgtacaggccgtaggcgttgtactccgaaaccatgagctgcgagatcttttcgtcctgaacgagctgcaggaactcgctgtagctgatctccttgttctccacctgggtgggccacatcagcatctggaccatgatcacgaccagcagcagcagtaccagccacaggccggggcctcgcataaaactcttcttctgcactttgacaaaacgcctcccttcaaagggctatcccttgggtttacgcatacattttcgggctgaggatgcagacgtccggcaggttgcggtagtgctccgcatagtccaggccgtagccgaccacaaactcgtccggaatggtgaagccgatgtagtccgccttaagctccacgcggcggcgctccggcttatccaggagcgtgagcagcttcagggacgcgggcccgcgcgtgcgcaggttgtccttgaggtagctcatggacatgccgctgtccacgatgtcctcgacgatgagcacgtccttgccctcgatgccgtggtccaggtccttgaggatccgcacaacgcccgaggacttcgtcgaggagccgtagctcgagatggccataaagtcgatggaacagggaatggtcaagcgccggagcaggtccgcaaagaccgcgaccgcgcccttgaggatgcagacgaccagcaggtcgtgccccgcgtagtccgcattgacgcgcgcggccagttcgtccaaccgcttttgaatctcttcattggaaatgagtacgcgctcgatctcgtccttcgaatactccatacgtctactccttcggttttctatattgaatggtcagggcccgcgcgctgttgggaccgatggcgcaggcggcgctcggcgcgacgcccgccacccagacgatctcctctccgcatgtcaggaccggcacgcggccgcgcagcgcgcgcggcaccttttgatcggtaaaaatgtcgctgagcttcttggttccgccgcccagcaggcgcacccggtcgcccgcgcgccgcgcgcgcacggcgaggccggccgccgccgcgtccgcgtccaggacctgcgcatcgcgccccaggtccaggcacgggggcaccgccccgacgcgcagggaaaagcagccgaacggcgtctcgttctccccgaggtgcagcgggatggattccatgggcgcttcgcctggaacgggccgcacgccctgcgcatcccgctccagcagcgccccgcagaggctggcgcgcttgccggccccgagggaaaagagcccctccagccggtccacgtccgcctgccccgcctcccgcaggcccaggcgcacgaggtattcgtgcagcaccgcgccgcgcaggccgggatgcaggtcgcgcacgtcggaaagcgcgtccccgcgcatccgctcccgcaggacggagtccgcctgctgcgcgatgtagtcgctctggtcgcggctcagggccgcgaggcgggcgatggcctccaccgcgcgggggttcatggtctccaggcacgggatcacctcgtgccgcacgtagtttcgcgcaaaagcggtgtccgcattcgtctcgtcctgcacaaagggcaatcccttttcctgtgcatagcgcaggatctccgcgcgcgaaaagggcagcagcggccgcaggaggtctccctcctcttcgcgcatcccggaaagcccccgcggcgaggacccgcgcaccaggtgcaggagcacggtctcggcctggtcgttgcggtggtgggccgtgaggatgcagtccaggccgcgcctgcgcttctcctcccggaggaaggcgtagcgcaggtccctggcggtttcctccagcccgcggccgctcgcgcgcgccctggcgggaacgtctacatgcgcaaccgccaacggcacgccgagccgggcgcagagcgcctcgacaaaggcgcagtcccgttgggagttctccccccgcatgccgtgctcgacgtgcgcggcgacgacctgcgcccgcagcaccagcaggagatgcagcagcaccacggagtccacgccgcccgagagcgccaccagggcgctgcgccccttcaggcattccgcaacgtgttcccgcaccgccttgccctcctatggaatcaatcagtttctaattttatatggactgcaaagatatttcaagccctgaatcaaattgtttggttttttttaaccgccggcctcccgcgcggcctcttcctcgcgcagggcgcgctccatgttccgggcgacgcggcgcatgtactcctcaaactgcgcgcgctcctcggcggaaaacccgtccagcagctccgcggcgacgcggccgacctgccgctcgcccatctcgcacatgcgcttcccctcctcggagaggtgtacgcgcaggatgcgctggtcccgtccgtccatctcgcgctcgatgagcccggcgcgctccatgcgctttaaggtgaccgtcatcgtcgccggcgagaggttcagcgcgcgcgccatctccttttggctcatgccgtcgcgcttgtgcagcagggccatgatcggcggctgcccgcggtagagtcccacctctgcaagctgggcctgcatgcggctgtagtacaggcgcaccacgcgcgctaactccacctcaaactgcatcatcaagtcttcttccatcgctcctcctcctcgcatcgggagtttattttcgcgtctaacaattcgtagtctaatctttttgggggattttgtcaaccaaaatcttttgggaagcggggttttcccgcccgaggggaaaaaaaggacccccgacgcaaagcaaacgcggcggaggtcctccctgtttccaaattgcggcccgcggcctcagacgatgatgtcgctgtcctgctccccgacgaagtagagccaccagcgcgcccagttgacgatgtggtcgcccacgtgctcgatgtactgggcgacgttcacagcggtcatgacgtcgctgtcctgcgagcgcaggccgctctggcgcgtgatgcactcgcggtagatctgctcgtagagcacgtcgacctcgtcgtccatggtgaggacgttgcgcacggcgtccgtgctctcgttgagggagctggcgagcatccgctcaaacatggtggcggtgcgctcgctcatgcggtagatgtcctcgagcagcagcacctttccatactgtgtgcgcaggatgcagcggccgatggccgcggcctggtacccgatgcgctccatctcgtccgccaagtggatgatgtaaaacagcctgcgcaggtccaccgcgaccgggtgctgggtggcgatcatgcgcatcacgcgctcgttgagcgccatgcgcatggaccggatgcgctggtcctgttccagaacgcgctccacaaccgtaaagtcccggcggcgcacggcgtccatgacatcctgcagcgtttcggacgcaaggttgcacatgtggatgctgtcgcgctgaatgtcgcgcatttcctgatcatagatgctacgcataagaaccgtactcctattgccaaatcaaaaaactcttccagtccgccgcatgcgctcatgcaaaccgggaactgatgaactgctccgtgtgcaggtgctgcgggtggtagaacaggtcgctcgtgcggccccactcgagcaccgtgccgtcctccatcatggccgtctcctccgcgatgcggcccgccatctggggcgagtgcacggccacgaccatcgtgcactccttgcgcagggagaagagcatgtcctccaccttgatgctggtcatggcgtccagcaggcgtgtgggctcgtccagcagcagcaggcccggccgcagcgcgagcgcccgcgcgatgcacgtcagctgcgcctggccgcgcgtcaggcgcgaggagtccgtgtagagcatgtcgcggaactccttgtagatctccatgcggcgcagcgtctcctccgcgcgctcctcgagggcctgctttttgcgaatgccctgcaggcgcagcccggcggtgatgttgtgcagcaccgtgcccgcaaagaggacgggctcggtgaagaccatgcccacgcgcctgcgcaggtcgttgggctcctgcatgaagatggagctgttgtccagcatgatgcggccgctgaccacgcagccgcgctgctcggccatgcggttgatcacgcgcaggaaggtggactttccgctcccggtcttgcccatcagagcgagcacgtgcccggcctgcgccgtcaccgccacgtcgtgcaggacgaccttgtcctccagcgtcgcgttgagatcctctaccaccagttgtatcggcaattggcttcctccccttcgcttctccaccggcgcgtggtcgtcaggcgcagcaggatcatcagcgccgcaaggccgaaggccagcaccgccgcgtcctcccggccgagccaggccaggcggaacagttccgtggccagcacctggtccggcatcaccgcgcccatgagcgtgagcagcgccgtcgcctcgcacaggatgcgctccaccaggcgcaggcacgcccgaacgatctgcggcagggcctgcggcagcaccacaaggcccagcaccgccatgcgccgcccgcccagggcctccccggccatgcggtacttttccggcacggcgcgcagcgccgcgtccacgcgcgaaatcataaagggcaaacacatcaccgtcagcagggccgccatggaccagatgctgccgtgcgcctgcgcattgccgctgatgagccagttccccagcagccccaccagcaccgcgggcacgcgcgacaggcccttgaggaagcgctgcaccctgcccagcgccaatccgtgcaggtattcgtacatccacagcgtgatcagcagggagatgggcagcaccagcgccagcaccagcagcagcacctgcagggtcttgacgatcaccgcctcgatccccggcagaacgccccaggaccgcagcagcgccgtgaccgcgtcaaacgccaggcgcaggagcggcagcgccagcatggccaccgcgcccagcgcaaggagaatggtcacggcaagaaaaatgttattccgcagctttcttttttccatgccggcctccctccaagctgaacgagatcaccgcgttgacgagcacgatcagcgccgtcaggagcgcggccagcaggatcgcgtagcgcgcgcttccgggcacgcccgtgacgcccgcggtctgcatcagcgccgtgaccagcgtatcctctcccccgccgtaggcggacaggaccaacaaaatggcaacgccctcgcccatgcaccgggacatcatccgcagcgcgacgctcaggtagctgcgccgggccaggggaaagaccgtatgcagaatcgtctcatagatatacgcgcccatggcctgcgcagcctccacagccgggtagtgctgttcgttgatctgggtcagctccagcgtgtggcgcatcaggctcatgaggatgagcgtgaccgtaaccccccaccacgccgaggggatcaccggcacaaagtaccgcagcgagagatagccaaagaccaccgccgggatcgccgagacgcccgaaaccgcgctgcgcgccgcgtgcagccaccggggcttgagcaaaaaggcgatccccgccgccagcgcccaggccagcggaaacgaaagggccaccgccgccgcggccgtggacaccgtaaaacccgtcagccgcagcccctgcggcacaagggaccacacgctctgcaggacgtcgcccgccgaagcccgttccatcaggagaatccccagcagaaagaccagcgcgcatcccgtcagcaaaaaggcgaacgtcccgcccaaccacgcgccaaagcgcatcaagttttcccatgctctcttcatgcgccctccgacctcgcggcccaagtcggccgcattgtttacattttattgtataaaaaattggtcgttttcacaaccggccaaaggttaaatatgggctaaatcgttccagtccatgtgacagacagcaaaagagcggtccacattgtggaaccgctctccaacattcgtcacgaagaggcatcttccctggcgtagggcaaagtcacggtgaactccgtgcccacgttcagctccgactgcacggtgatctcgccgttcatgtccatgacgatgtgcttgacgatggccaggcccaggcccgttccgcccatgttgcggctgcggcccttgtccacccggtagaagcgctcaaacaggcgcgggatgtgctcctgcgcgatgccgatgcccgtatccttgacgtgcaggagcacgtctctgcccctgcgctccacgcgcacgcgcaccttgccgccgtcgagcgtgtacttgatggcgttgtcgatgaggttgatgagcagctgcttgacgtggtcgtcgttggcctggatgaaggtgtcgtccccggcgtccacggtgagctcgatgttcttctgcttggcgctgttctccagcatgaggcagacgtcctcggcgcgctggcccaggctcaggcgctcggtcggcacgcgcacgcgcccgttctccatggaggagagggagagcacgtcgttgatcaggcgggagaggcggtccgtctccatggagatgatgtccaggaagcgcttggccatctcggggttttcgatggcgccagcctgcagcgtctcgacaaagcccttgatcgaggtcaggggcgtcttgagctcgtgggtgacgtttgcggcaaagtccgtgcggatctgctcgaggttgcggatctcggtgatgtcctccagcagggccacggcgccgatggattcgttttcatgctccaggggcgagatgtagaggcggatgaggcggtgccggggcgccgcgcgcacgggcagctcgagcgtgatgagctcctcgtgctccatggcctcttgcaggatcgtctccaggcgggagttgccggtggcctcgagcacgtgcttgccctcgacgctgccggtgacgcccagcatgtgcttggcggcgttgttcatctggaccacgtgcagctggccgtccacggcgatgaggccgttgagcatgtggtcgatgatggattccagctctgcgctcttgtgctgcagcttttccacggtctcctgcaggcgcgtgttcatggactgcagggtgcgcaggagctggttgagctccgcatagccgtcgatgcggaggttgacgttgtagtttccgtcgatgatggcctgtgccgccttggagatctggttgatcggggtgacgatgcgcctggccagcgcaaaggagaggtagatgcacaccacgagcaccagcatcatcagcgcggcgaacagcccccagttcccgtggcggaagaccacctggctgcgcgtgatgcgcaggatcgtcccgtcatcgtccaggacggatacggcgatctgcatctgcgccagccgcccctggaaggagatctccgtgcccgtcccattggaaagagcggtcacgacatcgggctggtccaggtaatagcccacctggccgctggtgtcgtagaggatctccccgctgcggtccatgcgggtcacccgcgcgttcatgagcgccgcaacgcggttcagcgcggcctcgtcctgtgcggaggccgcggcgtagcgcgccgcgttgagcagctgctcctgaaggatgccctgctcctcctgcatggtaatgcgcatcgagaaaaaggaggcaagcgccaccaccaacaaaaccagcgcggacgccgtcaggacgatccgctggtgcatggatttcacgcttcctgctctctgtcaacgaagcggtagcccacgcctctgacggtttcgatatagggctcctcgcccagcttctggcgcaggtggcggatgtggacgtcgaccgtgcgcgtttcgccgtagtactcatagccccagatgcggtccagcaggaagtcgcgggtgagcaccttgccgcggctgaggaccagcaccttgaggagctcgaactccttgagggtgagggagagcttttcgccgcccttgaacgcctcgtagttcgtgatgtcgatcatgatgtcgccggagcgcagggtctgcggctcgctctcctgctggggcgcgacgcggcgcaagagggacttgacgcgcgcggcaagctcgcgcacggagaagggcttggtgatgtagtcgtccgcgccgagctccaggccgaggatcttgtccacctcgtctccccttgcggtgagcatgatgatcgggatgttgctggtcatgcggtcgcccttgaggcgccggcagacctccaggccgtcgatgccgggcagcatgatgtccagcagcacaagggacgggcgctccacttcgcagcgcttgagcgcctcttccccggtcagggccgtgaccacgtggtatccggccgccttcaggttaaaagagatcaattccagaatatggacctcatcatccactgccaagatggtatcactgggcatgtgtaaaatacctcctttacgtcattcgtgcaaatccaagcggaaggggatgggggggaagggccgtcactccttgggcgtgctcagcagggacttcagttcctccatgaaggtgttgatgtcgcagaaggagcggtagaccgacgcaaagcggacataggccacttcgtccaggttccgcaggcgctccatgaccatctccccaatgcgggacgaggaaacctccctctccaaggagttgtagatctgctgttcgacgtcgcgcacgagcgcgtcgacgtcgcccatggccaccggccgcttttcgcaggccttgatgaggccgcggcggatcttgtccgcgtcaaaggcctcccgggaaccgtcttttttgatcaccatgatctgcacgttctcgattttctcatacgttgtgaacctgcgcccgcagttgacgcactcgcgccgccggcggatggccaggccctcgtcggtggggcgggaatcgatcacgcggctctcggtggaattgcagtacatgcacttcattgaacccttcacctcgctggcggccctctgcccgcttcaaaaaacgggcgcaaccaaacgaacggtcattcgccgccgtctactattatatctcttttttcatccaccgtaaacccttttgcgctaagttcgttaatttttttaagttggcgtgaagaatccccatcatatccgcgcgcagtgcccaaatttgtaagatcgtatttacattttaggatcgctctcgcgcggcccgcccggcaggttgaccaggatcacgtcctcgcccatcatgaccaccgcgccccaggggatgaccacgccttcgcccttgaacatgcccgcaaaggaaaagggcgggggcgtgatcagggccaggatccgcccgtcgggcgagaggtccaggtcgcagacgttccccaggcgcgcgccgtcgcaggtgttgatgatctccttctgtttgagctgtgcataggtcattgtgcgctcctccttcttcgccgaatccgaaaaaacgctcgcaccccatccgtatgccgcgcccgaaaaaaacatgcgccccctgcgcaggaaccttgcgcaaggggcgtgacgatcttcaaacgtatttcttcatgtgcgccagggccgtcttttccaatcgggagacctgcgcctgggagatgccgatctcctcggcgacctccatctgcgttctgcccccgaagaagcgcatctgcacgatcttgcgctcgcgctcgttcaggtggtccatggcgttcttcagggcgatgttccgcgtccactcctcctcgccgccgcgctcgtcgcggatctggtccatgacgtagagcgcgtcgccgttgtcgtggtagatcggttcgttgagggacatgggctcctggatggcgtccagggcgaggaccacgtcctcctccttggcgtccagggccttggcgatctcggcgaccgtcgggtcgcgccccaggtccacgctgagcttctcccgcgcctgcatggccttgtaggcgatgtcgcgcagtgaacggctgacgcggatggcgttgttgtcgcgcagatagcggcggatctcgccgatgatcatgggcacggcataggtcgaaaagcgcacgcccagcgtcgtgtcgaagttgtcgatggatttcatcaggccgatgcaccccacctggaagaggtcgtccatcatctcgccccggccggcaaagcgctgcaccaccgacagcacgagccggaggtttccgcccacgaactcgtcgcgcgcgctcttgtcgcccgcggcgatgcgcgcaaagagcgcctgcatctgcgcattcgtcaggaccggcagcttcgaggtgtccacgccgcaaagatccactttgttcagtgccattcgctttccctccgccttctggattccgcggtcggcggcctgcgcagcgccgcctccatcggcactgttatcttgaccaatcgccggattcttatgcggattacacaacacattttgcgtttacggaggcaaaaattccatttgtataggggaattttttcgacgtttctcacatctttgcgctgatctccccgcgcaggcgcttgatgatgcgcttttccaggcgggaaatgtaggactgggaaatgccgagctcgtcggccacctcgcgctgcgtccgctccttgcagccgtccaggccaaagcgcatctgcatgatcttctgctcgcgcgccgtcaggcgggagatggcctcgcgcagcagggcgcggtccgtctcccgctcgagctcccggcccacaaggtccgggtccgtgcccatcacgtccgagagcagcagctcgtttccgtcccagtccacgttgagcggttcgtccagcgagacctccatgcgcgtgcggctgtggcgccttagatacatcaggatctcgttctcgatgcagcgggaggcgtaggtcgccagcttgatcttcttccccgcgtcaaacgtgcccacggccttgatgagcccgatcgtcccgatggagatcaggtcctccacgcccacgcccgtgttctcaaacttgcgcgcaatgtacaccaccagccggaggttgtgctcgatgagcccctcccgcacgctctcgtccccgtcccgcaatgcctgcatgaccttctcctcctcttccttggtaaagggcggcggcagggtctggccgccgccgatgtagtccacccggccggaaagcagacgcagcaccttccgccacagacgtctcatcgcctctctcatcgcacacacctccccggaatcagcgcctgtccctcctcggacagcgcgccgtcgtacaccgcgatgtaggcctcgacctcgcggccgtccacccgcaccgcgtccgccgcaaaggccggcagaatcccgctccccccgacggaggtaaacggcaccggccggggccttcgccccgcctccaggccctgcagcgcgcgccgctccacaacgatcaccggcagattgctcaccggctccacgagcacgttgcccgtgtccaccaccgccggcaggctcacgcgccggccgcccgcgcgcacggtcagcagcgccgtcgggctccccggcccgcgctccttccggcgcgagagcacgaggagcgccgccccgcccaggaccgccgtgaccgcggccgcgcccaggccgtagcccgaggccccgagcaggtagagcacccccgcgcccgtcccgcccagcagcagcgtcgccacccacacgaacgcaaagacgcgcagcgtccgcttccagcaggagacgcgcggccccgcgcagagcagcagcgtcatccccgcgcagaccgcggtccgcgggagcagcccgagcaggaaccgcccccagggcaggtacgcggccaccgcataggcgcagcccagcgcggccgcggcgaatacgcgccccttgcccgtgcggatgcccgcaaggcgcgccgccaggagcagcgtcagcgcgttcatgcccaggttctgcgccacaaaccactcgatgctcaccgtcattcccacgccgcccccctcccgcgctcccgtcggatctccttcactataccgttcccgccccgcgctttttgttgttcccgcgtgcggacgcttgtcgtgcggcctccaaaaaggcgcaaaaaaccgcccgcgcagaaccctgcgcaggcggtcaggcggtcgaaacattgtcctgccgctttctggaatgcagaaaagggcaggcaatccccagcggtggtgtgtacgccttcaaagggagcgcgcccctttcggccgagcgtttgggccacaggcccatagaccggccggaaccccgagccgccactggcggttcgcggcaaatggggaggcgagccttcggcccgctccccccttctattcgacgcgttgtgcgcgctgcgcgtcgactttgtcaacgcgcagccggcctttattctccccggcacgcggggaagaggtcgagcagcgcctcctggcttccgtagtcaaagtgcctgccgccgtccgccgtgaggaccgcgcaggagtccgacgccacgtaaaagaccctctcctgcccatcctcgcgcacgagcgtcagcttcccgccaaaggggcaggccgaagcgatggtctcctccgacgcgcggagcagggattgcagctccgcgagcgccgccgcctcctcgatcgtctgggcgcgcatctcgtaggcctccgttccgtcgcccgatacgaggaccgggaactccagcgccgcgcgcacaaggcgcgtcccctcgagccagtcgagcgagacggccagcgggtccgcgccgcgcttctgcgcaaaggcctcccgcaccgcctgcgcgagctccgcgtccagaatccagcctctcccgccgtcctgcgcgcgcacgcgcagccggtccgcgcagagcgaatacgccgcgcgttccgtcacgatgcagtcgtccacgccggggacgctctccggggcgtccgccgcgacctccgccgcctccagccgggcaaggagctccgcccacggcgcgccctcgagcgggaagcggaactcgagccgctccgcgatcccggtggcgctgcgcgtctgctcgtccatgaggtacaccacgccgtagggcgcgtccagttcccggccatacgtcatgccccgcgcctccgccgcccggaggatggccagcgtcgtggggtttgcggcgtcgtgcaggatcgggtccgtggccgtgatgagcacgaggaacaggtcctccgcgagctggtccacgctctgcgcgctcgccaggaggtattcccgcaggaggaccgtcttcccgtcctccgcccgcacgccgtactgctgcagctggcagtattcctccatcgtgtccccgggcgagacggtgccgatgccccagaccagcgcctcgaccggctccggcgcgatctccatgcccgccttggccagggcgaggacgtaggtgtcgccgttcgcgttccgccgcccgtagaggtggaagtccagcgccatctccggcagcagatccgccgtctcctcctgggagagggaggagaacgccggaacgcggcccgcgagcgccgtttcgtactcctccatcgcctgggcgacgcgctccggccggccgtccggaatcgcggtgggcgtcgcgctgtcggcttccgctctgggcgtcggcgccgcggacgccgccggggcgctgggcgtcggggtgggaacggcctgcgcgggcggcgcatcgcccggccccgtcatggtcaccgcgcagcccgtcagcgcggccagcaccgccaccgccgagagcgcggccgcgaagcgccgcctcccgcgcgcgagcctggcgatcctccgcttcatgctgccgcggctctgcgccatggcggtcgtggcgttgacgaggccggcggccgtgggggacggattcacgaaggccaggagcgtctttccgtaggcctcgcgcgcctcctccccgagcgcgcggatggccagggcgtcgcaggcgctctcgcagtcctcgcggctgcgcgccgccgccagccagacgatcgggttgaaccagtgcagcgcgagcgcggcgctgcgcagcaggccgaagaccgcgtcgccctgccgcctgtggctgagctcgtgcacgaggacgtgcgtcaggcgctcctcgctctccagcgccgcgggcgtgagcacgatgcacggccggaacacccccatcaggcacggcgaagagaccgcccgcgagcagtagacgcgcacgccgcgcagcctgcgcgcaaggccgcggcccacgcgccgctccagcccttccacgggcttgcgcgagcgccgcacccgcgcggcaaagcgcaggttgacgtgggcgatgcccgcggccgtccccaccgcgccggttgcccacaggcacgccagcagcatgccgacgtccgggcccgcatcgcgcggcggcgcggccggggcctcctgcgcggcggcgtcctccgccggcgcggcggt

SEQ ID NO: 380 - DNA, 10810 bp, Unknown
  16S sequences of unknown bacteria
ggactaccgcttccagaacaataccgaccgcacctatcagctcaccgtctggacggacggggagtacctgcatggggaactgctggcagatcgtccccagcagtacagctatcacattgagtgccgcaatgagctcttctcccgggaggaggacggagtctaccgcaacaatgagatctggcggcacaagatcgatgtccataccggcgaggaggcagaggccgtgctgctgcgccgcaaccacgccaaaattgcctatgatcccgccggtctgacggtggtggatctcagaaaggagaagcagtcatgaccgatccgcagagctggcagagagaatgggcccggcagctccgggaggagaaccgctggcgccgtaaggcgatgcaccgtcaatccggggaattgcaggcccggatcgctgaaaaagtgccggagacggtgcgtgatacgctgactgccgcctttggggcagcgttttccgccgcactggcgggagaacctctgctgcgccgcacggcctccccgaaagcggaggcccaccggctggcccgggccgaggaacagctccggacgtcggaacggttcagctcggtgcggggaaccggacgctcggcggtgttctccgctgccacggcttcggctgtgcggggttcggggctgggactgctgggcatcggcctgccggatattccgctctttgcggcgtccctgctgcgcagcctgggacagatcgcccgggctatggctacatcccctccacccgcagggagcgccggatcatgctgctggtgctggacgccgccctcaccgggggaatggagtacccggcgctttccgaccagctggatcaggcgctgtccggcaccgagctgatcggcctttcggaacaggagttggcggaccgggtggccggcaagctggcggaagaactgctggcagccaaattccttcagggaatcccgctggcaggcgctgtgggcggtgtgctggacagccgcctgaccgcccgtctgctggactatgccgccctcaagtacaaccgccggttcctgctggaccatcgcccggccggagccgcaggtctgtgatttttactccgccttccggcaggtttttccgccccggaaggcagttttttcgcctttacaaagaacatatgttcgtttataatagagataacgaaacgccggaagggaggaaaaggctcatgggaaaggaacgggtgatcctgcactgtgacctcaataatttctatgcgtcggtggaatgccggtacgatccccggctgcgggaagtgcccatggcagtaggcggttcggaggagaaccggcatggcatcgtgcttgccaaaaatgagctggcaaagcagttcggcatcaagacagcggaaaccctctggcaggcccggcagaaatgtccggaactggtggtggtgccgccccactatgagcgctactatgaggtatcccgggcagcccgtgccatctatgcccgatacaccgaccgcatcgagcccttcggcatcgatgaatgctggttggatatgacgggcagcaccctgttgttcggcagcgggcgggagattgccgaacgcctgcgccgggaggtgcgggaggaactgggagtgaccatttcggtgggagtctcctttaataaggtatttgccaagttgggcagtgacctcaaaaaaccggacgcggtttcggagatcccgccggaccggttccgggagattgtctgggggctgtcggcccgggagatgatcggtgtgggggattccacagcccagcggctggaatccatgggggtgtataccatcggacagctggcccggtttgaccggaagctgctgggcaaaaagctgggcaagcacggcgatgccctgtggcagtgcgccaacggggaggaccgctcgccggtggcgctggaaaacgccgaggaggaagtgaagagcgtgggcaattcggtgacctgcccccgggatctgcagactgccggggaagtctggtcggtgctgctgctggtggcggagtcggtctcccggcggctgcgggaaaagcagctctgtgccggactggtgacggtcaccatcaaggataaccgcttcagttataccgaacacagccggcgcctggaatacagctgccgggattccaccgatctggcccgggcggcgatggaggcctttcaggagcggtaccgctgggatcgtccggtgcgggcggtgggactgcgtgccaccgagctcaccgatgagggggaggccgcccagatcagcctgtacagcggattttccgaggcctgccgccgggaggcagtggagagccgggtggatcagctgcggcagaagtacggcagggagatcatccggcgggcggtgcatctggaggaggagcagcgcagccatcggttccacggcagcgatcccgacccgatgcccaccttccacagccggtagaaaaatgcagtccggtgcggacagccttgcaaaagcggcccggctattgtaagatggaagggtaagatcccggcgggcagatctgccgggcacaggagggacagcggcatggacgagaagatctttatcatcgggttcggattcatcgggcggtatctggcgccctgttatgaggctctgctggggcagcccggcccggggaatgtactggcggttaaagccagcgcccggggactggaggagctgcggcagcagtatccctacgccatttcggtgggggataccgccgctgtactggagcgggagcatcccagcatcctggtgctgtgtccgccgcccaccgaggtgccgggcattgtccgggagattctggcgccttactttgagcggtgccgccgggaggggagaaaactcccggtgatctacacctttgctcccacaccggcagcggactggttccgggacgagctgggggaggggacactggcagccaagatcctgcccaatgtggtggaccgcatcggctccatcaacatggcgcccatcggcaccaacttcatctccctggacccccgggctcattggccggaggcggagcgggaaaagctctgccggttcctctcgcccttcggggagaatatcttcctcaccgatgatgattccctggcgctgctggcagtgaagatcaccgcccacatcttctacgagatcagcttttcggtggcggatgtctgcgggagccggggcatcccggtgacactggcccagctgggttcggcagtgcgggcggcccggttctcgatgtccgactgtcagctgccccagctctgtccctgcggctatgacggcctgcccgaccgggtggcggagttcatgcggcggctcaccctggcctggtatgccggcatcgaagcctatgcgggcagcctttcctacaccattccgctggaaaccgtgcggcatatcaactccctgtcctttgagctgaatgtgctgccggtgcagctggagacccgggaaaaactccatgagaacacccgcaaccacggcaccaagggcggcgtgctggaaaaggggtgcgtcttctttgaacggtacctgcgccatccgctggaggagatgaccgcccgggttctggatggggagtgggaggaggacttcttcgactttgtccagggcatgagctataccatttcgctggcggcataccggcagtcctaccggctcaccggacggtaaaatcccgggacaaaacgacagaggatctgctttggaaagcccggaatgacagagatccttctcttttatattcaaaaagaacagcggaatgctgtgtttttatcccaaaaccaccgggaaattgtcggggacgatgaacttttccgggaggattttccagcggtttacaaatcggatggtttatgttaagattcagttacagcccttccgcagcggcggaagcagcgctgtgaaaagtgaaaaaagatgagttcggccctttttccgtttgaccgatgccctttcgggctgccaacggagagagggcctttttggtgagaggagcgtatatgggaaagatctttacaaatgacccgcctttctatcagcagcttcgggccattgccattccggtggcggtacagaacctgatcacagtgggcgtcagcatgctggataccctcatgctgggcagtatgggtgaagtacagctttccgcctcctccctggcaaaccagtggttctttatgctcaccgtaatcaacttcggactggcaggcggcgccaatgtgctggtggcccagtactggggcaagggcgaaccggcggagatccgcaaggtgctctccattgtctaccggatcagcgtctgcatttcgctgctcttctccctgggagccctctgctgtcccgagatcatcatgtccatcttcaccaatgacgccgaagtcattgccgccggctgccggtacctcactgtcatcggctgggtttaccccctctatgccctgggcaacaacaccattatgctgctgcgggccgtgggaacagtgcgcatctcgctggtggtctactccacctcctttgtggtgaatgccttcttcaactgggtattcatcttcggcaaccttggcgcgccccgtctggagatccagggcgccgcactggctactgccatcgcccgtgtggtggaattcctcattgtggcctggttcctgttccggcgggagcataagatccagttccgcctccatgacctgcgccggtttgaccaggtgatgttcggggcctttgtccgggcggcaacccccattatcttcaatgatatgatctgggccatcggcaactcgatgattaccatcatcatgggccgcatgggcaaggaatttgtagccgccaactccatcaactcggtggtgatgcagtttgcttcggtggcgctcatgggtaccagctcggcggcggctgccatcatcggcaataccatcggcgccggcgaatacgaccgtgcccgggaccgtgcccgcaccctgatgtacatcgccgccatgatcggcgtggcagccggtgtgctcatcttcaccatccggccctttatcctcggcttctacaatatcaccgaagtcacccgcagctatgccatgtcctttatggcgatcacctcggtgttggtgttctttatggcgcagtccagcgtcagcatgatgggtaccctccggggcggcggggacggcaagttcgtcatggtcatcgatgtcatcttcatgtggatgatctgcattcccctgggttacatagcgggtctccgcctgggactggctgctcccattgtctacttcatcatcaagtgcgatgagatgatcaaaagcgtcatcggagcagttcgggtataccggggccgctggattcgggatatgactgtttgacttttgtcgaatacttacaaaaaataatcttatttttcgacaaaaataattctacttgacaaaagttggtttttggaatagaatgaaaccacatcacgagcatccacagacagccaagagagctgccggcagaaaggcacggtgcaggatttgacccagatttcagacgaagcgcttctggagcgcagccagcacggtgaatatgcggcatcggctgaactgattgtccgctataccccggtggttctttactatgctgagcggtactgttacctcggcctggaaaaggaagatctgatgcaggagggcatgattgcgctgctttcagccatccgcacttaccgcggggacaggggagcggcgttccgcacctatgcttcccggtgcatctccaatgggcttgccaaagtggcggcctcccagctgcgggcaaggaatatcccgctggccctcaccgctccgctggatgaggcggggaatgtatcggcgcccagtcaggacgaacccgaggagatcgtgatccggcaggaacagagccgggaccgcagccaccgcatgaaggcggaactctcggaatatgagctggcctgtctgcagcttctgctggacggctgctcctatgcggagatcgccgggcgtctgggacgcactgtgaagtcggtggaccgggccctgggccgagccagacagaaactccgccgggcactggcagaaccggtgtgagccgggcattttctcaaagctttgttttttgagtcttttttatataaaaaggcttgcaataaatctacccacggcatattcaaaaagttcacctttttcgtttctccggggtaaaaaccattttcttcaagagaggtaaaagctatgtacacagacaagacactggtatgcaaagagtgcggcaaggagttcgtattcaccgctggtgagcaggagttctatgcagagaagggcttccagaacgagccgcagagatgcagagagtgcagaaatgcccgcaagaacaatgcccgccccgagagagagatgtttgacgctgtatgcgccaactgcggcaagccctgcaaggttccgttccgtccccgtgaggatcgtccggtttactgcagcgagtgcttcgctgagatgaaggaaggccactaagggtttctcccctctgaactgatacgaaatcaaagcctgtccactccggtggatgggctttttcgttttgcggtaggaattttccggaaggtgtggtacaataggcaggaaagctgcgaaattgccctcgggcatttgaaacaggagggactgtcttgatagaactgagcaatcgactgggacagatcgcccgcatggtccaaccgggcagtgtggtggcggacatcggcaccgaccatggacagctgatggtctatctggcacagaacggcacaatccgccggggctatgcctgcgacatcaacgaaaaaccactgaataaagcccggcagatcattgcggattacggcctggaagaccggatcgaatgcgtactggcttcgggactggatggcctccagccggggagcgtggatacggtggtcatcgccggaatgggcggggaccttaccgcccgcatcctggatgctgccccctgggtccgggaatatcatacccggctgcttctgcagcccatgaccaaaccggatcatctgcgggagtatctctgtcgggagggcttccggctggaactggaaaacgcagtgatcagcggcaaatttgtctataccgtattttctgcggtctatgacgggataccccgggaactcagcctgttggagcgatatatcgggcgggtactggacggggattctgccgataccgaccgctatctcatgcgcatccgccgcaacctgctgggacggattgccgggattgaccgctcccgcagcggtgacccggtccgccgcaccgaatatgaaactgtggtacggatgctggaaatgattttggaggagcgtggatatcatgtcgaatgtctcgatgatctatgggaagctgaattcgctggcaccctttgcaacccaggagaactgggataacagcggtctgctggtcggggacccggatgcggaagtaaagaccgcgctggtggtgctggacatcacagccgaggcggtccgggaggcccgggagatcggggcagagcttatcatcagccatcatccggtgatcttccacccgctcaagaaggtggagagcggcagtgtggtctgggaactggctcaggcggggatttctgccatctgcgcccataccaatctggacaaggcccggggcggggtcaacgactgtctggcagcggcactgggactggaacatgtcaccaactatgctgtggaaggccgggagaagcactataagctggctgtctttgtaccggtgagccatgccgaagccgtacgccatgccatgatcggagccggagccgggatcatcggcggctataccggctgcaccttctcggtggagggcaccggacggtttgtgcccggagaggggacaaacccctggctgggacagcccggacaggaggaagcggcagcggaagtgcgcctggaaacagtcgtacccgccggaaaactggatgcggtgctgacagccatgcgtcaggcgcacccctacgaggtgcccgcctttgatgtggtggaatcggtgcgggaaggccaggagatcgccatcgggcggatcggtgaactgcctgagcccctctcgccccaggagtttgcccggctgtgcgccgaccgcctgaatgccggggtgcgctggaaccgcaagggccgcaccatccggaaggtggcagtgctgggcggcgccggcggggactatctccatccggcagcggctgccggcgccgatgccctggtcaccggggaagccaagcaccatgaatatctggaagcagtccgcatggggatcaccctgctggatgccactcattatgccaccgaacaggtggtgctgcgtccactggcggagtacctgaccgcctgctgtccggatgtccgctttgcggtgggctgcggcggagacgcgctctgctttaccggtggctgccgtggctgatctgcgcctggcagggaccgtggcctgtgccgctctgggagtgctgttctgcctgctgggcgggggatttttcctcgctgggctgaaggctgccctgtttgtgagcgggttcggcactctgccgccctcagagcgtgcccggtatgataccgccgctctgagccgggactatgcccggcggtttctgggctggggcatactgctcctggcaggggccggagcctccgctctctggagcggatgggctgcgctgccggcactggcagtctggcaggtgctgttctggcggcaggtgcactgggaccccgagcgggcatttgaacgatatgatctgaaacagaaataagtttgattatgatacagccctgcgctcggcagggcgggcagatgctgcccataagagtaaggaggtgctgttatgccgctggacggagcgatgctcagtcaggtaaaacaggaaattgaaacagcggtgggggcccgggtggaccggatcacccagccgggccgggaagagctcattgtggcgctccggggccggcagggcgcataccggctgctgatctcggtgaacgccgccagtccccgggtgcattttacccgggcggcggtggagaaccccaagaccccgcccatgttctgcatgctcatgcgcaaactcctgggctcagctcagctgaccgaagtgcgtcaggcaggactggaccgcattctggagctggattttgataccattgatgagctgggcgaccatgtgaccctgactctctgcgtggagatcatgggacggcacagcaatctgattatccgccgcccggatgggaagattgtggattccatcaagcgcatcgacacatccatgtcgtcggtgcgtcccattctgcccgggctgacctataccctgccgccggctccggctgaaaaactcaatctgctggaagtatctgcggatgcggtcatcgaaaaactgcgcagtgagccccggcagattgaactctcccgccgtctccaggagtgtctgcagggtgtttcgccgctgctctgccgggagatcgccggctttgcggcccggggcgtggaaaagactgtctttgaactcacccccgaggaaacggaccggctgcggttctatctggaaaccctcaccgacaatatgaagcagggccgctgcacccccatgatgctggtggatgaaagcggcaagcccaaggatttctcctttgtggaaatccgtcagtacggggaccgctataccgcccgggagttttccacctatggggagctgctggacgccttttattcggaaaaggacgccgcggaccggatgcgccagcgttcgctggatctgcagaagctgttggctgccactcaggagcgtattgcccgccgtctggacaaccagcaccgggagctggaggagagcgccgaccgggagaagtacaagatctacggcgatctgctggcgaccaatatgtactccatccagaagggcgaccgtcgggctgtggtgcagaattactatgaggaggggtaccccgaggtggagatccagctcgatccccgtctgacccccaatcagaatgtacagaagtactataacgaataccgcaaacgggatactgctgagaagaaactccgggagcagattgcctcgggcgaggcggagcttgcctatattgagtcggtgtccgacctgctggcccgggcccagactgatgcggacctcactgccatccgccgggagctgtcccaggaggggtatctcaagcactatgccttcaaggggaagaaggaggaaaagctgccgccgctgcggtttgagtcagatgatggctttaccattctggtgggacgcaacaatgtccagaatgaccggctgaccctgcgggagagccggagcaatgacatctggttccatacccagaagattccgggctcccatgtcattgtggtgaccgagggccgggaggtgccgaaccgcaccctggagcaggcgtgcattctggcggcgacccacagccaggcagcggaatcggcaaaggtaccggtggattacacccaggtgcgctatgtgaagaagccgaatggagccaagccgggcatggtgatctatgaaacctatcagaccgccattgtaaaccccgataaggagctttccgagcgtttgagagtaaaatgaatccagagcacagcgggcctttaagacccgctgtatttgtttctggaagagaaaatgaaaaaactttgcaaaaaggtgttgacatctgccggaaagcatgatattataactaagctgtccgatgcggacggcgcccgacaaaaagggctttgaaaa

SEQ ID NO: 381 - DNA, 5951 bp, Unknown
  16S sequences of unknown bacteria
tgagcgtgagggattgctgtttccggaagataaaatacgtcggtatcttacggaaaataccgccccttttataaatggagctttcgcgccctttccggtctgccgcggctgtccatgctttccgacagcctcgagtttctcataaccggcgaaaacgacgacggcaccgcaaagcttaaggccgagataatcgaggacatttgcgggattttttcgcgggagcttgtgctttcgggctttgccgaaaaggagcacaaaaacgccgaggatgccgcctatgacgtcaattcgggcatttttgacgccgacataagaaacatgagcatatttgcatgataaaaaggacccgggattcggccttgcgaacacaaagccgtattcccgagtccttttgctttttaaaagccgccgagctttagcccttaaggcctctttcctgtcttatcatgtcctcaacgacaatgtcgtaaatctccccgagggtggcgcaatattcaagcaccttccagggctcgttggtgtgaaaatggatttttataagctcctcgtcgcccaccgcaagcaggcagtcgcccttgaaatgctcggtgaaatagtcgtggataacatcctcgtcaaggtcctctccttcgatgagaagctgggtgtcatagcgaaattcggtcatgattaaatctcctttattcaaaatccttgccgtctttggttttgacggcagttcggtctatatgaacggggcaaaattcccgatcacagtatttttcaagcgcctttatgacaagcgcgggatttatgtttttctcgctccccgcgggcaggcgcatatttatcctcaccccgtcggccgtctcgaaaagggaaacgtcgaaaatgtcgggagcaaggtcaatttgctttgtgccgccctttttggttttcttttcggtgatgatgctgtcgagcaggaaaaactccttgattttgccgaaaaggtcggcgcagtcgaacagctcgatttcataaacggcgctttctatctccttggccttgaaaaccggggtcttaacgtcggttatgataatgtctctcggcatacagtcggaaagtcttttctttatctctccgtggggaaccggcgaaacaaggcgaaagtccatggtttctctctgccccgattgccccaccgaaaggggaagggcaaaggtgacatagggatgggggttaaacccctcggtgtgccagaggggaagccccgtccttttaagcgaacgctgcataaatcggcttaaatccaaatgagaaatatatcttgcgtcgccgacctttttgtaaaaaacgcgaatgtcgaagaattccatcagtcgcaggccctcccaagcagtctgtttgcgccgcagccgttgcatttttcgcggcagttttgcgttgtcgcgccggtttttgcctttatgctttcgttcatgaaatacccttcgggtatgccgatgtcgatgtgtgaccagggcagtacctcggtgtattcacggcggcggttggcgtaaaatttcgggtcgacgccgcagttttcaaaggcattcatccacacgtcaaagtgaaaatattctccccagctgtcgaatttgcagccgagcttaaaggcctcgtaaatgacggcgcaaacacgcctgtcgcctcgggcaagcaccgcctcgagaaagcttgtttcggggtcgctccagctgagcctgattttgcggctgcgggcgctttccacaagatgcttctgctttgccctgatagtttcgatgtcgtcctgaggttcccactgaaagggggtaaagggcttcggcacataggccgagcagctgaccgacacggtaactcccttgccctttggccgctcgggaagggaatagaaggtgtccaccaccttttgggcgaggtttccgatacccgctacgtcgtcaaaggtctcggtgggaagtccgagcataaaatagagtttgaccgaggtgtttcctcccgaaaatgcggtttttgccgtgtttatgacggcgtcctcggtgatgtttttgttgataacgtcgcgaagccgctgggtgccagcctcgggagcaaaggtcagcccgctttttcttacgctttgaattcgtttcatgagactttcggggaaattgtccacacgaagggagggcagcgaaatactgactcggtccttttcggtccagtcaagcatatccgaaagcagcttcggcagctgcttatagtcgcttgtcgaaagggagcacagcgacagctcctcatacccgcatttgtcgcaaatggattttgcctgggcatttatgacgtcgggggatttttcccttatgggacggtagacataccccgcctggcaaaaacggcagccccttatgcagccgcggaaaatttcctccacggcgcggtcgtgtatgacctcggtaaagggaacgacaaattccgtcggatagggaaccttgtcaagatccttgattattcttttggtgattttttcgggcgcgccgtccctcggcgtgatggcggcaatggtgccgtcgtccttatatgtcacgtcgtaaagagaggggacgtaaaagcccgaaagctcggtagcgacggcgtgaaggaacttcttgcggtcaaatcccgcctttttgtgctttgcataaagctcgcaaagctcgcacagcgcctcctcgccctctccgagagagaaaatgtcggcaaattcggcaaggggctcgggattataggtgcaggggccgccgagcaccacgacggggtggttgtcgtccctgtccttcgaaaaaatcggaacccccgcaaggtcgagcatattcagcacattggtatagctcatttcatattgcatggtaaatccgatgaaatcgaaatcgcgaagggggtcgcggctttcgagggcaaaaaggggaatgttgttttccctcagctgcgcctccatgtcctcccacggcgcaaagcaacgctcgcaccaaacgttgtccatgttgttaagacatgaataaagaatttttatgcccaggtgggacatcccgacctcatagttgtcggggaagcagaaggcaaagcgcacgtcgactttcgacttgtctttgacgacgctgttaagctctccgcccacatatctgcccggtttttcaaccttggaaagcattttttcaagctgaagctcggtcaagttaacatcacctttgtaaaaccgcgccgacgtatttttcggttctttgcttgccgaggaaaatcatcggaggtttttctttttattttactataaatccgccatctttgcaaccgaaaaaaccaaataccaaaaacaaagggcggcaccgctttgcgaaaccgccgtctgttaagccgacagctatctgttcgccgcccgaccgtgcccctcccgaaaggtcatgctaacccggctttaggctcgccgccgcccttttgacggcttaaacagtattttcgcctctgccgattttgccgaaaaaagcgcccaaacctgaggcttgagcgcagttttgtgtttaaaattcggaaattaaaaggcggttatcttgccgacggcatactgcaaaatcatcagcgcgtcctcggtgttgacttttccgtcgttgttgacgtcgccgtagcgccgcatgagcggtttgttcataagctctttggttatgggaataaggtcgatacggaaatctttaatgttctgctccggattgtcgccgtaaaaataaatcacatatccgtcctttttgaagaaaactccgggagacagcttgccttccacaccgttccaatagagatagtcaatgccgtcgatatttcccgcttttatttcttcatactgcgtgacatattcataatcggaaccgaataccgaaacgaattccgacataaggtctttttcaccgcttttgtctgcaaatgttgcggtgaaaagggaatcccaatgagcgttaccgccgttttcgacatcggattcatcccaaaattttccgtcaaaggaagggtattccgcattgtaatcgcaataatacatggaagtcactaattctttataccgttcattatcgctcgcaaaacgaggaaccccgcctttttccttgaagttttcaaacataaaggggattgccttttctttcttcaggtctctgaaccaaacattttcatcattgtcgtcactggaaattccatagccggtgtaaccgacgcacccttcataaaacactttcttttcctgagccgaaaatttgcggaatttgcctaccgagtattgaagagtttgcagcgcgtcgccgacgtcgattcttttatttccgttaacatcgacaaacgcattttcgtcgacggtataagccgcggccgaaagcaccgagcttgcggcaaggcaaaaaacaagaactgcggaaatgatttttttgaatttcatgagaacacctcgattttcccgacggcatactgcaaaatcatcagcgcgtcctcggtgttgatttttccgtcgttgttaacgtcgccgtagcgctgcataagcggtttttctgttagctcttggcttagcggggtgagttcaaaatcaatcatgtcgagaattgattcggaaaaaatggattcctccagtattttgattttaaccacatagttgttcgtttttattatacatccggcataaaacattttgtcaaccttgtcccaataaaggtactcggttccgtcgcggtcgccttttttcagttccccgtattttttaatttcttcataatcggctgcaaatgccgaagcgaactcggattcaaggttcaaatcacttcttctgtctgcgggaacgaccgttgcaacaattccttcgttcccccatttgccactcggagaaaaatcatactgtatttccccgtattcggcggtttggttataaatataaaattcgaaacgatatttatcatactttggattgttgcatgacaccaagggaaaaccgccgttttcttttgcagcctcaaagattacaggcaactcggcttgctctttaaaattgtcgagccaatttaacacgccgtcttttgaatcacgggtttcatattccgggacgagacaaccgttgacattgttgtaatagtcatgaataggaaactttctgaattttccgacggagtattgaagaacgagcaaagcgtcgctgacgtcaacttttttgttcgcgccgacatctgcgacctttatgtcatttgcttggtctgccgatacgcacaaagccgagcttgcggcaaggcaaaaaacaagaactgctgaaataacttttttgaatttcataaaagttcctccttacagactgcggtcgatataatcatttattgcttgtttgcagctttcacagaaaatcgcgtcatatttattgctgtccttaattgcatttgcggttttttcccaatcgctgtcatatgacataacgcattgtccgtgtttggtgtcggctaaaccacccgcacccaaaagatgtgcttgctcgtggagcataacttttaacgagtttatctcgcgtttggcggtgtctgcatcgttagccataattgtacaacaagatttgccttggaaagtgtagcttaatcctgcaacggaagaaccatgtgaattgtttttcacaacacagagtttgtgcccgatcgaaagcgtgaaaatttctttcattttattgtttgcatcgtgctgatttatcaaatcatcgttattgttttcgatacatgtgtgatgtccgcccggcatatcggaacaatgggtatcgtttgtgcaaggacaataagaatccaaatcattcgaatcaagttcggtgcacttgtcaacatacgactgcataagggtgggggagtttccgttaatgaccttaatgtcaaaaacattctcaagaacgtcgttaagtttgtcttgacagtcacttatataatcctgtggggttaccccggaggacgcatgcc

SEQ ID NO: 382 - DNA, 5119 bp, Unknown
  16S sequences of unknown bacteria
ggagatgtgtataagagacagttcttccccatcgcaccgggagccattgccatcagctgttggcagtgttccagacagattactggttgctgtgcgtacagttctcgaacattttcttccttttcccacatatgcattaatgtctgcaacatacggtccatgacccgattgacctcaccgcagacaaagcagctttgttttttggaaacggcagggatattttttttaaacagccctcctttagccgacggtatggacaattcattttccgccacatacgccaatcggctttccagcatcaaagccaaagacagacggttttttgccttgagcattcgttcaaaatgagggaaacaaaacccctctcggtttgtttctatacggatatccggttccatcatggccgctcccataatgtattccagacacctgtcttccaggatattgcgcaaacggcagatgggacagccgtctttcggttccagtacttcactgagcggaatggtataaatggaatccttcatgatcatacgccctttcatcaaaaggtgtgcgccggcattgtcaaactttttccaagcgctattggctatttatggtcagtataccatatctgcaaaaaaggtgctataataagattttaatggatattgaaatactgtaacaaaagcagcctgatgtctgtaaatcagcagcttttttgtgttgccagaaatatcctcaccatgacaagcggctttagaagaaaacagaaatagacctctgttttatttcaccggactgtttgcaacctgaaagctgcatcccacatgatgcggtaataacgcggacattctgagatactggaaagcagatgttgtttttccacagaaagggcaaaaagcgaggtttttatgagaatcattgaaaaaaacggacagatttttctgcagggtgtcgtctgttttgatcttgaacgcacactggactgcggacagtgttttcgttggaaactctgccctgacggattttgggaagggattggcagcggaaatttctgccggatcaaacaggaacgtactgttttgacttttactcataccagccgccaactcattcgagacttttggattccttatttcggtttagatgaagattacgccgttttatgccaagatttttgctctgaccccattttacggcaggccgtcaggtttgcaccgggcatccgtttgctgcgtcaggatccatgggaaactttatgctcttttattatcagtcaaaacaataatatcccccgtatccgcggtattatagaccgattatgttcccttttgggagattcttcaggagctcttcccgctttcccttcgccggatgggcttgctcggtgctcaatagaagaccttgcatcgctgcgcagcgggtttcgcgcaaaatatcttctggatgcagcccagaaagtatcatccggctttgttgatttaaaaaatatcgctaccctggacgtggacagcgcccgccggattctgaccagtatttgcggcgtaggccccaaagtcgctgactgtgtgttgctgtacgggtatcacaaaacacaggtggtacctatggatgtgtggatgaaacgggtactggctatcctgtaccccgacggctttcccaagcagtttactccctggatgggaattgcccagcagtatttgtttcactatgcgcgctgtcacgccgcagattttcgccagctttcttcagtacaggtgtaactttctctttctgcatcatcgccaatccaaagcattgcaatcgcatgaaatgaggatttcggagtgaagaagaaatcggcgtgcccaaactgattggtacttattccagggacagtgctgctacgattgaaaaagagaactggccagcatgataaaaggagaccgaaatcggataatccggtaaaaatcccaaacagcaaaagacgatccgccagcagataaaataaaatgctttctgcgctgacgaatcgtctttttacttggccaatacattttcatcaatgcgacgaaccacgccgctggtataggaagtaaaatattttccccaaaatccggcggctgtcggattaaagctttcgtaatccacccccaaaagggtatatccttctatggcgagagaagcgatgagaaaattcaaaagattgggatacaatccctttccccgatatgccggcaggcaaaacgcaccgcaaatattctgtatctgcggcacctcagtgacaaaattttctgccgtatccgccgtttcaatataagcgacgatatccgacgtgtctgccgctgcaaacagccgtgttttttctttcaaccaatgatccggaccagtatgcttcataaagcaggggcttttttcaaaatgagcacgcagcatccggtgcagtggctctacccgattgcgggacaaatcaggtacttcaaaaaaagaaaacccctcgcacatgggtgctttcacaggcgtcatagagcggatagcgtcaacgcatcgcaaaccaaacccatactggaaaaacgccccgactgcctcatgatcatgagcatacaagccaatagagtgactagaaataccggcatcagcccatttttgcgctgccgcctgatacagcctttgataaatctgagcgcgccccgaacggactgcgccatgggcaaaaatgggagaaaaggttcctctggcagtcgtagtaaaagcgttttcccaagggttcaaacaggcgagaaagcctaccatttctcctttttcaaacgccgcacaccccaaaccattttcggctagttcgtccaaccccggtagttctccgactgttggaagcactggtactgcctggcgttcttcctgataattttcccggatcaaacgctttgcctgctggatatgtttgctgcaaaaatccaatacttccattttattctcctaaaaaaggcgtcctgcaagcggggcgcctttgcttgttgtgtcacactgtttctaatcgggccgctttcttgttccagcataccgaacctgagaaaaaatgtcaactagccgatctgtctctttgaatcttcattgctttctgacaatcctgcaaaccaagacgctagcatcgtcgtcgtgaccattcggtcttcttttttctgctgtttgccaaagatcctgcgctaactgttcggcagttttttttgctgacagcttaatctggtcaaagatccattcgctgccgcctaaaagcatgccgtccgacatcatgacgatccaatccccttcatgcaacttcagccgacttttggcaaaatccaccccttttaaaattcctgccggcatggaggcagcttctaccttaactaccgagccgtctcgatagacaaaagtaggcgctgctcctgcttttaaaaactgggtttcaccggaataaaggtctaccgtcgccacgtctaccgtagaaagggattcctcttctgatttgaccagcaatgctgcattaaccagttccaaagaggaatcaaaagaaaaacctgccgtcaccaattttttcagcaaacaaactgtcatggcagagtccaatgctgcccggcttccactgcccattccgtcggataagagcaaatggacgtttcctctgccgtcccaaatctcttccaacgcgtctccgcataccttctggccgtcacaggaatgctggatttttgccgtttctaccgaataaacagtccgttcgatccaccgcagatgagacatattttccacttcgctcactgccggcaactgcagtctgcgctggcacaaatcagaaagccacaaagtcatagaagtctgattgaatcgcgccagcttaaaattgggaatgactgcttctactgttagtcggccagtctgatcggtgtaggcactgaccgaaacaggggaaaggttttcccgttccatcaaggcgccgatccgatctgtcagaggaaattctgcctgttcaataccggtcagctcctgtgccaaggagtccagcataccgctcattccctcgaactgatcggtgacagctccacgcagagtctgagcctgtacgcgcgcttcctgcttaccggacaaacgttcatatccggtgcaaatctcgtttgtcagttcccatttatggtcacacctttccgccatatatccggaaaaatcttctgccgctattttccccttttgccgcaaaacttcagtcaaattattaaaaccatccattaccgaatggtattgttctccccaacaaaccggtttttgcggacaggatctgcacacgttctccgccgcagcggcaaaaatgtccgctacagtacctgatctagaagaaccaattttttggtgaacctgccgggtagtttctccgatgtctgacagtgctgccgaagcaaatttcaatttggacaaaaccacctcacgtgcggttttagaaaaagcatcggatcgttgccgcccccaaaaaatcaggctttgtaccgcagaagaggggattagcaaaaacaatactgcaccgaggaaaatctcatacaaaacgctgtaagcctggtattcactgcccataatcagcgcggttaagccatttacaatcacaaacaccaatgcctgcacaatcgatcccagctctgcaaacattcctgccagcataccgccaaaaccgtatgctgcagccaaaaataaaaaatcccctcccaaaattcccattgtgactcctgctgttaccccggcaatcgctccaccggattcccgtccgcattttgctgccaaaagaatcgtcactactgccacaacccggccaacagacacatctgcaatcacaaaagaacccaacgccatcaccagcagcgcataagtaataatcaaacaggaaacatctttcccgtttaatgtcgccagcttttctcttcgaagcaaagcctcagccgcatgctggaaaaaaaagcaggttccagccgctaaaaccgattcggacaggcaaatcaccacatcgtacaaaagatacccccgtatggaagccaacgcaattcccggcagcaaaacggcgctgaacgcaatggccggcgctatccagcgttgatatttttgcatcagttttggaggcagaagccatttgacagca

SEQ ID NO: 383 - DNA, 6828 bp, Unknown
  16S sequences of unknown bacteria
caaaaataagcgcaagcaaggcggtaaaaggcggcgagcgaaaccgtaatgggtttgactctcgtcagcctaaagagaatctataaaacccgaccgttttaaaagggtagatgttgcaagctgagaaatatatacctttgttttgccgttttcactcacaaccgcaaaggatttcggcaattcataggaaacggttataacgtcgccttttttctccgccttttcaagaaatttccgcgtgtgctttgaaacggtggtgctgtccaaatcaaaaatacccagcacatcccgcgagcgcacaaccgtgccctgccctaagtgtatatacatttatcagctcacctgcccgtttttaacatttattatttttccttttttaagctgcgctatatttgatgggtcgcagcaggttataaaggattgtatgcccttaatatggtttaaaacgtaattttgccgctcggggtcaagctcgctcataacgtcgtccagtaaaaacacggggtattcgcccgaaagcttatttattatttccgcctcggctagttttacagagagcgatacgctccgcttttgcccctgcgagccgaaatttcgcgccgatatgccgtttattttaaaaataagctcatctctgtgcggtcctaccgaggtagtgcccgaatacatatcgtccgcgcgggcttttttaagcctttcttcaagctcatccgccccgcacacgggcatatactcggtttcaagcacttccttacccgatgatatacctccgtaaacccccggcagaaattcctttaaatactcggtatatttattcctgaacgcataaatttttctgccgtttgccgctatttcgttttcaaatacatcaagcattacagataaagtgccgtcatacctgtaatccttaattatccggttgcgctgggttaccgcgcgggcgtatgcctttgaaatgcctatatatgcggggtaaagctgacctattgcaatatccaaaaaccgccgccgcaccgcgggtccgcccgagaccagctccaaatcatcaggtgaaaacactatcgccttaaagctgcccgcaagcgccgccgcgctttttagcttgctgccgttaagagatgctgtgcggtgttcttttatttcaatttcggcgtcgttttctattccgtcagccgaaaaatccattttaagctcggctttttctttgccaaaccgcacaaacgccgcgtccttagcggaacgaaagctttttattcccgtaaaaagccacataccctctaaaaggtttgttttgccctgcgcgttttcgccgcaaataacattcatttcatcgaaattatttatttcggtttcttctaaatttctgaaattgcggcaggaaaaataatttatcctcattctattacgaacttaaagccgtcaaattcggcggtatcgccgcttttaagcttttttccgcgcataaggcatatttcaccgtttaccttaacctcgccgttttgtataaccgttttggcgtgaccgccggttgaaacaatgccggctaatttcatagcgctgtcaagccggataaaatcttcctttatcgaaagcctttttatctccattatctcaacctcataggcattatcatatatttgaaatcgtcgccctcaagcggctctataagcacgcccgcgcccgagccgttgaaaagaatctgtacctgctcggtatcaaccgcctttaaagcctctaaaaggtagcggctgttaagccctatttcaaaattttcgccctctaatttggtattaaaggtttccgtagctctacctactgaggtagcacaggtaaacacaacattcaattcattgaaatagcagcgaataggtgttgaaaacgactcgcttataagcagggaaacacgctcaatggtatcggtaagctcccttgtattaacaaccactctttgcttgtgctcggcgggtattgttttttggtagtttacaaactcgccctctaagagacgggatataaaggagtagccgtctatattaaagcttacaagcctgtccccaaagcttatttccacattttcggtgtcctccgctataagctttacagcctcgccaacggctcttcccgataatataaaggaaaagctgcccgaaatatctaccttttcgcgccttattgcaaggcggtagccgtcaatcgccacaaactgcaatattccgtcctcaatagtaacgttaatacccgtaagtatcgccttagcgccctcgttttgggcaactgcgaatattgtcccctttaccatttcggtaagtatcttgccgcctattaaaatactgttgccgctgcctactgtcggcatttcggggaaatcctccgccgccatacccataatatcaaatgtagcctcgccgcatttaatatggcagttaagcttttcatctgcctctatgcttacctgcaagccgttcatacggcgcagtatgtcggcaagcaaacgcgcgtttataacaatatcgccaggctcgtcgcacttagcgtatatttcctttttcattcccatttcaaggttgtaggaaataagggtgaccttgccctgctcggcggataccaaaataccctctaataccggcatagaggtttttgagcctacaaccctttgcaaccttgaaaccgcttcaagcagtgaggcgcgttcaacagaaaaaatcatattttttcctcctaaaaacaaataataatataacagtaataataaggggagttaattgtggggataaatgccttaaaggcttttaaacagccgattttcgcggttgaaagaaatgtttataatttctttataattttgcgcgttttaagttatacacacaggtgttaataacttcgcggttaattaaggtttacagtgtggataatttcagtaagccgtgttatcgcttttaaggttttttataatatcgtctaccagttctttttggtagggcttgtccctcaaaaagttttcaatgcagcgcacgttatgaagcactgtagtgtgatccttgccgaagctttcgcctatcgccttgtaggaaaggttggtggtctcgcgcgctatatacattgcaacctgccgcgccagtgccagcgccgccgttctgcggttggaaagtatatcgctttcggaaacattgtaggttttagccacttcggatattatcttctcaatcttaataggctcggggcgggtatcgtttataacgtcctttataagcccctgcacaacccccatggtgggcgttttgttttgaatggcaatgtaagcgtgcagctttttaaccacgccctccaattgccttgtattcacctttatgtgctcggcaatgtagtaaaccaggctttcatctatttcaatgtgcatctgctcgcatttcttgtttataattcccacgcgggtctcaaagtccggcgcggtaatatccgcaggcaatccgctttcaaaacgggagcgtattctgtcgtccagcgttttaatttccttaatcgggcggtcaagcgttaccacaatctgcttgttattctgaaaaagggtattaaaggtgttgaaaaattcttcctgcgtctgttctttacctgctataaaatgaatatcgtctataagcagcacatccacattgcggaacttattgcgaaaatcgtcaatagtgccgagccccagcttaccctcctgcaatgcctttataagctgatttgtgaaatcctcgccccttatatactcaatttttttataggggaagtttttctttatctcgttttttatagccagcataaggtgggtcttgcccacgcccgagggtccgtaaataacaagggggttgtaggtgtttgcggggttggtcgccacagagtatgaggcggcgtaggcaaaacggttggtagcccccacaacaaagtttgaaaaggtgaaaaagtcctcaaacgaaagcccgtcgctgaactgctcggctttaagaattttttcctcttcatcctcacagataattttaacgcctatttcaatgcccataacctttttaacggcgtttttcaaaatttccgtataattctgctccactaccccgcgcatatattcattatctattgacagggtaagctcgcccgattcaagagaaacgggctttaaatccttcagaaaacagttaaaggccacttcggatattgtgattttacattcctcacaaaccgccgcccaaatgtcctcaacagaatttattgacattatgtaaaccatcctttaaagtatttctcccgaataaatcggctttttatatcgggggtcatactattgtataataatccaatcaattataccataatccctgattttttgcaagaaaaaagcgttatatttttaatttcggggcaaaataaaaataaaaacgaagggagcggctcaaaacggctataagaaccgatcttgcaatagaatcagccgaggggtcaggaaacaatcggacttcatttataaagaaagaagaaaagtgcggaaatgtaaacataacccgaataaaaataaaaaccgagacggaggaaaaggctgtaggcagaccgcgcggcgactatataacccttgaatttccagatatttcggtatccgttcccgataatttaaaagacgtaataaaaaatgaattaaacctccttttgcccgaaaaaagaggacttattttggcggcggggctcggaaacagtgatattacgcccgacgcactgggccccgccgccgcccgcagaatttttgcgacgcggcatattccccccgagctttcaaaaacggcggggcttgaaaatttacggcaggtggcggtaatagccccgggcgttctggggcagacaggcattgaggcgggcgagcttataaaagccgcggcggacagaataaagcccgacgcggtaatagtaatagacgcactggcagcgaaaagcccgaacaggctttttaagaccgtgcaaatctgcaatacgggaatatcccccggctcgggggttaaaaacagccgaaaggaaataagcgaaaaaacggtgggcgtgccggtaatagcgttaggcgtgcccacggtaattgataccgataccttaattgaggaaataacgggcgcggcgcctgcgcaaaaaagcggaatgtttgtaacccctaaagaggtggatatgctcaccgtgcggcttagtgaaattttaggcgaggctttaaatatgcttttgcagcccgaaattgaccccgcaataatttccgaactggtctaatttttattcgctctgaataaaattatttcagagggggcggaaaaaatgcaaaacggagcgggtgcggcaaggcttatttgtgtttttacggcgtgtattctgcttttgggctataatttttacggcaggtttttaaagccctcgcctgcggtacaggctgttgtaaaacccgagcttgaaaaaagagagataacaagcagcaaaagcagtacttccgcctccgaaaaaaccgaaagtaaggcagaaacggtaagctccgcttcttccgacagcaccgagagcaaaacaaaatccgagacaagcgttgccgcctctgccaagggcacagtaaaggggaaaattataaataactatatatcgccctataaggcggggctttcatataataacgtatacgttaaaaacagcgcgggcgtgagtattgatataaagcggctgcttaacgccccgcttacattcaaaatggaaaagagcgataaaccgcaggtgcttataatgcacacccacaccaccgaaacctatatgaccgaaaacaccgattactataccgacgctttttcgccccgttcgcgggataaggcggtaaatatggtaagcgtgggcaatattgtggcggataagcttaacgctgcgggcattaccaccctgcacgataccaccgagcacgattaccccaaatacaccggcagctattcgcgcgcggcaaaaacaataaacgggtacttaaaaaagtacccgagcataaaaatagtgcttgacctgcaccgtgacgcggcggcaaacggcaacgataaaataaagcttaccaccgaaataggcggcaaacgcgcggcgcaggtaatgcttgtaatgggctcgcaaagcggctcgcagacccattttcccaactggaaggaaaatttaaagctggcgctgcgcttacagcagacgctggaaaataaataccctacactcgcgcgcccgctaagccttacttccagcggatataacgaaagccttacaaaaggctcgctgcttatagagttcggcaccgacgcgaacaccgtggaggaggcgcactactccgcagggcttgtgggcaacgcgcttgcggatctgcttaataatttgaaatagggattgattaaaataaaaagaacgtttttaaggtcattcggaatttccttaacagtggctctctgccttataacaggcgttgcgggcatatccgcggcatacgaaaacacccgccgtatcggtttcggcgaatacacaaaagcggtggaaattcacgacggcaaaataaaaatactcgattttgaaattgatttaataaacaggtgataagggtggaattttaataggctcactctgatgagggaggcttgttttgcgcaatttttttaaaaggggtagttgctttcgtttttttactatattattatagtaaaaatcaaagcctgcggttttgcggggtataatattccaagaggtgttttcaaatggaatatgatgaaattttagatgagttacaagttgcaataagagggcttgaaatgaacacgcagt

SEQ ID NO: 384 - DNA, 2192 bp, Unknown
  16S sequences of unknown bacteria
ccgcatcagccgcaagcagaacgatgatcagccggcgggcccgcgcggtaaagcgcagcgaagcgccgcccgtcttctccgcccgcagcttcatcgacagatagatcaggatgatgcagatgatcgatccgctgcgcgcctgtgcatccttcaccagcagaaacaacagaaacggcagataatgcgcgatccgccggacagcagcggccagcgagatccgctcaatgatccagtcccggtagcggtcgatatgataatgacactgctgaaacaccttcagcgctcggtacccatcctggatctgcaaagcgatcaaggccgcgatctcaatccagatcataaccgcaccccaggaaagcacagacatcccgcatgaaccggaagccctgatgataataagcaaaatgatcttcatcgcgatacacgatcatgcgcgcaccggggatttccttttccatctttctccccatccacagcggcgtctcccgatcctcgctgccccagatgagcaataccggacagcggatcgcagagaggtccgggctgagatcttcgttcaccacccgcaccagcacctgtttcatgatcggactcgccttctgataatccgggctgcccgcagagccgcgcatgcccatccgcctcttcagatgatgccagtgctggctccgccgctgccacgacagtggggcgcgtatgccggccgcaccgctgagcaccattttctttgtcggataacgcgaagcgtagcgaatggcgatgcgtgcgccgaacgaatgtgcgatcaagatcggcgcttccatatgatcatgctcagcgatctcatggatgaagcgggcatactcctcgatcccccatggcgcgctgggctcaccgctctccccgaaccccggcagatccaggttcaccacgcggtaatggtccttcagctcattctggatcaagcgcatcatccgcatgtcctgtccccagccatgcagcaggatgaccccatctccctgaccaaggcgctgcagatgacagcggacaccgcaaaatgtttccatctgattcctcccagagagagtctatgccggatggtgtcagaagatgacgatgaataagactttgtgacacggcaaacacgaccagacacattctctgagtgtccgaaatcaggaatctgttcgataagaaagcacgcgacaatcatcaactgcgggttctatttatagaatatctaattatgcacaagcagacttgcacgatctaattcacacagcgaccattttctaaaaaatgcatcaatgatcgtaatttaggggtcggcacttcttccttcgggtcctgcctttcgatgatcattcttattttgaccagcgtctgacggccgtgataaacaccaacacagcaatcattctccacttgcttgtagacaataccgctcaaataaaagaccaggataaacatcccggtcttgatatgatatcctgcataggagtctcttttcgtgatcacaacctctcaggatatcccatcattctacgatatgattttctttcagccatttcttatagctttccaggctgacttcctgttcacttgataacaaagtatcttgcgtcgtaccttcccctacataataaagggatggcgttgaactgaaatcaccgaaatgctcatgaaccaatttcaaattttgctgctcgctgtagtcctcttcatctaatatgatgcaccacaacatgatacctttttcttttatatagtcatctgactgtgcaaaaaaatccatgcaatataggcaattgctttgtgtgacgatcaacaaaaagttttctccattatctttcttggcaatcgcatcatccatggagatagacttgactcccccatttcctggatccagtttgatctcaggatatgtcttaccacccatgcatcccgtcaggatcagcagacaaagactgagatatatcattatttttttcttcatatctgcactccattcccattctataatacgaagagcaggatctatatcagatcccgctctatgcgtggaagcccagccctctttccagtcccttcgcaattactcgataattgctggtttattcagacagcaggctattctgtcatcagaagactagcttctctttcttctgtatccgatcaccatcgctcctgcgactgccatgagcatcaatgcg

SEQ ID NO: 385 - DNA, 32759 bp, Unknown
  16S sequences of unknown bacteria
cccaaagcggcgcacgccgccatcacggcggcggacgatgccaataaaaaacgttttctcatagcttcctccttacaaaaaagctgtcatgttttttcaaagcgcaaacggaacgcgcctgttttctgtttggattgttttcagtacaaaaccagttgcagccgcggctttacgcgcgcccaaacgccttgcgtcactttcgtgctgtaaacgtttttgccgtaaatattcaccccgacgttataggcgcgccaggagatctcctccacccgaccgccaattcgcctcaccacgtccgagaaacgcgcctgcgcgtcctccgtaatcaaagccactttggacggagcgagctttaacgtatgctccgcgacgagctccccgtccacaaaatagaagacgttttcgccgcttctcaccgcccgcagggtatgtttcgcggaatagtcgaaatcctcctccatttttatcttgtacgtcttatcattgcgctgaccgccgacccgctcgtaaatgacgatattcgaatagtaggcgtccagatacagcgccgcaaaattgtcgtcgtccacgtaggcggcaaacccgcccgcacgggggaaagtttcgttgagtccgttcctcagcacccgcacgtcgaaggaaaaatcgtaattctcagacgccgcgccgccatacagccccgttctcccatagccgaccgccgtctgcgtatacacgtcgggactcgtattttccgcggtgatcttcaaacccgaatacccctcgatattcacggaaacgtcatagaatttttccttcgccgaaaccgtcaggctctttaacaattcttttttgccgcccttcacgccgtaaatactgatctcggctctttcggcctcgtccccggccgcaagcgcggcgcggatattcagcgcggtgcgcccgcccagattcgtaacgtcgatcgtgcggaacgccgcttctccgaattccttatccgaaaggtcgagcgaatggccgtcgatatagcgggcgccgtcgatgacgatctccccgccgtccgcgcccgaaacgacgtatcccgcgtccgcaaattcagaagagccctcgacctccgcttcgtattcccgcgtcgtcgaaccgaaacggttatacgccgtcacggtcagtttgtagcttcctgcaaaaagcccttccaaaaggttggatttcgcgccgaattcgtccgcgataaaggcgtataccgtttcgccctccttttccagagcgaatacgtaatagtcggcgttttcggaaagcccgagcgtcaattccaatctgccgattcccgcaagcgtttcaacggaaaaagccttcggacgggcgaccgtttcttccgcgcccgcggcggtagtatccatgaaatacacgatctccgcgccgtaactttcctcgatggtcagatcgattccctttttaagctgcgcgcccgtataggttgcgaaaggaatatatccttcttccgaccagacgtaataagtcgccgcgtcggaaataccgtcgaatttaagagttacggtgtcgtccaccgttccgtcgggatccggcttgaacgcgagcgccgcccccttgcccgtatcggggttgaaatactgcacgccgtcccaatgaatgccgtcagcgcggggcagaatgtgatagagatccccgtatttcactaattcccgcatccagttttggtagatggaaacggtattgacgagggaagcgtacgtttcgggcgccatgtccgagggcatactgatcatgggacagggcgcacccatcagcatggaccagaaacgatagttgtcgttgggataaggtccgtcgccgttatacatatagtcgttcatccacagcatcagctgcatggacggcagagcgtagctggcgtcgtagaagcttctgcggacgttgatgggatcgtaagcgtccgtggtctgaatgcgcgtggcgtatttcatgcttgcaaagtccttcaaggtgccgccgcagttgcagttttcccacttgaaataatgcgcttcgctgtccccgttgacgtcggacggcgcggggaaaagtttatacatttcctcgaacaattgatagacgtacagggaagtccaatatcccacgtccgcgcggttgtcgatgtggtcgtgcccctctttgccgcagtagccgagtatatagccgaagtcggtgcggattccgtccaatccaagttccatgaaataggttttgagatattcggacaagaacgcccgcgcgtcgctgtccgcgatacaaagttcgtcccagatcttattttcgcccgtggcgaaccagttgggattgccgttgatgccgattcccgtcatcgcgtccgtgtgcagcgagctgccgttgcccgcctgcatatagaggctgaaattcatgcccagcgcgttgacgaaatcggaggaataggtgatggaactctgccatttttcatgcacgccccgccaatccccgatgtccttccaccaataggtgtcgatggtgatttcgtctatccccatttccgcaagctgatgcacgcccgtatagaacttgctgtcgctcatgcgccaggaacggcgctcctcgtccaaaagctcccacagattgaactcgaaggagggcagggaatcgtcgaggcgatttacctcgggcatattgaaggcgaacagccagcttttgagctgattggagccgtcgtccacgccgcccgcgtaggcgtccacaaaggactcggggatatagaaagtttcccccgcggggatttccgtttcgaagcgcgggcgaagccccgcctcgatatacacgccgtcgctgcccgagccgtagacgtgcgcgcgacagtccgaccagacgactccgatattcaatccttccccgccgtccgcgttcagggatacccagggcataaagcccgcgtcctcctgatagccgttgttataatcggtggaactgaacacgtccatgtcgtagccgtccgatattctgtcgcagcggtagccgtaggaagtctgatacaccgcgcccttataggaataggaggcggtcaggttgctgccctgcggcttcgtcaaagacatggtaagggtgtctgcggtggaaacgtaaattttctccccgcttttattgacgagatctatccgatgggacacgggcgcggcaaagtccgactgcgtcgaccataccgattttaaagaaaatttcccgctttcatccgcatacgaaaaggtgtacgattttgtcttgccgacatagtcttgtttaaagacgtcgatgtttttggaaacgatatcctcttcttcatactcagcgccctcgaaattccaaacgagggggaagggcgttccgccttttccgccgaggcgcacttcgtcggggaaacgcacgaaggaagaatctttcagccatcgatagccgtctgcgcgggaaatattttcgataattacgccgttggacgcggggcacacggtgacggacgtggaagaagatgcgagcgtataactcttttcggacacggcgttgtccgcgacgaaaatgctcaattcctccctaagattccccgctttcacttcgataacgtttctgcccgccgaagccacggagatttccctggaaaatttcccgtattttcccgccgcggctttgcccgccgaaacgccgttcaggaaaatttccgcttccgtttccgcgcctaaaagggtgcccgaaacggtgaacacgttatttcccgtcgccgccaccgactgattggcgatggggctgtcgagccttaaacagtcgtcgagcacggaagtcgtcttggcgatgacgggatctatccagaccgcgaaatcgcactcgtagcccccgtcgccgttgtcgaccatgagtttgagccgcgaaacgcccgaaatatcgacgaggataaactgcgcatcgtcgctgacgcggacgaggttggacgcgaacagaatttttccgtccccctccacgtaaaatttcacgctgcccgccgtgccgccgttggaggtatccttgctgacgccgattcgggcggcgaacacggtgtaccctaatccttcgggtatattcacctgtacgtaggcgtatttgtccgcttcgttgaaggcgtgcatggaaacgcccttttcgtatatcgtgccgttgacgttgatgggatagcccatgacgtctttatcgatattgacggtaccccacccgctttccgcgccgctccattcgagctcgctgattcgttccttgtcgccgtaaccgcttctaaacagcagattttcaccgaacacgccgacgcatccttcgtcgcccttgacttcgaggatgatcttttccatatttttgcccgcgtaccaggcgatctccaaataggaattttccgccgagatttcgggcgacgtatacaccgaacgggaaccgtccgcaaacacggcagtgactttgaacgtaagcgcgccccgatagccttcctgcaaaccgatcaccgcggagaaggtatccgcttccttgtcgaaaacgccgaaagcgacggaagaaccggcaaagagggagatagaggaagccacccctttggcgccgtttttcgaaagaatacgcgcttcttttccgagcggcgttacgtcccgtccgaaaggatagggataattttcgttaaggctttccgataccgcaaagccgccgaacgccgctccgtcgccgtacagcctggcgtttacgaattccacttccccgcccgcgttctcagccttcgcaatcagccgcacctctaaattcgccgcgttttcagggagcagagaagaaactctcaaaggcgctccgcccttgtcgaggggaactatctccacggctttcgcaaccaattcgccgtccgcatacacttccgcataggcgcccgcgcccgaacgcatgacaaaaagcccttcaaaaaactgcgcgttcgaagaagaaatatcaaaatcggcatacgcgtaattttccgagttatcgggattggcgagatatttttcgtaagaggcgtttttgagcgagaagcccacgcccttttcaaaggaaagggactccttgccccgcgtatagtcgagcgcgccgccggaagcggttttgtcgattcccaaagttccttccccgaccgacgaggaaagaagatagaaatctccgagatgagcggcggcttttccgagcgtcatcgaaaacgcgggcgcgccgatgacggccatgtcgtccccgattccgtcgcccccgtcctcgatgaagaagcggatacgcgccgcgcccgacgtattaaggagcagtttatactgccccatatatccgtacaatacgggcgtgcggacggaacggaggactttcccctcccgatcgaccgcgcgcgcctcgatgcgcacggatcccgcgctgctgccgcccgccacggcctcgtcgatgccgacgtatgcggaaaaccaagcgtaatttccgtcgacgacgagatcgaacgaggaaacgctgttgacgcagaagccgtatttatattccgtattcccgatcttcaagccgccgccgtacagattggcgttgcgctggacgggcacgggccaggcgccgtaaacggcgttttccacccgcatggacaccgcgttgggagagcttttgtaaaatgcggcgtcgccgaaggaaacgcacgtcccctgtttgccgaacacggaaatttttatctccgcgacgtccgcaagcgaaatttcgaatttatcgtgaaaatcgcttcccttcaccgttttttcttcgagcagagtcccgtccgcgtaaaactgaaagcgtgcggaagccgccgcgtccccgtttgcggcgtccacgccgaaatcggtcgtgaaaagatcgaagcccgaattttccgaaacgggaatcgtcagcgtcgccgcctgcgcattagaaatcgtcagcaaagacacgcccctatcgaatcgcctctgcgccacggcgggtccgagaacgatttttcccttgtcgagcgcgttcgaatcgacggcgccgcgggaagatgcgcccccgtctgacaccgtatactccgtttcgcccagatacgtgacctgcacgggcaattcctcctccgcggcagcacggagggaaggcagaacgccgaaaatcgccgagcagaccaggcagacgaatgcgaggcacgacagaacgcctatgtatatctttcgcttaaccattttccgcctcctttaaaatcaatttgcggtacgacgcgggatcgagcgcgtcgaagaaaacgctctcgcccctgtaaacgcactccccgtcccgcgttccgtttttcacgcagtcggcggcaaagcgcaattcgctctccttcgtaatctgcatatatcccttgggcgcgtaagccgagcccgtattgtaacgggacaaataatcgtaggaaataaacagctccgccgtatctcccgcgaacaccgcacgcggcgcgcagtaaggcacatagagagaagtctcgtaaaacgcgtaagagttgccgaacgagcactccacttttccggagcgattcaaaatgacctgatagtcgtatacgtacggttttccgagtccgtgatcgacggtgctgagaacgagtctgaaactctccacgccctccgcaaaggcatattttacgtgcaacccttttgcggaacgataaatttccgcctcggatccgccgacggacaagaccgctttcgcacccgaatacacgtcctcgtcgaaagcgccgtccacgcgatagcccccgtcgttttcgagcgccgcgaacaatttattgtctttgtcgatgcgcacatagctcgcggggctttcgctgtcgcagtaaatgcccgcgtaatgataattgttccacaccacgctcccgcgggagttttctccgccgagtcgaagggaaagccccaaaacgtcctctcgcgaaggcgtaaatccgtcggaggcggtgaagaaggaataaggaatatacatttccgcgacataggaatattcttcgcattccttatctatcgccaaagacagggcgcgcagatcttccacaggatccgcccagtccttatataagccgcggtagacggcgaccgaacgatccagccaaatgcggaaggtgtagtcgtaaatattcgcgtattgaccgcgcacttcgtattcgtcgccgagattgccgcccatcttataggcggaatccttcgtgctgacgtaaaagacgagtacgtctttggcggtcagtttacgggcgtcgcccaaaaacgccacgcgcagcccctccgcgtcgcggtagacgagtcctttcacgccgtccgcgtcctccgttttgggaatattcagcgccgcggcctttttccaatacgcctcggtaagttttccgtccacggaaggatcggaaggctctccgatctcgtccaccagcgcgtccctcgtcatgatccgtccgtcgctcatcagcaccgcgtacgtttcgggatagagcgggtcgcagaactccccgtagctccaaccgtcccaatccttgttggggtccgtcccccaatcggaagtggtattatattccgcgctcgcccgccaaagtccgaaagtgattccgagtcttgtatcctctccgacgccgcccaccgtgtatttgttgaacagcgcgtacgggatatacagttcgaggaaatatccgtcgtcctcgtccgtattgtcgttcggcgtggtgtgcctgccgtaggaatatcccgcggcgggaagcgcgtcgtaagggaaaaattctctgtaaacgccgttatgtccgtgcagaacctgcaaagcgccgttcgattgcagaaagaagacgacgttgttgttttcgttgagtacggcgtgaaattccccgacgttgaacgccacttcgacgcggtcgaaatcattgacttttttatcgcccgaaacatcgaagccgaggtataacccgtctgagtcccgcgcaatgcgcaccgtcatcccttccagaccgcggagtccccccacttctgtgaccgccgcggaatcggaatgatatttggctttggaaatatcgccgtccgctctttttgcgtcgtgatagagcccattgtcgttgaagagatagccgtcgggcttcacttctatatacttgaagggatagataggctcggggaaaagcgcaaactcgttccagccgtcccaatcgctcttatccccctcgcgcacgcaccccatcgtcagatagaaggaatccgcagcggaaattttcaacagtttatagggaatataaagctccgcggtataccctttatcgtcctcgttgccgctctctatcgtactgccctctttcagccttacggcaaacgcgggtcttcgggaataggagagcttggaaagtttctcttccctccacagcgattccccgcccgtaccgcgcatcaggacgagcttcccgctcagatacgcgtcgaaacggacagtggtattctcgtctggataccgcgccgtgcccttcgtatcgagatagatttcaaggcgctcttctccgctcacgcgtttgtcgtccgagccgtcgaaggcgagaaaaatcccgtcgcttccgcgggcgatctttaccccgatcccttccaagccgcgcgagccgccgagggaagcagcgcttgcctgcgcatacagcgcgtcggaaatctcgccgtccacgccctccacgaccttttccgcgcccgacgacgcgatatagatcaatttatgcgactccacgccgtccgagcgcgccgcgccgaaacgaacggaatataagccggcccaatcgacgaagaacgcgtttcccgcgcccgcctgaacgtcggagccgtcgggggccgtaatttttaccgtcacggaaagctcgccctcggcgtcggacgcggtgcattcgggaagagtatacacgcttccctccgaagtttccgtttcgtattctcctatcgtgagcacaggcgcggaatttctgtcgcgcacgacgatctccgtttcttcctccgccctgttgcccgacttgtctttcgccgtaaagacgactcgataaacgcccgcctcgtgcggcacgaattttcctccgctgacgccgacctctttgccggacggagaaataactacgtagcttacgggcaccgttccgtctttgtcgtctgccgccgtggcgacgagtatcgtaatctcctcttccgtatatcccgtcgaatgttcgtacaacgtcaaaacgggaggcgtcttatccttccccccacagctgtatatccccattgtcaggcataagaaaaaagcagcagccaaaaagcctcgtatttttttcataaacccacctcttttcaatgcgttcggattgccgatttgcgcttctaatataacattgcttacgcaatgtttgaatagggcgaaaaaatgctgataaatacttcgtacttccgcattttcgcttctattataacaccgaaaaggccgtctgtattgtatcatattccgctatcgctgtaaaatatttcactttattcccacaagtttcccttcaaaaaagttgcaaaatatacgatttttaggtataatacagggagaaacagtgactttttcggtaaaatcccccgtttttttatcggacgcgcaaaaatcggaaatccgaaaacgcatctgtcgctgtaaaataatttccaaaaaaggaaaatgctgatggataaaaaatatcccgcccgactgcctctcgcggacaaaccgatatggacataccgggactgttttcccgacgaacgccctttaaaactcacaagcaccttctgccataaaaattataatatcgatatgcactcccacgacttttacgaaatcaacatcaccgtcaacggcgaagggatgcattacgccaatcataaaagctataaagtaagcacaggcgacgtggtggtcatcccgccggaaatgtaccacggctatcataacggagataagctcaacgtgttccacgtgctggtgcatagaaactacttcaacaagtattcgggagatttaagcgttctttccgcgttcaatctcttgtttcacgtcgatcccgctctgcgcgattcgtataccattccccttttccacatcgaagggaaaatatacgaagacatcctcttcctccttcaaaagctggacgaattggaacagcagacgaacaagattcccgatcgcgcggactaccttctcacttattccctttcctttacgctcatcgtcacgctctgcaaggaatacgcgcggcagtacgctccgtttatcgagagcgcggaaaagacggacgatatcggcatcatttccgtttcggaatatatctatcgcaatttcgcccaaaagataacgctcgacgacctgtgctgcgtcagtatgatgagcaagaccctgctctgcgaaaaattcaaaaaatatttcggacagaccccgatgaattacgtcaatcgctatcgggtgctgatcgcaaaaaacatggtcatcgaaacggacaaaacgatcaccgagatcgcgcaggaaacgggatttttcgacgtgtcgcatatgttgaaagtctattcgagatacgaaagcgaaagcccctcgaaactccgcgaggggttgagaaaaaacctcaaaggcacaagataaaaaatccaatccccacgaaaggggaagcgcaaggccatacgctctccctctcgtcttttcagcctcatctcaaccctgcccctccccgacggagaaaacgacaatccccatcacacgccgaacgcacattttgtataagtcccgtaagggcatagctcccaatcggctctattcgcgttgcgattatcgctacgcgttacacgcacggtttacagaaactcctataaggacagaagataaacgggcggcgcaaggaaaggatttacccctttcccgcattgcgctcgcagcttccctgcggagagtcctctcgcgggatagcacgaaagaataggacgagtactttggttgatatcgttgaaaccgactattgcctccgcatgatattttcagttaccacgcttccttgttttattttttaatggaggcgttttctttttacaatagaaaaaaggcgcggcgacaaatcctgtccgcgtcttttttcccgaaacattccgaaaactattttatttttttctcaatcttgctgcggccataaatataagcggcaccgccatcgcagcgtatcccgccgtcgaggaaccgcagccgtttttgtcgcttttgtcgcccgaacttaccgcgcgtaaagtcactgtttcggatacataagtaaattcgcccgcaggagtttccgtcgtacaggtcaaaaccgccaaagccgtatctccttctttttcgagcgttccggaaagcagcttgtatccgcattgcacgcgctcctctcccgcatatttctgtaaaacggccatcaattcctccgttttaccgagcgcgacttcgtattctttttccgctttcaaattatacggaagctccgaaatatcctgaggagcgtccagcatcaatccgcagattcccctgctataagaagcatacgcgcccgttgcggttttggaatcgggatttccccatgccgtcaatccgcgatcccgcagtttttctgtcgcatccgcataagaataagcctcggcgcccgacggcgtgcaaaaccatgccgtattcaggctacaaacgagttttacgctcgccgcgaatcccctgtccgtcgtcaatccgccgaaaagtcccgtcggaacttcgggaattaactctgcggctctcaaaagctgttccgtataaaaagtggcgacgacgcattgatcgaacatatcgtgcttttggagctgttcacggagaaggggaaggatgttctcctttgcggattttatttcgagaatcaaaacgacgggtttcccttttagaaaagttaacgcctcgtcgagcgtgggaatttcctgcccgtctttcagtcgatgcgttttgatctcttcaagcgtggaagattcgacgcccacgcccgtccccgtcggcgaggtgttcagcgtatcgtcatgcatgataacgatatgattgtccgcagtcacttttaaatcggtttcgatatgcgtggctccgcaatcgatcgcataccgataagcggcaagagaattttccgaaattttcgtctgatccgagaaagaaacgcccctgtgcccgatcatataggaagtccgaacaaacgaatcggcgcccatatcttggtaaatcgaatgcgccttctccggcgactgcgtgacgattccgtatgcgccgctgaaaatgccccgacagagttcctcgtcgttttccgcgtttacccacacggtaagcagccgcgcctgtatgtaatcgacgagttcacgggaggcggcagccgcgttcagcaatacggtgcgcgcccgcgaagaattggtttccttcaccgcctcgaaagcgtcgtcgacgttttccgccaagcgcatatccagtacgccgcgaatttcgggaagctccccgcgaacttttttaagcacggaggaggtccccagaacggaaatatcccaaattcctttttcttttatgtaatcgacaaacgcgtcttctttcccttccgcgagagaaacgacgggatatgccgcaatattcccgtaaaaagaatcgaattttcccaaagaaccgccgtcggcggctgtgacgtttaaattttcgtccacggatattacgaggtttgaggccgcggaaattttttccttcgaacaatccgccgccgtatccgcgcgcagaacgacggcgggaggcataatcaatccttcggcttcttcttccgcggcggcgggaaaactcctcacgctcccgatacacagacaaaggccgaccaggacaaacgccgcacgttttatattttttaaaaagttcatcttccggctctccccttcccctatttctccacgacgaagaaacccgttctgtttgcgggaagcgtataacggaaagaaaccttgccgtccgcaaaggcggcgtctacgtcctctatttctcccgaaaccgcgtcgtagaatttcaccgatttgcccgcagcgtccagctcgaagccgtattctttgtcgctctcgtaggcgttgaccacggtaaacacgctgtaattgcggttttcccgtttggtcacgaatacgttgtacgcggaatcgtcgtcgagcagcgcatacgtatgcccgtttttcctcaaataatttgcaacgccgttagaagaggttgccgtatgagccttttccgcgatctttgaaaaacgcgccgcgacgtcgttttttcccgtttcgcaaaccacttcttcaaagtcggaaagtacgatctgcacgcctgcttcggcggcttctatcagtttcagcaccgcctccgaccgcatcgccgtggtatagggaatcgccaccgccgtatagcgttcgccgttaggggcgaccagcgcgccgtcctccaccttgcaggcggcgagattgagatagttcacgagatcgtaatccacttgctttcccaccaaggtcctgcaaaggtcgccgaaactgtcgctgatccgtttggcgctttccgtgggctgccacatattgagggaagggagggtttccgcacaggcgccttcgtacggataatagacggctactttcgcgctgtgcgtgacgcccgtcgtcatgtagcgcattcttcctatcgccgtcgagaagatcttatcctcttccgccgtatggtcgttgccctgataatagtaggaagcaaaggaattcacacccatgcacacctgcgcacccacggcgttgatctgatcgtaaatatcccctatcgtactgtcgaacgcgccggaaatttccgcaaacgtatccgattttcccgtaaactcggcggcggaagccgccatcttggaaacgacgcaggaagcgttgattgccgccagcggctcggaatagagcaggtcggagccggggattcccatcgtgcccaaaagctgtatcatgtcccccgcaaaccagggattctgatagagcgcctcttcgagaagaagatgccccgagctctttactcccttggatttacaccagctttcgatctgtccgagataattggcccggaacagctcgcccgtcagcgcgtaaaagtccatgcgcacctgcttcgccttaacgctgccgtcgtcgttgtaaagatatcccaaaagcggtttgaggtcatagccgtatgcggctttaaatttctcgaaaagcgcgtcggaatagttcagacattccacgatcgggagattgggatccggcttgtcgagcacctgacgggggcggtcgctgatttcgaaatagctgccttgcagcgccggctcgtccgtaaagaacgcctgtatcccgctcccgaaatattcgctcaacgcgtcgtaatacttctcgtgcgtaatgccgatgaattttttagcgggcgcctcgtccagcatattgatatagcgctgctgcgcgtaccagttttccatcgaatgggtgttttcgtaccacggcttggacatataagccgctaaaacgcgaggcgttttcgagcgattggtataggatacgaaagtcccgtcctccgcaatcgaagaggaaacgtcctccgccgaggataagtccatttccgatttcgagccgccttcgtacacgtaggcggaaacgatgcgggtatgtccgtaaaggaggtctatccgtcccgtcgcacccgcctctatcgtcctatactgcgggaccaatccctgcgcctcgtattcgggattgcctttcagcgtctgtccgtaagcggcgcccgaaggatagccgtactcgtcgtaaagccatacgtgcatccccttgtctacggcgtgagaaacgcagttcgccagcgaggaaaacgcccgcgcgttctgcaaataatccgttccccaggcgacgttcgtgacgatgccgccgtaaccgcgggcatagacgtcgtcgatgagcgaggtcgtcgcgccgtgcatcatcaccataggacggtcgtttaaagaaggatcggcaaagagcgaaacggagagtttcttgtcgtcgttcggctcgacggccgaagaggaagattcaaaggaggactcccgggaagaatctcctccgccgccgcaggcgctcaatgcggaaaacgtcaataataaagaaagtatgccgctcatgagagaaattgcctttttcatgttttctctcctcagcggagcctgcgcttgaatgcgaatccgcagaatacaagaacggcggcggagattgccaagcccccggcggcgatcgaggagccgcagcccgcgggttccctgccgcccgagtgagaagcggaattgttttccgacgcggaatcgccccctgagcccgaatcggtgtaatccacgccgttgatgctcctgatcgccactttactcaacgtattggacgttttttcctgcgtattcatggcgacgacgagatagatctttccgtcgggaaaaatcacgtcgcgatcgataaacgccagctgtcccgaagaagagagtttcgtgccgttcacgtacagattataaaaccgttccccgtccgtcgtatcgtaagagagcttcaacgtgacgtctttggaaagcgaaacgcccgccgaagcgttcaacagctgccaggtgtccaccgtttggctggaaggatcgtcccccgccgttctatacccttcgtgatagacgctggattccagccgaagatccccgtcatagctgaaaaagcgcgtaaacaatcccggcgtatcttttgcccagccgtactgttcgctgtttctccaattgatgaattttggaacgcccatgatgccgatgcccgtccacacgtcgttcgcgtttcttcccgaagccacgtaatcgtccatcgtcacgcggaattttatttcgaaactttcggtgttgtcgaaaggcacttcgaggatcgcgatcgcctgattgtcgggaatccccatttccagctgattaagttcgatcccctccttcgtatagtctatcgaggtgcgggtgagagtccaatcctccgccgtatttttcgccgcttccgcaacggcggcgacgggagtgagcgcggcggaagaaatcgccgcgaacgccaatgcaccgagaatccattttttcatgtttacctcctttcctccgttccgccttaaagaaacggaatctctctcgaacaaacgcgccgagaatcgtctttatctttttttattttctttctccgtcggaaaacggaccgtagcccgtcaaaaagccgaaaagagaaccgacggctttctccgacggggaagtttcccgaacgcgcgtctttcggacgttcgggattcctgcgcccgttacggattatttccgttttctcctgatcaaaagcgcgccggctccgcccgcggcgagcgccaaaagcaccgagccaatcgcgacggaggacccgcagccgccgcccgaagaatctttttcggacgtcgcggactcggacgaagaagcgcccgaagaagtcgaggaatcggcaggcgcctgcttttcttcgatgacgaacgccttttcaatcgaagagttgcccgcgtattcgttgatgaagtatacgattgccttacccgttcccacagccttattgtccgcatattccacgtaataatcctcgtctgcggcgagcgtctttgttcccaccttcaccgtgacggcgggcttatacgtcttcccctcctcaaattcgtatttgtcctcggagagggtcacttcggcgctcgccgcgtcgtaagtatacgcctgcatggagaataccgccatgccgcggtgttcccaatggtttccgtcgcagccttccccttcgtaaatcgcggtggaaaggaaggtctgccccctttcgttgatgaagagggcggcgtcgagttccagccccgtttccgattttaaaacgctgtcgtccgaggcttttgcaaacgtgagggaatatttgccgtccgtccccttagcgagggaaaaatcgagtttttcgttcagcgcgttgtcgaggaaaaaggtgcgtatcgtttccgtagccccttccacgctcttgaccacctgcacttccacgcaattcggcgcggtcgtcccggaatagttcgtgatatgcaggaaatagccgtttccgccgcccccgaaatagggataggatttatcgttccccgcctgtgcgggcgacgcggaaaaggaatatgtcacccagccgtccacattgtcgcccccttcttccaccgtctttttggaaagcagtttgaactgcgtttccatttccaccttcgttccctcgaagggcacgagcagtccggcgtgcgcaaacgtcgtgaagccgccgccatccacgtcgcccccgccgccgtaatagtccaccagatcgaccttctcgggcacataggtctttgcagacatcgcgggcgcctcttccgcgcagcccgccaccgtcgccgtcgcggccgccgccgcaaaagccgtcatcgtaagcgccaagacggcgctcatccagttctttaatcgcctcattttcttcctcctgaaaaatttatttttttatttcgcacggattcccgcacaaaagacgatccatcgcgcacacccgttcgatatagaaggacgaaaatctttcctcgtccacttccgcggacacctccatatcgcttcggggctctcttttccaattgaaatcggcaagattcacgcattttccgcgcgaatatccgcccgatagttccacttttaaatttcctttttcgaatttcacgaactcgtcggagatcgccgcgcccaaggtgagcgggtcgtgtaaaatcatcccgtccccccacagcgcgctcatccgcatcaccgtcctgacggcgtcgctcccgcacgccgaaagtcgtttcgtctgcgctttcgaaagccggcagcggaacgtcacgtccagcgtcacgacttttttcggaatcttcgaagaaaagacgacgtccgcggcttccgggtcgcagctcaaattaaattcgttcagattcagcttcgccgcgcctcccattatgtaaatgcaccgtattttttccgccgcctgcgggaagcgctcgatcaatctcgcggcgttcgtcagcgcgcccaaagtcaccagggaaatttccccgcggctttgagaaaagcgcttccccatttcctccacggcgtccgtcccgtcgtattccgcctttccgaacaatacgtccgaataggtcttgggcaggcgttttacgtccacgggaatgtcgtgcacggactttgcgagatagggcgccccgtttcccgcatagacgggcacctttccgaatccgcccattttaagaagcgtcttggcgatcttcgcgcgcgcctcggtattttcgaatacggtactgacgccgaccagctccacctccttggacgccatggcgagcagcagcgccagagcgtcgtcgatgtcgcccccgatatcggtatccaaccaaattttcattatctctcctctcttacatttttatcgaagaggccatcagcccctggatatagaatttattgccgaacaaaaacaccaacaacaggggcagggaagcgatgagatatcccgaataggtaacgggcatattctgcgaataaagattcctgaactccacgatcaaccccgccgaaatggtaagcttgccgtaattcgtagaaatgaccgtcatgggccagatataatcgttccaaagcccgtttatctgctgaatggcgagcgtcaccaaaatggggatacacaggggcagcgccattttccgataagcctgaaaatcggtcgctccgtctattttcgccgcgttgaagagatcgtcgggcaatcccttaaagaacatggacaagagaaagaccgcgcccacgggctgcatcgtccactgcggcagcaggatggcaaacagggaatcgttgagattcagccctttatacatcaaaaattgcggcaccaaggtcagaacgccgggaatcatcatcagacagagcaccatcgtaaagaagagcgccttgccgggaaaatccatctttgcgaacgcgtaagacgccaaagaggcgatgaacagcgaacccgcaatcccgaataccgccaccgcgacggtgttatacatataccctcccactttggaaaacgcggtggcgaggttggaaattttcatcggcagcgtgggataaaacttgctcagatcgtattccgccgtcgtcttgaaggcgcaccacacggacatggcgagcggatagatcatgcagaaaagaaggatcgccatggtcaggtgcagaagggtctgcccgacgagttttttccatctcgattgaaaataaagcgcgttgatttttttcataccgtcctcctcactcttcctgcgccttggcgaacggaccgtaatgcatgagtttaaacgccaccagcgatatggaaaggatcgcaatgaacaacacggtgcctatcgcgcaggcatagccgtatcttcccgaggtgaacgccagcttatacatataccagccgggcacgtaggtgtcgtagccgggaccgccgttcgtcagtacgatctgaatgctgtaatcctgtaaaagtccgatcagtccgaagataaagaaatatcggatctgtcccacaagcaggggaatatcgatggaaaaaatccttcgccaggtgccgcaaccgtccagttcggacgcctcgatcacctcccccgaaacggcgttcatgcccgaaatataaatgaggatattcgtgccgttcacccaaggaaagccgaggatgatgacggaagggatcacccatttcgaatcgttgaggaaatcgatcacctcccctttgccgatcagtccgatgctctccatcagtttggaaaaaagcccgctcgtcggctcaaagatgttctgccaaatcagcatcccgacgacgccgggggcgatcatgggcagaagaacggcgatccgataaaaagactgcatccgcttgctctgcgtattgaaaatcagctccgcaaacaggaggggcatacagacgccgatgatgagccgcggcactaagaggacgatcatcgtcgagatggaatcgagaaagatcctgtctttaaagagatcggaataattgtcgatgccgataaacgtcttttcgcccgtgccgttccaattgaagagcgaagtgacgatgccgctgatcgcgggataatagcagaaacccaccgcgccgatcatcaggggcaggatgaacaaataggcgttcttattcttccagatcctatgccccagcgtattttttttcgccttatccattcgtttcctccttcggctcgccccgcacgtcctgccaatcgtcgtgcacggcgtcctcgtcgggcttcgtcacgccgaacgtatattccgcctttgcgggcaccataaagatcgaagaattcgactcgtcctgcaaatagatggtgacgtcttccaggggagtcagcttatcgttcaaatataaatagggataatagcggaaggtgatcagtccgtccgcgtccgtcacgcaccgcgacgagggcaaaaatccgttggaaacgtacagataaatggtgtgcccctcgacgggcctgccgtctttcgtcagttttacggtgatctttacggtggactgtccatccgctacaaacgtatccgaggacgccccgatcagctcgtattcgtaccgtttggaaatcccgtaatccaccgcgtacgccgtgcccagaagaagacagcaggccgcggcgatccataattttttcatgccgtcacctcaataaacgatattccagtccgcggtgtccagccccatattggcggcgaaggcttttgctcccgcggcttgaatggcgtccgcttccgtccagaacgcctcgtcggaaatcttgccgttcacccattcctcgaaacggcggttcatcctgtcggtgtattcgtccgtaaatcccgcgggccatgccgcattcggtttgacggggaatttctgccggataaattcgtcgatgagattggaatgcgccgttcctttgaccgctcctaaaacgcccgaattttcgatgcagacgagcgaaacgttttccggtttcgacaggtacttcaaaaacctgagcgccgcatccaggacctcgggcttgccctccaccgccgctttcatgatgttcacggcgagatcgggcgcggggttgtaaggtccgttggaaaactcgacgtccttgacgtagggagaggtatccgtggacaccaggggcgccacgaaaacgccgtaatcgaaatttctcaccacgttggagttctcggacgggatcgcccaaagcccttcctcgcggatccccaccgtaccgttgagccactgcgcgttgtaatcgatggacgcccaacccgttttcagcatatgggtgtaataatatttgaggttgcggtacatatccttcgtatactcgtggctcgtggaaaacacgccttcgaggcaggcccgcgcctgctccgcggaactcataatgccgttgccgtcgtagtcgatgacgtccatcaaagcgcccgcataggcgggcgacatgacggaaatgaacacccaggcgtcaaaagtggtggtggtgtcgaagtacagccagggcgcgacgcccacatagcccttttcttctaacttttccgtcgcggtcacgaattgtccccaggtgacgggcacttcctcaatgcccgctgcggaaaacgccgtcttgttatagaagtacccggtggaggcgccgggatagacggtcagagggatcgccaccgtttcgccgcgcgcgttgataacggagttggattcccaaagataatcccggaaaacgtccttccacgtcgcatatccgccctcgtattcccacggcgaatcgaggtactcgtcgagcgggagataccagtcccggtcctgatagcgggtgccccagctgaacgctatggcgggtacggtgcctcccgcgatctgcgtggtaaaccactgcgccacttcggcgtccatgccgccgacgggcttcgtgcgcgcccagacgatctccacgtccgggttttcctccataaacgcctccgcgatgtaataagtggagttgaacacgtcgggcgaatcggcggtaggcgtgcggttcgtcgaaggcgtgtagccgtgcagatccaccaccaggcgcactttgcccgacgaggagcctgcatcgatgaagggaacgatgctgaaagcgcagatgacggcggctaaggcgataattcccgcccgctttgctttttgcattttctgatcggtcaattcccgtcacctcctttttgatttcgtatttttatcatatcactacatttccgccaatgatatattgttggggctaaattatataaatttttggctaatctgacaaaacgcctttactttccccgaaaaacgtgctatcattcttttcagaaggatttgcaggatttttgcgcgatttgggagaaaacatgaataatattaacgtaaatttttatttcaaacgaacggatccgatcgattataacattccctttcacacgcacaaatgctatgaattggtttattattatacgggaaagggacattgcctcatcggggaacgagaattctcttacgaacggaaccattacgtcgtcattcctccgcacaccaagcacaacgacgtgcacgaagaaaattgcaagatcctctgcatcggtttcactctggacagagaagagggcgaaatccccgcgggaagctatgcggacgaaaatcgcaacgtgatgaactaccttaaattcgtttccgcagaattcaaggacaggcgggaggattttgtttccgtcatttccaatcttttgggcaacgtcatcgtggaaatcaagcgcacttcttcctgtctggataaagcgtccccccatcaggacgttttggagcaggcgatcaattacatcaacgaatatttcctcaccgaaatcacgcccgaacagctcgccaatatcaccaattattcctaccaccgcttccgacacatctttaaaaacgcgatggggattccccccaagcagtatgtcatcatcaagcggctcgaatacgccaaaacgctgctcgccaattcccacgcctccgtgacggagatcggctatcaatgcggctttgcctgcacctctctcttcattaaacagttcaagaaaaatatggacgtgacgcctgcgcagtacaggcgtcagctgcgctccaacgtcgtcttttcctccgaacaatccctatacgaaaatcagtcccgttcctaatccgcgtccctaaaattcgttcggaacaaaaatttccaaacaggataacgcggcggcgttttcgcgttttttgcccaaaaatcctaacgacgggtctgactcatactttttgcaagctccctttaagagcgtgaatataaacaacggcgctccccctctcaccgcattgcctcgcccaagctaaaaatttgcctccgcgctttttcccgcccggtatcgacgaaacggcctaacggagggctatccgttttgtatggagtttgaatcgcccctgccgcgctcgcagcctactttaacggataacgcttccgcatcccgtatcccctcgcggggcgttttccttcgaaaataaagtcctccaccggtatggccgacggattttacaaggcgggcgcataaatctgccccgccttgttctctcatagcaaaaacgggaatttacgtgtcagtaaattcccgtttccgtcgataaagctctgttaaaatatttttttccgatttttaaggcgtagtccgcctttttcaaatccctcttacggcgaatccttcctttcgggcggcgtcttctcaaaggtcttcgtttatgaaaccctttccgctcgcgttcaaagcgttatttgtcgcgcgttttcaagagcggtaacgcgccttttaaaccgtcgccgtcagcttattttccagcacgacgtcctttccgtacaggcgcagaggcgtctttcccgcggcggaacattccaatatcgtttccctgtgcgtcaccgtcaccttgacgggtctgccgtccaaagtcaaacggaaggaatatttgttccatattttcgggattttcggcgcgaggaggaatttttccccgtccgtgcgcacgccgccgaatccgtatacgatattcatccacgccgcggcgatcgacgtcgtatgcagtccctgcgaggcgttgcggttgtaatcgtcgagatccatgcgcgtcgcgaatccgaaaaattccagcgcttctttgtccttgcccagttcttccgccaaaatggaatggacggacggactcagagaggattcatgtatcgtcttgggttcgtaaaactcgtaattcgcgcgtttgcaatccgccgaaaaggactgattatagaggaacaaaaacatcagcacgtcgggctgcttgatcatgtcgttgcgatagattctgtcgtaagaccaatgatcgtacagcgggaaatcggtgacgggaatggaatgaatatcgacgtgcggcagatcgaaaaagccctcgtgctgttcaaagatcccccgacttttgtcgaagggcagataggtctttgccgcggcttcttcgacgcgcgcgcaaaactcggcgtcgatccccagttccgcgcctttttcgggataacggcggcagagctccaaaaaatattcgaatgacttttttgccatgaaattcgtatagcaattgtgattgaccatcatctgaaactcgtccggtcccatgacggcatagaagccgaattttgtatgtgccgcgttccactgcccgcgcgaaagcaggaattttgtcacctccgccgtcatttcaaatccgtaatcgcgcacgaacgcctcgtctttcgtcacgtgttcgtagtgccagacgccataaacgatgcccgtgctcggctgaaattgcaggctcgcgtgctgccacaggttgcacccttccgttccgttcagggtggcgatgggataacacgccccttcgcaatcgagcatttttgcccgctccttcgcctcggggagtttggaatagcgatataagagcagatttttcgccgccgcggggttgttgaggagatagtaaggcagacaatacgtttccgtgtcccagaacgcgtgtccgctgtacgcctcccccgttaagcccttggcgccgatattgttagccggatcgtagccgtgataggtctgctgcaattgaaagaggcagaatcgtattccctgctgattctcctcgtccccctctatctcaatgtccgaagcctcccaaaatcgctcccaatagtcccgcgcttccttgaacgcttcgtcccagcccgcggacgcgctcgccgcaagttcttcttccgcgtcccttttcgcttcttctttgggaacggaaattttcttttccgcgcgattgaccgtgtagcgcgcgatctcggcgcgcttcccttcttccaggaaaagcgtataaagagcctgcgcattccttttatcggaggaaaaaacaccctttcccgcggcggcgattttctgtgcgcagacgactcgctgaccggtggttggcgtgacggaagaaagatacaaaacgccctgttccgcgtccgtcccgctgtcctcgtgctcccaataacaatggtttccccagtgcagcgcgttcccgtcgagcgcgcagaccaccttcacgcacgcatttcccgccagggaggtgaaacggaggcgctgatagccgcggcggcaatgcaccatactcaaaaaacgttcaaactcgcagagaattttatgcccgctcttagttttccagacaaagcggcgggacagcacgcccgatttgaaatcgagcgtccgcacgtactcggaaatatccgatacggcggtgtccagcttttcgccgtccgcctctatctcggttttcagccaatccacggaattgatcatgaaatgagtgcgctggacgatccccttgtaatgaatgggggtgtcctccaaagcgtattcgtaaatcccgttgaaataggagcctttcaaggtgggcgcggaaacgccttcctcggcgaatccccgcactcccatatactcgttgccgagagaaaaaatggattccgccacctgattgtgcgcggggtcaaatcccctctccgtcacggaaaacggctccgtacaaaaatatctgtccgcgattttagccataattttctccttaaatcttttgttttcttcggcgctttgccgatggtccttctcgctttcccctaaatcctctgtttttccaaagcataatttagtcgggaaccgcatttttttcccttcccgtttttccaaaaacgcgcttttcgtctttttccttcttttaaagctttcggctgttccgatttcgccgtcgttttcccttttcccgcggctttccgcgagaatttttcccgcggccaaagccctaaggggaggctttctctaatccttcattcccgccgtcgccaccgagcctgtgatctgcttttggaacaggataaacagcgccacgggaggcagaatggagagagagagcaccatcagcagataatccatgccgaactgcgccgacgtgctcatgttcgattgcaggtcaaatatcttcaccatcaccgtccgcacgctgtcctgtttcaatacgaggaagggcatgagaaaatccgaccacgaagcgttgaccgtaaagatcgccacgacgccgatgatgggcttggagagcggcgccacgatcttgaaaaacagcgtcagcttgttgcaaccgtccaacctcgccgcttccatcagcgaagggggcagcgacttgaagtaggtgtgaaacagcacgaaataataagcgtttgcgcccgccgccagccaaagcggcacgggcgtgttgatgagattgagcgccacgatctgcttgaacaaaggcacgatgctaagcactgcgggcaccatcatggagccgagcaccaaggcgtagatcgccttatatcccgcgggcttaacgatggcgatggcgtatgccaaaagtccgttaaagatcacggaacacaccagcgcccccgcgatgacgacgacagaattgacaaaatattttccgaagttcatctccgtccacaccttccccatcttggaaaggtcaaaggaatcggggaaaaatcgaaagggcacggaataaatatcctgcgggttcttaaacgccgcgaaaaaaagactgagcggcggcacgacgctgacgacggcgacggaaaccatgaacaggataaacagcgcgtagacgattttcggccatacccgccgatagtccatgaaattgtaaagcccctccgtcttggaggcaagtctgttttttttcatacttcccccttaatttttgtcggcgatccgtctttgaacggcgaagtatacgcccgtaaaggcgaagatgatgcccgcgagaatgacgcccgtcgcggcggaaagccccgcttcgcggtcgcggaacgcataattgtagctcaaaagcatcagcgaaacgctggcgtccgtccccccgtccagcatcaccatcggctcgtaaaacacctggaacacggaaatgatctgtaagacgaaaagcacactgatattgggcagaagatagggaagggtgacgtagcgcagcctttgcgcgaagttcgccccgtccagcctcgccgcctcgtaataggtggaatccaccccttgcagcgcggcgagatagatgagcatagtcgcccccgcccccttccacgtcattgccaccacgatgagtatgatggacaatctcgaatcgtcgatgagaagggagggtttgccgccgagggaaacgaggatgctgttgaccatcgatcccgcgctgggatcgaagagaaaggtccaaaggatcgccgccgccacgccgggcaccatattgggaagataggcgaacacgcggaagacgcccttcaaatgcaccacctcgttgagaatgacggccatgacgatcggcagcagaaaaccgataaggatcgaccagaacgcatacttgcaggtattccagagcgcttttaaaaacagcgcgtccttgaatacggcggcataattttcaaaccagacgaaatgctctttattcagtcctttcgtttcgaagagggaaagcgagatattcgaaaagagaggcagccaaacgaaaaacacgaacagggcaaggctgggcagaatgatcagccatccgcccagattcctttttatgaaattcagcgcgtcccggcgcatcgcaggcatcgcacgtttcataatcgttcacctcacttgttgagcttgcttaaatatctttcgctgaaattgctgttcgccgtcgaaagcagcgcacggggattcgccgtcgaaggatgttccaaaacggattgaatggcgcggtcgagttcttcgtacatcttctgacagtagtttggctcctccacccgctgcatggcgtcgatgctgtcgaaaaacgcctgaaaataattcatattgacgttgatatatttcggctctatttcctccaccatggcgatatagtcgaggtttttccaaggctttaaggtaggcgtgatgggcatccccttgctctgcgccgtctgatgaccgagttctatcgcctctttggcaatctcgctcacttcgggcgaacgccccatatattcgaggaatttcagcgcgccgagcacctgttcgtccgtcgcgtccttggagaacacaaagggagtgccgccgtagagggtatacgccttgtgcacgccgtcgctcggcatgggcaccagcaccagatcgtccttgttaaaattataattcgtcacgggcatactgatggcgtcgctgcccgcgaaacacatggcgaccgagccggtgccgatgagcttataccaatcgctgtacggcagggtgacgccgggagccaaaagatcctcctgtttcatcgtctgtatccattccaaagcggcgacgcactcgtcgctgtcgaggtgggacacccactttccgtccgccgtcttttcctgcaacgtagcgccgaaattccaggcgagattggaaaactgccagccgccgttctgattggaagacagcaccgcaagccccttcgcctccgtcgattcgcagatgattcgggacgcttcgtagatctcttcaaaagtcgtgggatagagcggattcccctcctcgtccacgatgtccacgatgccgtcgccgtccgagtcgtagaaaattcccacgtccgcaaacagcttcttgttgatcatcaaaccgagcgcgtaaccgtccctgggcacgccgtaaatgcggttgtctacgattaaatttgcaatcatattctcgtcgagcttatcgatccagccgagttcttccagctgatcggtaatatcgcggatatagccgctctcgatcagggagggcggttcggtcatccaggtctggaacacggtaggcaatacgcccgaatcggcgtcggagatgaacgactgtaaattataggtataattggagggaattatctcgtattcgggattttccttttcgaattcttccttccaatgcctgtacatggcgatatcctgcgtgaggttagcttccggccacataccaagctccaccttgatttttccgttatcctttccgcaggcggcaaagcccgcgaagcagcccgcgcacaggacggcggcgagggcagtattgacgatctttttcataagcttctcctttcttggtttatcttacattcttattataatctcaaacgcgcccgataacaatgggggacatctgcaaattcgggggaggaaactgttaatcggcgaaaattctttacacggacggcttttcgtgctatactataagcgctcgggaacagaaaaaagtcggacaaaccgcaatctttccaaggcgcgggttgaaaaccttttgacggcggaatcgcccgcggccttgcgagagtgcggctttgactcctttttaccgacaaacaacccgcaatcttccgaacgcatacagattccatagccgaaagttttttagaaaaagggctgtctaaacgaaaaacaatcgacgcagaagagaggaatactccgcaattttgcaaacggaccgattcaaagtcttttcagcgcctcgaaggacattttttaagttttcgcttccctgtttgcgccgtcgttttccgcaatccggcgcctttttgtaagcgcggcgttgcgcttaaagatagtctttgcttttttcgattcttttataggaggcaatcggataattatgagccgtcccgtcacatttacgaaaaaaataatgcgtattttgatcgccgcggcggcgtgtttctgcctcttgacgggcggaatcgccgccgctctgtcgggcgtagggctttaccgcaatatctccaccttcgcttcgcaaaacgccgcgcaatccctttccgacatgaacttatatatccgcaccgcggtcgcggcttcccgcatcatcacggataacgagagcatcgtcgccgcgctgcaaaatcctcaatcgcagacggaaacggacaatatcatgacgcagttccagctcaccacgctctcggtatacagcgcgcagctgtacgatctcaacggcaattgctataagacgtcggggacggaggacgtacccgccctcgcggagcttttggacaacgagattttcaaagattttgccgacggcagtcagacgggtatttattggctccgcacgtccgcaatgccggggatctataataacaatcgctataaccgcgcggcgggaatgtatacgttcgtgacgaaagtaaccgacggcgcggacaccgtcggctatttcctgatggatttcaatccctatcgtatgctcggcctttttttcgattaccgcgctttgaacggctatgaaaacagcgtcgcctacttcactttggacggcgccgcgctgacggcgacctccacgggggaagaaaatccgcacgccttcgtgccctcgggcgaaagttcgcccaggaaggagaacggaaaactgtatattttcgaaaagctgtccgccgcgggcgcctctctcgtcgtcgtattgcccttgaaccgcttttacgccaatctcgcgatcatcatcggcgccgccgcgggaggattctgcgtctgcgtcgcgggcgcttatctcgtcattcgcatttccatgaaaaagacgctgaaaccgctcacgcagctgacgaaagaactggaaaagaccaagaggcaggacgatcggcaggattaaaaaccctgccgccacgaagagaaaggagcgggcgattaaattctatttttcgggcgcaggaacgggcgtttgaataagctccgcttttaatttcgcgtttctattttttcagaccgagtcaggacggagtacgctctgatcaactcttattttcccgcggcagcagacctttcttgccgtccttttttatacaattttacccttacggaaaattcttcggcggtcctgttccctaaaaatctcctttttcgcatttttcccgcaaagtcgatttttacaacttcttagtcggttatattcctttttccctgtcccctttccatgccgcaagggagtcgttcctcccgcccactctccgagaaatttctccgcaaaagcgttttattctcttttatcgtaaaacgaatctctttacctccccgcggcaaagagattcgttcggcttctccccgtcatgcactttttgaatcccctgattcgctcaaaagatatttttctaacctcggccccgatgcgctccctctcccgcgtgccttacgcggaaaaatccctttgaattttccgccttaggacgtaaaaccttcccgtttccttactcccgcaagaaaggaattgccgtccgtcgcctctataaattttcttcgccgcatccctgcccctgccgaaaagcttttttgagttttccgccacgacgactgaaatcaaagttccggactgtccgaagctttgatgcgaatgacgacgcgcgtcccctttccgggcgcgctttccgtatgcagaccgtattcttccccgtattcgagccgcacccgctcgtccacgtttttaagcccgtatccgcccgatcggcctccctcggacgcacgcgcggcggcgggatcgaatcccaccccgtcgtcctcgatttcgtaaacgatgtccccgccgtccagccgcgcggacaccttgatgcggcacaccctcttcaagcccacgataccgtgcttgacgcaattttccacgatgggctgcaaaaggagtttcagagtgtatttattcgccacttcgccgtcgaagtcttcttcaaaaacaaaccgttcggggaagcgcactttttgtatctgcacgaagttctgcacaagttccatttcctcgcgcacggtgatgaatttatccccgttgtgcagacttgcgcggaagagggcggcaagactcagcaccatatgctcgatttcgggctgcctgttgattttcgccatccaggagatcgcgtccagagtgttgtagaggaaatgcgggttgatctgcatctgcaagctttcgagttccagctttctcttcacctcgtcgtcgcggcgggtcgtcaggagaagttcgtctatcctgtccagcatttcccgataagccccgtagagaaggtcgaattcctcaatgccgctgcttcccgccgccttgtcaagacttcggatccgccccgaaaactcgctgatggggcgggagagccgccgagcggaaaaccacgcgaacacgatgccgccggccagcgccgcgacgccgatgagga
